(19) United States
(12) Patent Application Publication
(10) Pub. No.: US 2026/0068890 A1
(43) Pub. Date: Mar. 12, 2026

(54) ENDOPHYTIC MICROBIAL BIOSTIMULANTS

(71) Applicant: EVONIK OPERATIONS GMBH, Essen (DE)

(72) Inventors: Stefan GILCH, Dülmen (DE); Hans-Georg HENNEMANN, Bedburg (DE); Linda MICHEEL, Dorsten (DE); Juilia NIEWALDA, Selm (DE); Hanna-Christin LAKOWITZ, Bochum (DE); Moritz Sebastian ENGEMANN, Dortmund (DE)

(73) Assignee: EVONIK OPERATIONS GMBH, Essen (DE)

(21) Appl. No.: 19/107,840

(22) PCT Filed: Aug. 24, 2023
(86) PCT No.: PCT/EP2023/073217

§ 371 Date: Feb. 28, 2025

(30) Foreign Application Priority Data
Sep. 1, 2022 (EP) 22193372.4

(51) Int. Cl. A01N 63/20; A01N 25/10; A01P 21/00; C12N 1/20; C12R 1/01

(52) U.S. Cl. CPC A01N 63/20; A01N 25/10; A01P 21/00; C12N 1/205; C12R 2001/01

(57) ABSTRACT

The present invention relates to a composition comprising:
an isolated endophyte, wherein the endophyte is a strain of Priestia aryabhattai, and
an adjuvant
wherein the Priestia aryabhattai strain has Accession Number DSM 34352.

### FIELD OF THE INVENTION

[0001] The present invention relates to a novel isolated plant microbiome strain, in particular an endophyte, plants infected with such strains and related methods. In particular, the isolated endophyte may be used in a composition for use as a biofertilizer and/or biostimulant or for bioprotection in plants. The composition may further comprise an adjuvant.

### BACKGROUND OF THE INVENTION

[0002] In many cases, the growth and/or yield of agricultural crops is limited by the amount of nitrogen that can be used or taken up by the plant. In order to overcome this limitation, exogenous nitrogen is added to the soil before or after sowing. The nitrogen fertilizer can be of organic (e.g., urea, amino acids, manure, horn shavings) or mineral (e.g. ammonium nitrate, ammonium sulphate, potassium nitrate) origin in nature. What all these anthropogenic nitrogen fertilizers have in common is that their production, transport and/or application is energy-intensive and thus leads to a positive CO₂ balance. In particular, ammonium nitrate and urea, which are by far the most widely used nitrogen fertilizers worldwide, have a large CO₂ footprint because their common precursor ammonia (NH₃), is derived from the Haber-Bosch process. This process uses atmospheric nitrogen (N₂) and hydrogen (H₂) to synthesize ammonia (NH₃) under high temperatures and pressures. This is process thus adds to climate change and is not good for the environment.

[0003] An alternative and more sustainable method to provide plants with at least some part of the nitrogen they need is to use biofertilizers. Biofertilizers are made up of living microorganisms that are able to reduce atmospheric nitrogen and thus make it available to the plant in form of ammonium/ammonia or organically bound nitrogen. These organisms have to be applied in a metabolically active form to the seed, root or in rarer cases to the leaf.

[0004] Previous and current use of these biofertilizers apply the nitrogen-fixing microorganisms either to the surface of the seed, to the leaf or the soil. Due to this fact, the organisms are exposed to high stress from abiotic factors such as temperature, drought, pH, and wash-off from rain and high moisture. The effectiveness and efficiency of the biofertilizers is reduced. A large amount of the biofertilizers is thus needed to enable them to be effective in providing bioprotection to the plants and/or increasing yield of the crops. This increases the costs of farming.

[0005] Further, biotic factors such as high competition with the already predominant plant or soil microbiome or the presence of antibiotically active substances also reduce the survival rate of the exogenously added nitrogen-fixing microorganisms on the respective surfaces. This also reduces the efficiency of the currently available biofertilizers.

[0006] Accordingly, there is a need in the art for a means to better exploit these endophytes for use as biofertilizers and/or biostimulants to improve sustainable agriculture and the environment.

### BRIEF DESCRIPTION OF FIGURES

[0007] FIG. 1 is a picture of maize growth (without treatment) after 6 eight weeks under different nitrogen fertilization (0 kgN/ha, 21 kgN/ha, 42 kgN/ha). Nutrient-poor Oxisol soil was used as test soil (substrate).

[0008] FIG. 2 is a picture of maize growth at 21 kgN/ha, once without (left) and once with application of Priestia aryabhattai DSM 34352, which was applied in a mixture with S301® to the leaf only.

[0009] FIG. 3 is a graph showing shoot dry matter of maize at different nitrogen fertilizer levels, with and without application of Priestia aryabhattai DSM 34352, which was applied in a mixture with S301®.

[0010] FIG. 4 is a graph showing root dry matter of maize at different nitrogen fertilizer levels, with and without application of Priestia aryabhattai DSM 34352, which was applied in a mixture with S301®.

[0011] FIG. 5 is a graph showing the increase in yield of the crop in the presence of Priestia aryabhattai DSM 34352.

### DESCRIPTION OF THE INVENTION

[0012] The present invention attempts to solve the problems above by providing a novel isolated endophyte from Priestia aryabhattai that is capable of being an effective and efficient biostimulant and/or biofertilizer. These newly isolated endophytes, which due to their unique genetic equipment and/or in the presence of specific adjuvants, are able to enable and especially enforce the penetration of these endophytes into the plant or part thereof to which the endophyte is brought into contact with. In particular, in the presence of the right adjuvant, the newly isolated Priestia aryabhattai strain is able to penetrate and proliferate in the plant tissue or seed. This way, (a) biotic stress can be reduced and thus the survivability or effectiveness of the organism in the plant is significantly increased. Inside the plant or seed or any part thereof, the active Priestia aryabhattai strain is in a regulated homeostasis, which increases both the efficacy and survivability of the nitrogen-fixing endophyte.

[0013] According to one aspect of the present invention, there is provided, a substantially purified or isolated endophyte, wherein the endophyte is a strain of Priestia aryabhattai which provides bioprotection and/or biostimulant phenotypes to plants into which it is introduced, wherein the strain of Priestia aryabhattai has Accession Number DSM 34352.

[0014] The newly isolated endophyte, Priestia aryabhattai, according to any aspect of the present invention solves the problem of low stability of microbial nitrogen fixers as it is an endophytic organism that has both an unprecedented high nitrogen fixation capacity and the ability to penetrate into the endosphere of the plant that most other existing endophytes used in agriculture do not have.

[0015] The endophyte according to any aspect of the present invention was isolated from the inner plant tissue of a copper flower (Minuartia verna subsp. hercynica) and typed and sequenced as Priestia aryabhattai sp. Greenhouse experiments demonstrated that Priestia aryabhattai is capable of providing significant amounts of enzymatically fixed nitrogen to the plant in both seed and foliar applications to maize (Zea mays, variant LG 31.224). Thus, maize inoculated or sprayed with Priestia aryabhattai was able to show the same or even improved growth as fully fertilized maize (42 kg/ha) when fertilized only with half of the synthetic nitrogen fertilizer (21 kg/ha). In comparison, significantly reduced growth was observed in maize not inoculated with Priestia aryabhattai at 21 kgN/ha.

[0016] As used herein, the term “endophyte” is an endosymbiont, which refers to a bacterial or fungal strain that lives within a plant for at least part of its life cycle without causing apparent disease. In particular, the bacteria or the fungus is closely associated with the plant where the term ‘closely associated’ refers to the bacteria or fungus living on, in or in close proximity to the plant. For example, it may be endophytic, and living within the internal tissues of the plant, or epiphytic, and growing externally on the plant. There are many different endophytes that have been discovered. However, only a few have been commercially used as endophytic inoculants for agriculture such as arbuscular mycorrhizae, rhizobia, and Azospirillium. Clavicipitaceous fungi is also an endophyte that is used in agriculture. The endophyte according to any aspect of the present invention is a strain of Priestia aryabhattai with Accession Number DSM 34352.

[0017] As used herein the term “substantially purified” refers to an endophyte being free of other organisms. The term includes, for example, an endophyte in axenic culture. Particularly, the endophyte is at least about 90% pure, more particularly at least about 95% pure, even more particularly at least about 98%, 99% or 99.5% pure.

[0018] As used herein the term ‘isolated’ refers to an endophyte according to any aspect of the present invention that is removed from its original environment (e.g., the natural environment if it is naturally occurring). For example, a naturally occurring endophyte present in a living plant is not isolated, but the same endophyte separated from some or all of the coexisting materials in the natural system, is isolated. In particular, the isolated endophyte according to any aspect of the present invention may be a pure culture of a single strain and this single strain was submitted to the German Collection of Microorganisms and Cell Cultures (DSMZ) located in Inhoffenstraße 7B, 38124 Braunschweig, Germany on 11 Aug. 2022 and has Accession Number DSM 34353. Particles for keeping and modifying cells are available from the prior art, for example Sambrook/Fritsch/Maniatis (1989).

[0019] As used herein the term “bioprotection and/or biostimulant” may refer to the endophyte according to any aspect of the present invention possessing genetic and/or metabolic characteristics that result in a beneficial phenotype in a plant harbouring, or otherwise associated with, the endophyte. Such beneficial properties or phenotypes resulting from the endophyte being present in the plant include improved resistance to pests and/or diseases, improved tolerance to water and/or nutrient stress, enhanced biotic stress tolerance, enhanced drought tolerance, enhanced water use efficiency, reduced toxicity and enhanced vigour in the plant with which the endophyte is associated, in comparison to a plant which is not associated with the endophyte according to any aspect of the present invention or to a endophyte such as standard toxic (ST) endophyte. In particular, the bioprotection and/or biostimulant phenotype according to any aspect of the present invention includes nitrogen fixation in the plant into which the endophyte is introduced.

[0020] The pests and/or diseases may include, but are not limited to, fungal and/or bacterial pathogens, particularly, fungal. In one example, the endophyte may result in the production of the bioprotectant compound in the plant with which it is associated.

[0021] As used herein, the term ‘bioprotectant compound’ refers to a compound that provides or aids in providing bioprotection to the plant with which it is associated against pests and/or diseases, such as bacterial and/or fungal pathogens. A bioprotectant compound may also be known as a ‘biocidal compound’.

[0022] As used herein, the term ‘biostimulant’ refers to any substance or microorganism applied to plants with the aim to enhance nutrition efficiency, abiotic stress tolerance and/or crop quality traits, regardless of its nutrients content. The endophyte according to any aspect of the present invention acts as a biostiumulant to the plant and/or part thereof to which it comes in contact with. A more detailed definition of biostimulant is provided at least in Ricci, M., General Principles to Justify Plant Biostimulant Claims, Frontiers in Plant Science (2019), 10.

[0023] As used herein the term ‘introduce’ refers to the contact and/or treatment of a plant or part thereof with an endophyte where the endophyte is delivered to the plant. In particular, the endophyte is introduced into the plant or part thereof to encourage the endophyte to grow there. Any method of introduction of the endophyte according to any aspect of the present invention to the plant or part thereof may be used. For example, the endophyte may be sprayed on or inoculated in the plant or part thereof. In particular, the endophyte may be inoculated for at least 1, 2, 3, 4, 5, 6, 7, 8, 9, 10, 11, 12, 13 or 14 days before they start to grow in the plant. In one example, the endophyte may be sprayed on the leaves of the plant (i.e. foliar application. In this example, the spraying process takes place either only in the early development stage of the plant (around the six-leaf stage) or multiple times (around the six-leaf stage and several stages of the emerging/adult plant). A skilled person would be capable of identifying the best introduction process to be used on the plant. In particular, the plant or part thereof may be infected with the endophyte by a method known in the art. More in particular, the plant or part thereof may be infected with the endophyte using a method selected from the group consisting of inoculation, spraying, breeding, crossing, hybridisation, transduction, transfection, transformation and/or gene targeting and combinations thereof.

[0024] In particular, the endophyte according to any aspect of the present invention is the Priestia aryabhattai strain with Accession Number DSM 34352. In particular, the sequence of the strain has been divided into loci and comprises the nucleotide sequence of SEQ ID NOs: 1-254 and variants thereof. In particular, the sequence of the 16S ribosomal RNA is SEQ ID NO:200.

[0025] The term “variant”, as used herein, comprises amino acid or nucleic acid sequences, respectively, that are at least 70, 75, 80, 85, 90, 92, 94, 95, 96, 97, 98 or 99% identical to the reference amino acid or nucleic acid sequence, wherein preferably amino acids other than those essential for the function, for example the catalytic activity of a protein, or the fold or structure of a molecule are deleted, substituted or replaced by insertions or essential amino acids are replaced in a conservative manner to the effect that the biological activity of the reference sequence or a molecule derived therefrom is preserved. The state of the art comprises algorithms that may be used to align two given nucleic acid or amino acid sequences and to calculate the degree of identity, see Arthur Lesk (2008), Thompson et al., 1994, and Katoh et al., 2005. The term “variant” is used synonymously and interchangeably with the term “homologue”. Such variants may be prepared by introducing deletions, insertions or substitutions in amino acid or nucleic acid sequences as well as fusions comprising such macromolecules or variants thereof. In one example, the term “variant”, with regard to amino acid sequence, comprises, in addition to the above sequence identity, amino acid sequences that comprise one or more conservative amino acid changes with respect to the respective reference or wild type sequence or comprises nucleic acid sequences encoding amino acid sequences that comprise one or more conservative amino acid changes. In one example, the term “variant” of an amino acid sequence or nucleic acid sequence comprises, in addition to the above degree of sequence identity, any active portion and/or fragment of the amino acid sequence or nucleic acid sequence, respectively, or any nucleic acid sequence encoding an active portion and/or fragment of an amino acid sequence. The term “active portion”, as used herein, refers to an amino acid sequence or a nucleic acid sequence, which is less than the full-length amino acid sequence or codes for less than the full-length amino acid sequence, respectively, wherein the amino acid sequence or the amino acid sequence encoded, respectively retains at least some of its essential biological activity.

[0026] According to another aspect of the present invention, there is provided a biostimulant comprising an isolated endophyte, wherein the endophyte is a strain of Priestia aryabhattai with Accession Number DSM 34352. The endophyte is according to any aspect of the present invention.

[0027] According to a further aspect of the present invention, there is provided a composition comprising:
[0028] an isolated endophyte, wherein the endophyte is a strain of Priestia aryabhattai, and
[0029] an adjuvant,
[0030] wherein the strain of Priestia aryabhattai has Accession Number DSM 34352.

[0031] The composition according to any aspect of the present invention solves the problem of low uptake rates and uptake kinetics of endophytic organisms into the endosphere of the plant. Adjuvants enable both an efficient uptake through stomata on the upper and most prominent on the lower surface of the plants, little injury wounds and growth gaps in the cuticula. The use of adjuvants to support the endophytic process (the penetration of the microorganism, particularly Priestia aryabhattai into the plant cell) allows the use of lower drug concentrations (CFU/mL or CFU/g) because uptake occurs more effectively than without the addition of adjuvants.

[0032] The endophyte is the Priestia aryabhattai with strain with Accession Number DSM 34352.

[0033] The isolated Priestia aryabhattai strain according to any aspect of the present invention has the appropriate genetic equipment to invade the plant tissue and survive and proliferate within the tissue. This in combination with the suitable penetration sites on the plant and/or seed surfaces with which the Priestia aryabhattai strain is inoculated enables the endophytes to successfully penetrate the plant tissue via the stomata of the leaves or via small injuries or growth gaps. Active penetration of the non-uniformly shaped cuticle has also been reported.

[0034] However, since both speed and kinetics of the endophytic process is limited in nature and thus occurs in most cases very slowly and host specific, the presence of an adjuvant in the composition according to any aspect of the present invention enables a successful uptake of the endophyte according to any aspect of the present invention into the plant tissue (endosphere) efficiently and effectively.

[0035] Usually when Priestia aryabhattai alone is applied to the soil, leaf, or seed, a slow endophytic process results in the exposure of the organism to biotic and abiotic stresses for a correspondingly long time. This can lead to a significant reduction in Priestia aryabhattai titer and thus reduced efficacy of the product. The presence of the adjuvant according to any aspect of the present invention cancels this negative effect and in fact increases the efficacy of the composition by accelerating the uptake of the organisms into the target plant or to enable it at all.

[0036] An ‘adjuvant’ as used herein, refers to an ingredient or a substance in the composition according to any aspect of the present invention that increases or modifies the activity of the other ingredients namely, the isolated Priestia aryabhattai strain. In particular, the adjuvants according to any aspect of the present invention are biocompatible adjuvant (active ingredient mediator) that are added to the suspension of microorganisms to form the composition according to any aspect of the present invention. Any adjuvant known in the art may be used in the composition according to any aspect of the present invention. In particular, the adjuvants according to any aspect of the present invention may be selected from the group consisting of (A), (B) or (C) and mixtures thereof wherein (A), (B) or (C) are:
[0037] (A) a polyglycerol ester with a general formula (I) of,

[chemical structure]

[0038] wherein, M is [C₃H₅(OR″)₂O_{1/2}],
   [0039] D is [C₃H₅(OR″)₁O_{2/2}],
   [0040] T is [C₃H₅O_{3/2}],
[0041] j=1 to 10, preferably 2 to 3, more preferably 2;
[0042] k=0 to 10, preferably greater than 0 to 5, more preferably 1 to 3;
[0043] l=0 to 3, preferably 0 to 1, more preferably 0;
[0044] wherein, the sum total of j+k+l is 1 to 20, preferably 2 to 4, more preferably 3
[0045] wherein the radicals R″ are each independently selected from the group consisting of acyl radicals R′—C(═O)— and H, with the proviso that at least one radical R″ is not equal to H;
[0046] wherein the radicals R′ are each independently selected from the group consisting of monovalent aliphatic, saturated or unsaturated hydrocarbon radicals with 3 to 39, preferably 7 to 21 more preferably with 9 to 17 carbon atoms;
[0047] (B) polyether-modified siloxanes of formula (II)

[chemical structure]

[0048] wherein, M¹ is P¹₃SiO_{1/2},
   [0049] D¹ is P¹₂SiO_{2/2}, D′ is P¹P²SiO_{2/2},
[0050] o is 2, p is between 0 and 0.1, q is between 1.0 and 1.15,
[0051] P¹ are independently hydrocarbyl having 1 to 8 carbon atoms,
[0052] P² are independently a polyether radical of the formula (III)

[chemical structure]

[0053] where
   [0054] m is from 3.4 to 11.0, n is from 2.5 to 8.0,
   [0055] and with the provisos that
   [0056] m/n is from 1.9 to 2.8,
   [0057] P³ are independently divalent hydrocarbyl radicals having 2 to 8 carbon atoms,
   [0058] P⁵ is hydrogen; and/or
[0059] (C) organomodified polysiloxane of formula (IV)

[chemical structure]

[0060] where a+b+c+d+2=20 to 210,
   [0061] a is 15 to 205, b is 1 to 12, c is 1 to 12, d is 1 to 12,
[0062] the R radicals are each independently identical or different, aliphatic or aromatic hydrocarbyl radicals having 1 to 10 carbon atoms,
[0063] the R4 radicals are each independently identical or different R, R1, R2 or R3 radicals,
[0064] the R1, R2 and R3 radicals are each independently different polyether radicals of general formula (V)

[chemical structure]

[0065] where
   [0066] e is 3 to 11, f is 6 to 30, g is 0 to 15, h is 0 to 5, i is 0 to 5, and
   [0067] R5 are independently the same or different and are each a methyl, acetyl or hydrogen radical.

[0068] More in particular, the adjuvants may be selected from the group consisting of BREAK-THRU® S 301, BREAK-THRU® SP 133, BREAK-THRU® S 255. The adjuvants used according to any aspect of the present invention leads to a reduction of the surface tension at the stomata or where there are injuries and thus to a lower rejection or an improved flow of the particles (microorganisms) through the orifices into the plant or part thereof where the microorganisms particularly Priestia aryabhattai with is inoculated. In particular, the use of adjuvants enables/accelerates the endophytic process of bacteria uptake. In addition, enhanced uptake also allows translocation of bacteria across the phloem from the leaf to the root, from where nitrogen fixation can also be enhanced. This results in the locally applied biostimulant acquiring a systemic character. Based on its systemic character, there is the advantage that in shoot-forming plants also the shoot is already inoculated with the biostimulant and thus passes the active ingredient on to the new generation.

[0069] The use of adjuvants also allows a uniform distribution of the Priestia aryabhattai from the upper leaf surface to the lower leaf surface where most (opened) stomata are present. Thus, faster and more widespread penetration of endophytes into plant tissue is enabled. Without the use of biocompatible adjuvants, especially in the case of foliar application, reaching the stomata on the underside of the leaf would be particularly hard if not impossible. The use of adjuvants with “anti-rinse-off” properties also increases the residence time on the upper surface of the leaf and thus promotes endophytic uptake into the plant tissue. The presence of the adjuvant reduces early wash-off of the endophytic nitrogen fixating organisms.

[0070] In one example, the adjuvant is (A):
[0071] (A) a polyglycerol ester with a general formula (I) of,

[chemical structure]

[0072] wherein, M is [C₃H₅(OR″)₂O_{1/2}],
   [0073] D is [C₃H₅(OR″)₁O_{2/2}],
   [0074] T is [C₃H₅O_{3/2}],
[0075] j=1 to 10, preferably 2 to 3, more preferably 2;
[0076] k=0 to 10, preferably greater than 0 to 5, more preferably 1 to 3;
[0077] l=0 to 3, preferably 0 to 1, more preferably 0;
[0078] wherein, the sum total of j+k+l is 1 to 20, preferably 2 to 4, more preferably 3
[0079] wherein the radicals R″ are each independently selected from the group consisting of acyl radicals R′—C(═O)— and H, with the proviso that at least one radical R″ is not equal to H;
[0080] wherein the radicals R′ are each independently selected from the group consisting of monovalent aliphatic, saturated or unsaturated hydrocarbon radicals with 3 to 39, preferably 7 to 21 more preferably with 9 to 17 carbon atoms.

[0081] In particular, at least one radical R″ corresponds to a radical of the formula R′—C(O)—.

[0082] More in particular, M, D and T may be:

[chemical structure]

[0083] Even more in particular, the polyglycerol esters of the mixture according to any aspect of the present invention is of the Formula (I(a)):

[chemical structure]

[0084] wherein
[0085] a=1 to 10, preferably 2 to 3, more in particular 2;
[0086] b=0 to 10, preferably greater than 0 to 5, more in particular 1 to 3;
[0087] with the proviso that:
[0088] a+b=2 to 20, preferably 2 to 4, especially 3;
[0089] wherein the radicals R″ are each independently selected from the group consisting of acyl radicals R′—C(═O)— and H, with the proviso that at least one radical R is not equal to H; where the radicals R′ are each independently selected from the group consisting of monovalent aliphatic, saturated or unsaturated hydrocarbon radicals with 3 to 39, preferably 7 to 21, in particular with 9 to 17 carbon atoms.

[0090] The polyglycerol esters of the composition according to any aspect of the present invention may have more than one radical R″ of the form R′—C(═O)—, particularly at least 2, more particularly at least 3.

[0091] The radicals R″ of the formula R′—C(O)— may be independent of each another identical or different acyl radicals of saturated or unsaturated fatty acids, where the fatty acids include 4 up to 40 carbon atoms, particularly, the fatty acids are selected from the group consisting of butyric acid (butanoic acid), caproic acid (hexanoic acid), caprylic acid (octanoic acid), capric acid (decanoic acid), lauric acid (dodecanoic acid), myristic acid (tetradecanoic acid), palmitic acid (hexadecanoic acid), stearic acid (octadecanoic acid), arachidic acid (eicosanoic acid), behenic acid (docosanoic acid), lignoceric acid (tetracosanoic acid), palmitoleic acid ((Z)-9-hexadecenoic acid), oleic acid ((Z)-9-hexadecenoic acid), elaidic acid ((E)-9-octadecenoic acid), cis-vaccenic acid ((Z)-11-octadecenoic acid), linoleic acid ((9Z,12Z)-9,12-octadecadienoic acid), alpha-linolenic acid ((9Z,12Z,15Z)-9,12,15-octadecatrienoic acid), gamma-linolenic acid ((6Z,9Z,12Z)-6,9,12-octadecatrienoic acid), di-homo-gamma-linolenic acid ((8Z,11Z,14Z)-8,11,14-eicosatrienoic acid), arachidonic acid ((5Z,8Z,11Z,14Z)-5,8,11,14-eicosatetraenoic acid), erucic acid ((Z)-13-docosenoic acid), nervonic acid ((Z)-15-tetracosenoic acid), ricinoleic acid, hydroxystearic acid, undecenoic acid, and mixtures thereof. In one example, the fatty acid may be a mixture of rapeseed oil acids, soya fatty acids, sunflower fatty acids, peanut fatty acids and tall oil fatty acids. In particular, for this context, the fatty acids may be radicals of oleic acid. When calculating the HLB value, the molar mass of the lipophilic molecule moiety is the arithmetic mean of the total of the molar masses of all of the radicals R′ which are present in the molecule.

[0092] Sources of suitable fatty acids or fatty acid esters, especially glycerides, can be vegetable or animal fats, oils or waxes. For example, lard, beef tallow, goose fat, duck fat, chicken fat, horse fat, whale oil, fish oil, palm oil, olive oil, avocado oil, seed kernel oils, coconut oil, palm kernel oil, cocoa butter, cottonseed oil, pumpkin seed oil, maize seed oil, sunflower oil, wheat germ oil, grape seed oil, soybean oil, peanut oil, lupine oil, rapeseed oil, mustard oil, castor oil, jatropa oil, walnut oil, jojoba oil, lecithin, for example based on soy, rapeseed, or sunflower, bone oil, claw oil, borage oil, lanolin, emu oil, deer tallow, marmot oil, mink oil, safflower oil, hemp oil, pumpkin oil, evening primrose oil, tall oil, as well as carnauba wax, beeswax, candelilla wax, ouricuri wax, sugar cane wax, retamow wax caranday wax, raffia wax, esparto wax, alfalfa wax, bamboo wax, hemp wax, Douglas fir wax, cork wax, sisal wax, flax wax, cotton wax, dammar wax, tea wax, coffee wax, rice wax, oleander wax or wool wax may be sources of fatty acids or fatty acid esters.

[0093] In particular, the polyglycerol ester compounds have the formulas (I), or (I(a)) with an arithmetic mean of 2.9 to 3.1 radicals of the form R′—C(═O)— and an HLB value of 4 to 6.5.

[0094] More in particular, the polyglycerol ester compounds have the formula (I(a)) with the sum a+b being 3 and the arithmetic mean 2.9 to 3.1 radicals of the form R′—C(═O)— and an HLB-value of 4 to 6.5.

[0095] Even more in particular, the polyglycerol ester compounds may be of the formula (I(a)) which have an arithmetic mean of 2.9 to 3.1 radicals of the form R′—C(═O)— and an HLB value of 4 to 6.5, where the acyl residues of fatty acid mixtures containing oleic acid, stearic acid, palmitic acid and gamma-linolenic acid, and said fatty acids particularly making up at least 85% by weight in the fatty acid mixture.

[0096] In one example, the polyglycerol ester compounds may be of the formula (I(a)) which have an arithmetic mean of 2.9 to 3.1 radicals of the form R′—C(═O)— and an HLB value of 4 to 6.5, the acyl residues originate from fatty acid mixtures containing oleic acid, stearic acid, palmitic acid and gamma-linolenic acid, and said fatty acids particularly make up at least 85% by weight in the fatty acid mixture.

[0097] In another example, the polyglycerol ester compounds used according to any aspect of the present invention may be of the formula (I(a)) which have an arithmetic mean of 2.9 to 3.1 radicals of the form R′—C(═O)— and an HLB value of 4 to 6.5, the mass fraction of oleic acyl residues is at least 75%, particularly 85%, more particularly 95% based on the mass of all acyl residues. Even more in particular, the polyglycerol ester is triglycerol trioleate.

[0098] A more thorough disclosure of the adjuvant (B) is provided at least in U.S. Pat. No. 10,390,530B2.

[0099] In one example, the adjuvant is (B):
[0100] (B) polyether-modified siloxanes of formula (II)

[chemical structure]

[0101] wherein, M¹ is P¹₃SiO_{1/2},
   [0102] D¹ is P¹₂SiO_{2/2}, D′ is P¹P²SiO_{2/2},
[0103] is 2,
[0104] p is between 0 and 0.1, particularly 0
[0105] q is between 1.0 and 1.15, particularly between 1.0 and 1.10, especially particularly between 1.00 and 1.05,
[0106] P¹ are independently hydrocarbyl having 1 to 8 carbon atoms, particularly methyl, ethyl, propyl or phenyl radicals, especially particularly methyl radicals,
[0107] P² are independently a polyether radical of the formula (III)

[chemical structure]

[0108] where
[0109] m is from 3.4 to 11.0, particularly 3.6 to 9.9, more particularly 4.5 to 8.5,
[0110] n is from 2.5 to 8.0, particularly 2.7 to 7.5, more particularly 3.0 to 6.0,
[0111] and with the provisos that
[0112] m/n is from 1.9 to 2.8,
[0113] P³ are independently divalent hydrocarbyl radicals having 2 to 8 carbon atoms, particularly ethylene, propylene, 1-methylpropylene, 1,1-dimethylpropylene radical, especially particularly —CH2CH2CH2—,
[0114] P⁵ is hydrogen.

[0115] The polyether-modified siloxanes of formula (II) have a biodegradability of greater than 60%, more particularly of greater than or equal to 63% and especially particularly of greater than or equal to 65%, the maximum value being 100%.

[0116] In particular, the polyether radical, calculated without P³O and calculated without P⁵, has a molar mass M(PE) calculated by 44 g/mol*m+58 g/mol*n where the indices m and n relate to formula (III). More in particular, the values of M(PE) are: lower limits M(PE) greater than 520 g/mol, particularly greater than 530 g/mol, more particularly greater than 535 g/mol; upper limit M(PE) less than 660 g/mol, particularly less than 630 g/mol, more particularly less than 600 g/mol. Even more in particular, the value of M(PE) is greater than 520 g/mol and less than 660 g/mol, especially greater than 535 g/mol and less than 600 g/mol. In particular, the sum total of m+n is greater than 9 up to 19, more in particular, than 9.5 up to 15 and even more in particular greater than 10 up to 12.

[0117] In one example, the polyether-modified siloxane used in the composition according to any aspect of the present invention is a polyether-modified siloxane of the formula (II) with an index c between 1 and 1.05, where the indices of the polyether radical of formula (III) are m from 3.4 to 11.0 and n from 2.5 to 8.0. In particular, the polyether-modified siloxane used in the composition according to any aspect of the present invention is a polyether-modified siloxane of the formula (II) with an index c between 1 and 1.05, where the ratio m/n is 1.9 to 2.8. More in particular, the polyether-modified siloxane used in the composition according to any aspect of the present invention is a polyether-modified siloxane of the formula (II) with an index c between 1 and 1.05, where the molar mass of the polyether residue M(PE) is greater than 520 g/mol and less than 660 g/mol. Even more in particular, the polyether-modified siloxane used in the composition according to any aspect of the present invention is a polyether-modified siloxane of the formula (II) with an index c between 1 and 1.05, where the P⁵ radical is hydrogen or with an index c between 1 and 1.05, where the molar mass of the polyether residue M(PE) is greater than 520 g/mol and less than 660 g/mol and the P⁵ radical is hydrogen. In particular, the polyether-modified siloxane used in the composition according to any aspect of the present invention is a polyether-modified siloxane of the formula (II) does not include any further polyether-modified siloxanes apart from those of formula (II).

[0118] A more thorough disclosure of the adjuvant (B) is provided at least in U.S. Pat. No. 10,299,471B2.

[0119] In one example, the adjuvant is (C), an organomodified polysiloxane of formula (IV)

[chemical structure]

[0120] where a+b+c+d+2=20 to 210, preferably 30 to 100, especially 40-60,
[0121] a is 15 to 205, preferably 35 to 45,
[0122] b is 1 to 12, preferably 1 to 8, especially 2 to 6,
[0123] c is 1 to 12, preferably 1 to 8, especially 2 to 6,
[0124] d is 1 to 12, preferably 1 to 8, especially 2 to 6,
[0125] the R radicals are each independently identical or different, aliphatic or aromatic hydrocarbyl radicals having 1 to 10 carbon atoms, preferably methyl radicals,
[0126] the R4 radicals are each independently identical or different R, R1, R2 or R3 radicals,
[0127] the R1, R2 and R3 radicals are each independently different polyether radicals of general formula (V)

[chemical structure]

[0128] where
[0129] e is 3 to 11, preferably 3,
[0130] f is 6 to 30, preferably 10 to 30,
[0131] g is 0 to 15, preferably 0 to 10,
[0132] h is 0 to 5,
[0133] i is 0 to 5, and

[0134] R5 are independently the same or different and are each a methyl, acetyl or hydrogen radical preferably with the proviso that the molecular weight of the polyether radical of Formula (V) is greater than 200 g/mol, preferably from greater than 400 to 2000 g/mol, and the proportion of ethylene oxide is greater than 45% by mass in the polyether, and the percentage by mass of ethylene oxide in the polyether radical R2 is at least 9% by mass greater than the percentage of ethylene oxide in the polyether radical R1, based in each case on the polyether radicals of the Formula (V), where the radicals of the Formula (V) may each be formed randomly, in a gradient or in blocks.

[0135] In formula (V), the units designated by the index ‘g’ are those which have originated from propylene oxide, the units designated by the index ‘h’ are those which have originated from butylene oxide, and the units designated by the index ‘i’ are those which have originated from styrene oxide.

[0136] The indices ‘a to d’ and ‘e to i’ may be natural whole numbers, or weight averages. The indices are preferably weight averages.

[0137] A more thorough disclosure of the adjuvant (C) is provided at least in U.S. Pat. No. 8,580,225B2.

[0138] The composition according to any aspect of the present invention may comprise any one of the adjuvants (A), (B) or (C). In one example, the composition may comprise a mixture of adjuvants such as (A) and (B), (A) and (C), (B) and (C) or (A), (B) and (C). In another example, the composition according to any aspect of the present invention may comprise more than one adjuvant (A) or more than one adjuvant (B) or more than one adjuvant (C).

[0139] The composition according to any aspect of the present invention may further comprise an emulsifier. The emulsifier in the mixture according to any aspect of the present invention may be different from the adjuvant. The emulsifier may be selected from the group consisting of fatty acid esters of polyhydric alcohols and their polyalkylene glycol derivatives, polyglycol derivatives of fatty acids and fatty alcohols, sorbitan fatty acid esters, ethoxylated and/or propoxylated sorbitan fatty acid esters, propoxylated sorbitan fatty acid esters, alkylphenol ethoxylates, propoxylates, alkylphenol ethoxylates, aminoxylated oxides, amine oxides, propoxylated amine oxides, aminoxylated amine oxides, aminoxylated propylene oxides, acetylenediol surfactants, ethoxylated and/or propoxylated acetylenediols, silicone surfactants and mixtures thereof. In particular, the emulsifier is selected from the group consisting of sorbitan fatty acid esters and ethoxylated sorbitan fatty acid esters. More in particular, the emulsifier is an ethoxylated sorbitan fatty acid ester or mixtures thereof.

[0140] The acyloxy radicals of the sorbitan fatty acid ester or ethoxylated sorbitan fatty acid ester have 4 to 40, in particular 8 to 22, more in particular 10 to 18 carbon atoms and/or that the sorbitan fatty acid ester or ethoxylated sorbitan fatty acid ester has 0 to 40, particularly 10 to 30, more particularly 15 to 25 oxyethylene groups. The fatty acids or fatty acid residues of the sorbitan fatty acid esters are particularly defined like the fatty acids or fatty acid residues of the polyglycerol esters. The acyl radicals (also referred to as alkanoyl radicals) are particularly derived from fatty acid mixtures containing oleic acid, stearic acid, palmitic acid and gamma-linolenic acid, said fatty acids particularly making up at least 85% by weight in the fatty acid mixture. Ethoxylated sorbitan fatty acid esters are particularly used, the mass fraction of oleic acid acyl residues being at least 75%, particularly 85%, more particularly 95%, based on the mass of all acyl residues.

[0141] The emulsifier according to any aspect of the present invention has an HLB value of greater than or equal to 9, particularly greater than or equal to 10, more particularly greater than or equal to 11. The HLB value may be a maximum of 16, more particularly a maximum of 15, even more particularly a maximum of 13. In particular, the emulsifier has an HLB value of 9 to 16, particularly 10 to 15, more particularly 11 to 13. The HLB value is determined as described above. The HLB value of the sorbitan fatty acid esters and/or ethoxylated sorbitan fatty acid esters is particularly determined as for the polyglycerol esters. The molar mass of the lipophilic part of the molecule results from the arithmetic mean of the sum of the molar masses of all radicals R′″ present in the molecule as part of the acyl radicals R′″—(CO)—. The radicals R′″ are preferably as defined for the polyglycerol esters. The radical R′″ as part of an acyl radical R′″—(CO)— of the sorbitan fatty acid ester or ethoxylated sorbitan fatty acid ester is particularly selected from the group consisting of monovalent aliphatic, saturated or unsaturated hydrocarbon radicals with 3 to 39, preferably 7 to 21, particularly 9 to 17 carbon atoms. The calculation of the molar mass of the entire molecule is carried out as defined above. In particular, the emulsifier is polyethylene glycol-20-sorbitan trioleate. The number 20 indicates the average number of ethylene oxide units in the polyethylene glycol residue.

[0142] The HLB value of the polyglycerol ester and of the emulsifier are matched to one another. The polyglycerol ester has an HLB value of less than or equal to 8, particularly less than or equal to 7, more particularly less than or equal to 6.5, and the at least one emulsifier has an HLB value of greater than or equal to 9, particularly greater than or equal to 10, in particular greater than or equal to 11. The at least one polyglycerol ester has an HLB value of 0.5 to 8, particularly from 1 to 7, more particularly from 2 to 6.5 and the at least one emulsifier has an HLB value of 9 to 16, particularly from 10 to 15, more particularly from 11 to 13. In particular, the emulsifier is polyethylene glycol 20 sorbitan trioleate.

[0143] According to a further aspect of the present invention, there is provided a composition comprising a culture medium of an isolated endophyte, and the endophyte, wherein the endophyte is a strain of Priestia aryabhattai with Accession Number DSM 34352.

[0144] The strains and compositions according to any aspect of the present invention can be obtained by culturing the strains of Priestia aryabhattai according to methods well known in the art, including by using the appropriate media. Conventional large-scale microbial culture processes include submerged fermentation, solid state fermentation, or liquid surface culture. The endophyte may be cultured under aerobic or anaerobic conditions and may be cultured in a bioreactor. The endophytes, and metabolites in culture media resulting from culturing may be used directly or concentrated by conventional industrial methods, such as centrifugation, tangential-flow filtration, depth filtration, and evaporation. The concentrated fermentation broth may be washed, for example via a diafiltration process, to remove residual fermentation broth and metabolites.

[0145] The fermentation broth or broth concentrate can be dried with or without the addition of carriers using conventional drying processes or methods such as spray drying, freeze drying, tray drying, fluidized-bed drying, drum drying, or evaporation. The resulting dry products may be further processed, such as by milling or granulation, to achieve a specific particle size or physical format. Carriers may also be added post-drying. In particular, the preparation of the strains is a supernatant of the fermentation broth. In one example, the composition according to any aspect of the present invention may be prepared according to the method provided in EP21198571 or EP21202623 wherein the endophyte according to any aspect of the present invention is first spray-dried and then brought into contact with at least one adjuvant. In particular, the adjuvant may be (A), (B) or (C) according to any aspect of the present invention. More in particular, the adjuvant is (A), a polyglycerol ester with general formula (I). Even more in particular, the polyglycerol ester is combined with at least one emulsifier according to any aspect of the present invention.

[0146] According to a further aspect of the present invention, there is provided a plant or part thereof infected with one or more endophytes according to any aspect of the present invention. In particular, the plant or part thereof infected with the endophyte may produce a bioprotectant compound. In particular, the plant or part thereof includes an endophyte-free host plant or part thereof stably infected with said endophyte.

[0147] Any plant or part thereof may be inoculated with the endophyte according to any aspect of the present invention. In particular, the plant inoculated with the endophyte may be a grass or non-grass plant suitable for agriculture, specifically a forage, turf, or bioenergy grass, or a grain crop or industrial crop. More in particular, the grain crop or industrial crop species may be selected from the group consisting of wheat, barley, oats, corn/maize, any grain legumes such as chickpeas, triticale, fava beans, lupins, field peas, canola, cereal rye, vetch, lentils, millet/panicum, safflower, linseed, sorghum, sunflower, maize, canola, mungbeans, soybeans, oilseed crops, tomato and cotton.

[0148] The endophyte according to any aspect of the present invention may be transferred through seed from one plant generation to the next. The endophyte may then spread or locate to other tissues as the plant grows, i.e., to roots. Alternatively, or in addition, the endophyte may be recruited to the plant root, e.g. from soil, and spread or locate to other tissues. According to a further aspect of the present invention, there is provided a plant, plant seed or other plant part derived from a plant or part thereof according to any aspect of the present invention. The plant, plant seed or other plant part may produce a bioprotectant compound.

[0149] The endophyte-infected plant or part thereof may be cultivated by known techniques. The person skilled in the art may readily determine appropriate conditions depending on the plant or part thereof to be cultivated.

[0150] According to another aspect of the present invention, there is provided a method of producing a composition for bioprotection and/or biostimulant, the method comprising combining:
[0151] an isolated endophyte, wherein the endophyte is a strain of Priestia aryabhattai, and
[0152] an adjuvant,
[0153] wherein the strain of Priestia aryabhattai with Accession Number DSM 34352.

[0154] According to yet another aspect of the present invention, there is provided a method of providing bioprotection to a plant or part thereof, the method comprising contacting the composition according to any aspect of the present invention to the plant or part thereof.

[0155] The part thereof of the plant may be, for example, a seed. In one example, the composition according to any aspect of the present invention is introduced to the leaf, roots or the seeds of the plant. In particular, the composition according to any aspect of the present invention is introduced to the leaf of the plant. Applying the endophytes to the foliage allows the user to treat the growing or adult plant at several distinct times after sowing (if needed). In contrast, only a single application is possible during soil application (prior to seeding) or seed application (during seed treatment). Further, foliar application of Priestia aryabhattai allows for reduced use of the microbial agent because higher CFU loss (several log levels) can be expected within a short period of time (lower stability of Gram-negative organisms on the seed or in the soil) when the seed or soil is inoculated. According to yet another aspect of the present invention, there is provided a use of the composition according to any aspect of the present invention to provide bioprotection to a plant or part thereof.

### EXAMPLES

[0156] The foregoing describes preferred embodiments, which, as will be understood by those skilled in the art, may be subject to variations or modifications in design, construction or operation without departing from the scope of the claims. These variations, for instance, are intended to be covered by the scope of the claims.

### Example 1

### Strain Collection

[0157] For the collection of Priestia aryabhattai strain with Accession Number DSM 34352, different plants were collected from different sites. The sites were selected based on their distinctive habitats. A list of type of sites and plants that were used to collect Priestia aryabhattai DSM 34352 is provided in Table 1.

TABLE 1
List of sites and plants used to collect
Priestia aryabhattai DSM 34352

| sites | plant (crop) species |
|---|---|
| heavy metal vegetation | Minuartia verna, |
| | Armeria maritima |
| | subsp. Halleri, |
| | Silene vulgaris |
| inland sand dunes | Festuca ovina |
| Elbe floodplains, unfertilized for 20 years | mixed vegetation |
| chernozem (fertile loess area) | wheat, maize |
| Luvisol (fertile Loess area) | wheat |
| Elbe floodplains, unfertilized for 20 years | mixed vegetation |
| “Gäuboden” (fertile loess area) | wheat, maize |

[0158] A trowel or small shovel was used to gently excavate the soil around individual plants, and to lift the roots with minimal disturbance. The removal of root parts was carried out gently and without damaging the entire root system. Similarly, leaf material was harvested from individual plants without causing damage to the plants. Plant material was placed into separate plastic bag, and the bags were then carefully packed into insulated and chilled transport bags. After field collection, plant material was chilled in a refrigerator at 5° C. till further use.

[0159] The leaves and roots of each plant were washed separately under slow running tap water for 15 minutes in sterile distilled water to remove adhering soil particles and the majority of microbial surface epiphytes as a part of pre-treatment. Then the samples were rinsed three times for one minute each time with sterile distilled water in the laminar air flow cabinet.

[0160] Roots and leaves were cut into sections. The plant material was put in petri dishes, soaked in distilled water and drained. It was rinsed in 70% ethanol for 30 seconds and then sterilized with 3% sodium hypochlorite for 3 minutes for roots and for 5 minutes for leaves. The tissue was then washed ten times with sterile water. Validation of the surface sterilization procedure was done by culturing aliquots of water from the last rinsing onto nutrient media.

[0161] After proper drying of surface sterilized plant material in the laminar air flow cabinet, roots and leaves were cut into pieces 2-3 cm long. The external portion of the leaves approximately 0.5 cm from the margin was removed with a sterile blade. Each piece of both roots and leaves were placed on nutrient agar medium and supplemented with 100 mg L-1 of cycloheximide to inhibit possible fungal development. Plates with plant tissues were sealed using parafilm tape and incubated at 28±2° C. in order to recover the maximum possible colonies of bacterial endophytes. After 48 hours, morphologically different bacterial colonies were selected from root tips and leaf segments and after fourfold serial dilution repeatedly streaked in order to achieve enriched bacterial isolates. In order to obtain pure cultures enriched cultures were streaked out on individual 50% TS agar plates and incubated for 2-3 days at 30° C.

[0162] Colony morphology was investigated by eye to examine purity of the cultures. Colonies that appeared different were isolated and again streaked on separate 50% TS agar plates for a new cultivation. That way, mixed cultures were divided into monoseptic isolates. The pureness was confirmed by microscopic analysis and subsequent alignments of 16S sequences with corresponding sequences from the NCBI rRNA/ITS databases using “blastn”. The latter procedure was provided as a service by VERMICON (Hallbergmoos, Germany).

[0163] Cell material from these re-plate cultures were resuspended in 50% glycerol solution as done with the primary cell material and stored at −80° C. To test re-vitalizing, new cultures were inoculated from these cryo-stocks. A growing culture was labelled “pure” and “cryo-saved”. For genome sequencing, strains of particular interest were grown in liquid culture, spun down and resuspended in 70% ethanol. About 1×10⁸ cells of those strains were sent to LGC Biomics (Berlin, Germany) for whole genome sequencing. It was confirmed to be a novel strain. This strain was Priestia aryabhattai DSM 34352.

### Example 2

### Efficacy Analysis

[0164] To determine the efficacy of nitrogen fixation of Priestia aryabhattai DSM 34352 as an endophytic biostimulant, untreated maize seeds (Zea mays, variant LG 31.224) were planted in poor sandy soil (Oxisol) with little organic matter (important that N-content is low, so that the effect of free-living N fixing bacteria becomes visible).

[0165] Five seeds were planted per pot which further have been thinned out to three plants after germination in order to avoid minor number of replicates. Fertilizer dose rate was calculated on basis of 1,000,000 kg soil/ha. Fertilization was conducted with phosphate, potassium and magnesium sulfate (25 kg P/ha, 50 kg K/ha and 15 kg Mg/ha, respectively). Fertilization with Nitrogen was performed with DEMOGRAN® 45 (Domo, Germany) that contains water soluble 21% N and 24% S; (24 and 48 kg N/ha). 2 L pots were used and filled with 2 kg of sandy soil.

[0166] At leaf stage six (about 2 weeks after planting) Priestia aryabhattai DSM 34352 was applied to the leaves in combination with an adjuvant. In the process, 1 mL of spray volume was applied to the leaves of the young maize plant. The mixture contained 300.000 CFU of Paenibacillus xylanexedens DSM34353 and 0.1% of S301® (Evonik Industries, Germany) as adjuvant for surface wetting as well as stomata flooding. S301® has the formula of adjuvant (B) according to any aspect of the present invention. In particular, S301® has the formula

[chemical structure]

[0167] 1 ml spray to the leaves of the pot corresponded to about 400 L spray per ha which resembled the standard application rate for field application. Maize plants were grown at temperatures between 2° and 25° C. with regular irrigation. Eight weeks after treatment (8 WAT) pictures were recorded (FIGS. 1 and 2) and dry mass of roots (FIG. 4) and shoots (FIG. 3) were determined.

[0168] It was shown that the efficacy of Priestia aryabhattai DSM 34352 in combination with adjuvant S301® was good.

[0169] Further, compounds with other microorganisms such as a biofertilizer Blue-N(Corteva, Inc, USA) with Methylobacterium symbioticum, Kreotec (Biofa) with Bacillus velezensis, Azospirillum brasilense and Herbaspirillum seropedicae, biofertilizer Utrisha™-N(Corteva, Inc, USA) with Methylobacterium symbioticum SB23, Blue-N(Corteva, Inc, USA) with Methylobacterium symbioticum, RhizoFert® (AbiTep, Germany) with Bacillus atrophaeus and RhizoFos with Pseudomonas fluorescens (Rizobacter, USA) were used for comparative studies as controls. These comparative products also contained microorganisms that were able to fix atmospheric nitrogen and were also applied to the leaf. However, the comparative products showed no or a lower growth-promoting effect with reduced anthropogenic nitrogen fertilization (21 kgN/ha).

[0170] These comparative trials showed that the use of Priestia aryabhattai DSM 34352 in combination with the adjuvant led to a better growth of the plant under N-limited conditions than when using Utrisha™-N, Blue-N or Kreotec.

### Example 3

Investigate the Effect of Different Mineral N-Fertilizing Doses on Efficacy of N-Fixing Bacterial Endophytes Priestia aryabhattai DSM 34352

[0171] The general objective of example 3 was to find out how much N the bacterial endophyte Priestia aryabhattai DSM 34352 can fix under field conditions (i.e. at different mineral fertilizing doses for crop selectivity and on yields (grain & shoots) under field conditions). When seed was treated, bacterial endophytes by wet seed treatment method was carried out. When foliar was applied, bacterial endophytes at 5-6 leaf stage was applied.

### Corn Seed Treatment

[0172] 100,000 grains are planted, 1,000,000 CFU (bacterial units) are applied per seed. At 100,000 grains per ha: 1×10¹¹ CFU/ha

[0173] The individual bacterial suspensions each have 2.5×10⁸ CFU/mL, so 400 mL of experimental product is required per 100 000 grains. This results in 4 mL of experimental product (with 2.5×10⁸ CFU) per 1000 grains. A mix of 4 mL of experimental product with 1 mL of PREMAX and pickle to 1000 corn kernels was made, then left to dry in the dark (e.g. open paper bag). Nothing was added for the controls.

### Foliar Treatment

[0174] 50,000 CFU (units) of experimental bacteria was added per plant. The plants were in the 5-6 leaf stage, a stage in which only about 10% or less of the area of the soil was covered with plants. With 100,000 plants/ha and 50,000 CFU, it resulted in a total of 5×10⁹ CFU/10% area of one ha—i.e. on 1 ha in 5×10¹⁰ CFU/ha. 200 mL/ha of experimental bacterial products with 2.5×10⁸ CFU/mL was sprayed—this resulted in 5×10¹⁰ CFU/ha. 10 mL of experimental product (2.5×10⁸ CFU/mL) was diluted with 90 mL of demineralized water—this yielded 100 mL of 2.5×10⁷ CFU/mL. Of these 100 mL (with 2.5×10⁷ CFU/mL), 20 mL/100 m2 was applied—or 2000 mL/ha. The Water application rate (spray liquid) was 300 L/ha and BREAK-THRU® SP 133:300 mL/ha (=0.1%) was added. All experiments were carried out in Germany.

[0175] The following experiments were carried out:

| | | | | Application | |
|---|---|---|---|---|---|
| No. | Product | N-Fertilization | | Technique | Dose |
| 1 | Control | 0 | N/ha | untreated | untreated |
| 2 | Priestia | 0 | N/ha | Seed treatment + | 1 × 10⁶ CFU |
| | aryabhattai | | | foliar application | per seed/50,000 |
| | | | | (1×) 5-6 leaf | CFU/plant |
| 3 | Control | 90 | kg N/ha | stage untreated | untreated |
| 4 | Priestia | 90 | kg N/ha | Seed treatment + | 1 × 10⁶ CFU |
| | aryabhattai | | | foliar application | per seed/50,000 |
| | | | | (1×) 5-6 leaf | CFU/plant |
| 5 | Control | 135 | kg N/ha | stage,untreated | untreated |
| 6 | Priestia | 135 | kg N/ha | Seed treatment + | 1 × 10⁶ CFU |
| | aryabhattai | | | foliar application | per seed/50,000 |
| | | | | (1×) 5-6 leaf | CFU/plant |
| 7 | Control | 180 | kg N/ha | stage untreated | untreated |

[0176] The results are provided below in Table 2 and FIG. 5.

TABLE 2
Results of Example 3

| No. | Experiment | Yield [dt/ha] |
|---|---|---|
| 1 | untreated | 117.2 |
| 2 | Priestia aryabhattai + | 127.0 |
| | BREAK-THRU ® SP133 | |
| 3 | 90 kg/ha N | 128.5 |
| 4 | 90 kg/ha N + Priestia aryabhattai + | 137.4 |
| | BREAK-THRU ® SP133 | |
| 5 | 135 kg/ha N | 145.9 |
| 6 | 135 kg/ha N + Priestia aryabhattai + | 150.9 |
| | BREAK-THRU ® SP133 | |
| 7 | 180 kg/ha N | 158.2 |

[0177] The results show, that total yield increases, when the biostimulant (i.e. Priestia aryabhattai) was applied in addition to the synthetic fertilizer.

The application's sequence listing, which the Patent Office published only in electronic form, follows.

SEQUENCE LISTING (254 sequences)

SEQ ID NO: 1 - DNA, 270382 bp, Priestia aryabhattai
  source 1..270382: mol_type = genomic DNA
tacaagtaaaataattcttctagtcagctgataaaaactagcggcctatggagtattattcggtcttactatcagtcctgagaagcattttacaaaaattacttataaggaaaattataaatttcagaccgtttttgaggcttaagtcaactcttcctcttcatttttttatttttttaatctattaattaaattttttgtatgttttttatgtacgtgtacaacattattttattatagtactgcccttcttatgaacataaaaaagcacgaatctactaaaatctttgcaaacccgtgttttttctgtttatttcaagcatgtacaaccaacgataactaataaaacaaatagtacaacgattaatgcaaaaccgccaccgtaactaccgtaactaccgtagccgccgtagccataaccaccgccgtaaccccagttacaaaatcccatttcacttcacctccgtagcctgtttactctatagcatatgtacaggctagaaaaaatgctcgcccatttatcgcccttttataacgataaaaaagagacgagacataacgaaatcactctaatcaaccgctagaagcaaccagctagattaaacccattttcaccataacaataaaaaaatccgaacgatgaatcgttcggatctttctttaactaaaatacttttgtcacagcctcttttaagataacaaatattaacttatttacttttagaagcttgttctttaaagcgaagtatgtaataaggaacaatacagataaccgccaaaacaagagccgttaaactgactatgcggggattattaagcccaaaagaatagtctccaaaagatgctccaatcgcaataatagcaaaaataatatacagaatacgaaatatgttaatccactttttctgtttaatcgtaaccactcctttgcttattttactccaacatagaatattataactttactaaacaacttgttgcaaaatttcttcttcctttaactgattaccttttattctaacggtaaacaaattttcacactcgtccctttgtttacttcactttcaatactaagagttcctttatgctgttggataatattaaagcagatcattaaccctaacccgattccgtcttctttaatactgtaaaatggttcacctagatgtttgatgcgctcttttgaaactcctacaccttcatcaataatttgaatatgaatatgattgttgtccttttttttcagctcaactttaatttctcctccgtaaggcattgcttcaatcgcattcttaagaatatttataaacacctgtttcatttgattgctttcacaatatacaaaaggcatttctccatatgagttaagttcaatagagatgtttttcatggttgcttgaggctgcagcaataaaatcaattgttgaattaacagctgcaaatcaatcgactgaaatgttacggcctgtggttttgccacagacatgaattcatctgtaatcatttcaatacgctcaatttcagaggatataatgttcaaataggttaactcttctttactcgctttttcagttaatagctgcataaaccctttgatggccgttaaaggatttctaatttcatgagcaatagctgtagcaagctgcccgaccgctgctaatttctcagatttctgcagcagctcttctgtttttaaatactctgttctgtctcttgaaacaataagaagcacttttttgttttctatattgaacaactttccactatattccagtttttttatttcgccagacttaaatgtaaactgtgattgcagcgtaaaagaaagatttccgttgcgaatttcttcgactgttttttgaacaatgtcagaatctctaggtataatatcgtggcaagacatggataaaagctcttctctcgtatatccaaagcgcttacatccagcttcatttacttcaacaaaacgagaaggaaaatgatccgatcctatttcaagtaaataaattgcgtcgtttgcgtactcaaataacgtgcgatatttcaactcactttctttaagcctacgatgcagcaagtcaagctcttcctttgcttttttagcttcagatatatccacacatactccagacaaacctaccaactcatctttcccattaaaaattggagaaatggtgatgcgaaggtctactaaacttccatctttacgtgctcttacaacttctactcgattgattgcctctttttcagcaacagtcttttttatattctcatgtacatccttactaaaagctcctgctatatcgtaatattttttcccaatgacttcatgtgatttccagccatatactttttcataagcttcattaactcgcaagattcgcccttctaaatcagttataataaccgcatccatgtgatgattaataaaagactccaactgttcttttgtatattctagttcttttttcattattctgataaaaaaagaatcttcttcatccttacatgaatctgatccagcataagcagcttcttctgctacagcgtaaaatttacgataaaattctatcgtcgctatggctactcccagtccgagaattccgaacactaaatattctatttcgctataaaacggcgactgaataggtgtattccagaagtaatttgtcagtaagacatgaacgataaaatgaataaagaaacaaagaagagattgttttaataaagaaaactgctttctatatcgaataagaggaagggaaaacaaaaaggtaaagactaaaattaagatagtcagtaaccaatgactttctaaatagatactacacacagccatagtgatacctgcaactgcaccggctctataaccaaagtatagaacggtcaaaataagaggaagaaaacgtaaatcatatgtaatctgttgatacgtaacgctatataccataagaatagcagaaacaatacttgcataaataccactcatccatttgtatttatgggctagacgctgtaacaaaaatattcgtatcgcaatcataatactgacaaaaaacgaaaaaatacataagttaacaaataatccgctactaatcactccttctattcctcctttacttgtaaatatgcgtaaaatagttcccttatatagagagtgtaacatgaataagcgctactatttataaaattaataaaaaaactagtcccgcccgaggcaagactagttttttattatctatgctgatcttgatacataggtccttctgaaatcatattgctttcagaaacgtacgtaggatctgaatgtgcatctttatttaggctagcatttaccttctgttttttagataagcttgaaagttttactttggcacttcgaacaagtccttttacttttctccgtttcgcagcatcgcttaatatataagacgtaatgccgactcctaccgttgatagcgtaatacctgatatcaatgctttttgttttcgttttctcataatagctccttccttgtacctttttgaatcttacagtaacttttccccctcaggtaatctctcaaaccagattattcagattattcacttctttaacaagacggggcagtgtgtgtgctcctgctatcccatctgaaaaaaggccatactgattctggaattttttcactgcagcgattaattcatctccatagaaaccgtctgctccaaacttcggaagagaaaaacctagcgcaagtaagttttgctgaatttgtttgactcctaaccctctatcacctttggaatagacaaagggtccttttgtattattcgtcatagagagatttgttgtgacttctttaaaaaatgagcagtccatttcatttatatccacatttgtagaaattccttttactctgccagaatccgtatactgaaacattgcccatcgctgccactgacttagctcaccagggtgctgcataccgccttgtctgttggctgcactatatcttgctacccacaaaggatacttacttatttcgtttgtaaaaaaagttttagcaaaatgataattcgtatatacgataggcttaatccctgttgttttgtgaacatgctcgagccagcttacggcaaagcgagaaacaaattctttggactttttcttatcttcttctagatccaaacacggcggaaggtctagtttcatttgtccaagctgagtaataaaaaaaacagcctctttttccggactatttgtacagtgagcataatgataaaaccctactctcaagcccgcatttttagcacctatataattttcataggatctagggtctacaaaagttccgccttctgttaactttatatacactccttttactgaggtgttttttatttctttccaattaatgattccttgatgatgagaaacgtcgagaataataggattatttgaatgtcgcctttgcatagtttccacctcttttgctagcttccttatgtatacgacgaatctttcaaaacacctgttttttccggatcctgatattcttttataacaatgtgtaaaacgttgctcatttgaatcgctaaataagcttcgtgttttttgtcataataacgataccatccttgcgtatgaataatagattcctcaagctcttttacattttctgattcaaccaatgtactgattgatttttcatttccaaaataaaacttcacttcgtacgtcacttgaattcctcctttataaaaatgtaaataccctaatcgcatgtacttgaatctagtacaagtcagtgtaaaacttcttttaatccgcagtttctttttatatgtttatttagaacaatgtttattttattaaaacaagaagccaagcagctcaaaatgcttggcttcttgttttattttgatggatgaatcatattagcaggatttacccattgctcaaattgttcttctgtcagaaggcctgttttgaccgctgcttcttttaatgtcgttccttcttgatgagccagcttggcgattttagccgcattttcataacctatgtgcggatttaatgctgttacaagcataagagaattttctagattatgctgaatcttttctttgtttggttcaattcctactgcgcatttatcgttaaaagcctgcatggaatctgtcagcaatctgactgattgtaaaaaattataaacaataaccggcttaaatacatttaattcaaagtttccttgactagccgcaatgccaatcgtcacgtcattcccaagcacttgtgcagaaaccattgttagagcttcactttgagttggatttacttttccaggcataatagaacttcctggttcgttagcaggaatcgtaatttcaccgagtccgctccgaggaccgcttgccagccagcgtacgtcattggcgattttcattaagtcagctgctaatgctttgagtgcaccgtgggcatagaccacttgatcgtgacttgttaatgcatgaaatttattaggtgctgagataaatgtttttccaagcgtgctgctgatttctttcgctacttcatcgccgaagtcaggatgtgcatttatccccgtcccaacagctgtaccgccaatagctagctccttcatatactctacgctttgtttaatcatttcttcattcttttcgagcatatgatgccatccgctaatttcttgtcctagtgttagcggtgtagcatcttgtaaatgggttcttcctattttaataatatctttaaactgctcttgcttcgcagcgaacgtttcttttaatgtttttagagcaggcaataattgatcttcgacttctagtacagccgcaatatgaagagctgtaggaaaagtatcgttagagctttgtgacatattgacatcatcatttggatgaagcgtttcgtcgccatttattagctggtttcctcggtgggaaatcacttcatttacattcatgtttgattgcgttccgcttcctgtctgccataccactaaaggaaaatgttcattccatttcccttcaataatttcgttagcagcttgtacgatggcttccgatttccctgctgatagtttgcctagtttatgattactaatagccgcacttttcttcaaaaccgcaaaagcgcgtattacttcaattggcattttttcaatccctattggaaaattttctttacttctttgcgtttgcgctccccatagtttatcttctgccactttgatttctccaattgaatctctttcgatacgatagctcatagttagaactccttttcaatattttctttacctattagtattgattatatggatgaatttcatgacataataacaattattcactgttgaaaattccctttattttattttttaaacggtattaaatactttgattatttagctcatagtttattttgattttctaacataaaaaaagatccgaagagtacgctcttcagatcttttttgaatacgtctaattttacttatgaatccatacagcaccagctgaattgtcttttgcttcaccaattacgtctaattttaatccgttttgaggaagtaagcggcccgcatctttaattctttcatctaaatacgattttttgtcgttgaaacttgtaaatccatttgattctttagatgaaatagttccccacgttttatgagaatatgaccaagcaggtgatttatcaaatgagaacgccgcatctgcaatttgatatcggcttgaatttgctgtagtgctaataccattgacattaaagtaaagaactttatgagcatgtgaatcaactacaccaaggaatccttcacctggatgttgtcctacccagttatcaagatagctttcatctgcgtaccaaagcagcatgcctgtattatattttgcaccgcgcgcgaattgaagtgctttatcgctgcctgcatagtttctccactcaaggtaataatagttgtctttatagctgatgccatttgtcttttcaaatccatctaacgttacttttggcgctccttcagcatcgtccgtaaataccgtttttccatctaccactaaactggcattatcaagcgcaaatccttgaagagcaagtcctccgtctgttacgtattcaaattgaagcttgatttttttacctaaaaccttcgttaagtcatagcttttaccttcccattttccgccggaagtttcagcagaaccgtctgcattattcgctttatcaccaattgtatctaacagaacttttgaaccgtcaggaagaatcgcatttacatataaataatcgtattctgcctctacttcatagaacgctttataattgaacgtcgctgttttggccgttgttaaatcaaactctggcgtcgtcattgtcgtatgcagatcgtctccgcgtttactgtagtagtaattgcttccaaactcaggcttaatcccttgaacagcttttttaggtaaattaatcttcacaatacccggtcgtttagattttgtcacgctttgatcaaccacgctcacagatccggattttgtaatgtttttgctgtcgatttgttgaatatttgcccaatttccacccatatttgcttgaaaaaactctttattttgcggggagaaacttgtcggttctgttccagctacttcaccagcccagctccctccgctcataattgaccaaacgcctaccggctcaccttgacccgtatactgtgtatcatactcatccggcaaacctaaatcatggccaaattcatgagcaaaaacgccaactgctccgtcttctggttcaattgtataatcataagcagccatgtttgttccaggaactttatacacttgtcccaaagtagagcgatgagaccagatagcatcgtttcctagtttacctccacctgcttcttgcccagttccagcatgaatgaccattaagtggtccactatgccgtcaggctcattgcggttgccgtctccatcgatatcatattgatcgaactgatcataatctgaaaggttaatgccgctttttgctgctgcagcaagcgcttcttttacaagattacgtggccctttagatccaggcgcattatcgtttcctcccgcgggattatctgctccgtattcttttgcgtttccaggtacagttaaccagtcagaaaccgttccatctactgtgtaactacctccagactgttcttcataatattgtttaaacgttttaattttctttccgttaaatagcgtaaagtctttctttccaaacattaattgctgatagtgatttcggttaaaatcttttgcatacatgtaaccaggttcttgaacgacattgttgtgcttaaagtctgcgtattcgactaaaagaacaagaactttatcttttctcacttttccgttatatttggcctgagctgcaggtttaacgtttaccccgttccccgaattgtttccttgagacttaatattagcaaattcgcctcgttgaaacttttctttttgttttgtttgcatttctttcgctttcaaatcaattttgctagctttatgtcccttcatgctctctttatgtgcattttttttgtttatgtaagaagtaacggctttcttcacttcttgcggtgttgcactttgagaaataactccttggtttttcagtgcgttagccaatctttcttccggtactgtattcatatcaattggtgaacttggaagttcctccaattgtgcggttttagctgaagcagtacttccattcataagtactggtcccactccgcttaatgtaacagttgtggcaagaaaagatgtccccaaaatctttttccagcttttcaagtaaacccctccattttagaattttcaaactattagcaagatttattttatattctaaaactaggaaggtcaactacattttactatattattaaaattttttaattctagtagataatgtaaaatagttttatagtatgtaactagttttctttgactgacaattaaaatgtctgataaacccttcttacatatgcaaattctatgccaaatcgataaccaaaactaaaaatatatgaagcgtattttttaggaaattagaaccacctttttcgtattactattatataaaaacaaaaaattccccattatggatacagaaagataaaaaaatcacttctcaatagacgagaagtgataatttctgtatgcaagtaaatttaagaatgttctttttgatgctgcagcaagatatgatagagcgacatgctccaaatagacatattacgcgctgcgatttcataaggtttttcatcaattttaaacaagaaatccccttcataactcacggatttcccttgtttttccagctcttgtttaacagcttcaatccattctactgcattcgtataatgcttgttcaaacgaactttaatagtttgattcctgtaatgaataaaagatgtaattccccaaaaaattaagacaagaaaaagtaccatatacagcaattgcatgataacgatccccttcttccttcatttcattattttcaatgaagacttaatttagatgagtaaatattactattctcctttcctatcgtcatctcctttaaaaaagtaaattccttttccacgtgggcgtataaaataaatccatgtacgtgctccctcatcttttttactaacgttttctgttgaaaaatgataagctaatagaatgataaatagaaagggagggcgaccagttgtcaactgaacaagtgaaattagcagccgttttagatgttgaaacaacgggattaagtgctcaaacatgcgatattattgaactagcaattgctgttgtttcttatgattcctctaccggaggaataatcgacattgtagaagaatatgaagaatttaatatgccttcaactcccattttcccgtatattacaaacttaacgggaattacaaatgagatggtcaaaaataaaacattagacgataaaaaagtggaaacgctgttaactagcgtttcggctatcatcgctcataatgcttctttcgatcgcagttttcttttaaaacggtatccatctttatttaaccaaaaatggcactgctctatgcgtgctgtcaaatggaaagagtacggctttcctaataaaaaactaacaacgcttctcgatcatcataatattgagagagagcacgctcacagagctatggatgacgtgaaaggaaccattgacttgctcagacagcaaaatcctagcggagagccctatttttctgaagtattaaaaaaagcaatgagcaaacctaaaagaacagcggcttccactcgtttttaactcaacaaaaaaagcgcagcttctgcgctttttttgtttttattcgcatatttcttaagtgttgagttatatgtttgaggagtatgattggaaacagcgaggctgtaaacgcaccggaagaaaaagaaaagtgcctgctttcaagcaaaaaaagccgcagaggaacaaactgaacagctggtgtttacacacgtatacgaaatcagctgaatttctaataatctgggagctttcaattatgcttctcttaccttttggttttgaagatcttgatgcgtttgttctagttcacttaaattcaattcgtacaaatgtctcccgtcttctgttttaaagtaacccgattcaataatttgattcattaaaagatctttcttttgctcaaatgctttttcagatgtcatgttatcatctcctttttttaggtaaatatctttcatagaaaagacgtacaccgcttgtggtatacgtcttgttgcttttcacactcgttacctatgtttaaaaacaacgcaatcgttacattttatcgagaaggctgcttatatcttgcagccatattgaacattttggtgatgcactacttttatacccttcatgatgttcttaaaacgcaattggaaaaagattttcacaaaatttgttttccatctactgccccgctttcaaaatgcggctgtgcggcgatttttttcgttgctaaactgaccaccattaatacaactaaattaataaataaagaaataacgccgacatttgtatctttaatgatttgtggcaacgcaggaaacaacgtgccaagcgttgtttcagtaatcgttatatacatcacagacgcaatgccggcaacaatacctgcacatgccccgtatttagtcacgatattgtttttcattaaactaaaaataaaagcaggaaacagctgcgtcacaatgctgtagcccattagtaaaagcgttacaatcgtattccctccatgaagtgtaaaatagactgaaacaagcgcaatgaccggtacgaagcatttagccagtatcgaaatttgtttgcccgtcgctgaaggaacaagaacgccataaacgtttttagatagtgacgtagaagctgccatcaaaagcatcgatccaggaacaagtgctgttaataaaccagctgccccaataaagccgacaatccacggatcaaatgtttgaatggaaagacgaagcagtgacaagtccgcttctgcgccttgtagtccaggtacctgcataagagcagtaaaccctacaaaaaagacaaaaagcagcattaacgtataaatagggcttataatagaattctttcgaaatacattctcgttttcagctgaatacgttgcattaaacgtatgtggccacatgtaaaatcctaatacggtcagcatgactgtagaaataaaccacgaaatacttagacctgtcttgggaagagtaagaaacgttggatttgcttgatgcacagcctcaaacatcggctgtaagcctccgtagtaatgaaacggcatatatattcctaaaaataagacgacaataaaaatcataatatctttaacaatagccgtccacgcagaaccatgtatgcctgatatcattaagtaaacagttaatgatatggctccaatccaaatggctgcggttgaagagatagagccataagaagcttcagatacaataatacctaagcctttgaactgtaaaataatataaggaacaattgccagcacccctgcgcatgaaacaacgatgccgagaaacgggctgttgtattttgaaacaaaaaaatccggctgagacataagcttatgctgcttcgcatatcgccatatttgcgggccgatccaataccctaacacgtacgctaaagaaatataggctaaaatataaaacgctggccctccttttccatatgcccaagcgcttcctcctagaaacgtaaaagtagtatagatttcacccgccatcaaaaagaagacaaaaacagttccaaaacctctgccgcctacgctccactgttctaaatccatttttttgccccgcgtagctcgaattccaagataaatagctaaaagtaaaaaaccaaaaataataatcagagcggtattcattatttatctcctcctttaacagcaggatcgagcttgtacacaatacccataataaaagacgtaaggattacccacataacaatccaaaagagaaaaaaaggcatccctaaaataaaaggcgttactttgttaacaaaaggcaataaacctaatattcctacaaacggaagcaggcaaagaagataaattattttcatagaactcctccttaatcacacggcttatcagtacttatctaagactttaactatctcattatgtacttctcttattcttctctttacacctccattcttgagctaaacgagacgtttggcatagaaaaccgccgtttatttgttccttagtatcttccatttgtccccatgtgaaaaggagtttgtaaggcatgcttacaagattttgaatgcagcagaatatagacaaacaaaaagaaacggaactgagagtaaaggtctcagttccgtttctttttagcatttctatactttattcttcttttttctttacaccaagcgaagagagagcttgttttaaatgcccaaacgtttcaattttattaaaactaattcctacattaacagccgtctgagccatgtcaggactcacccctgacataatcgcatggatgcctagcagctgcaaaatgttaatcaaatcaaaaaatttgtgagcgacatacgtatctacataatttacacccgataagtcaatgactagatgccttatatgttcttctgcacacctttttggaacaacctcgataatagaatcacctttgatttcatcaataagccctactaaaggcaagaccgcgatgtgatctacaattggaatgacaggaaaactcgtttcgtcgattagctcttgctgaagacttattttttgccttgtgattttataatactgttcggagaattcattaatgagtttatcaaatgttgtatgataaacttcgctccaagacagtatatcttcttttgtaatagatgaatgtatcagactatatgttttgacatacgtccaaataatttttcttgttttgcttagcgcttctactacctcgtaaatcggcgtatcaaatttaattctgctgtttactacttccgtcgtccatttcaccatgcgttgtttaaaaatctcttgatcgtcaagaaagccgctcgcaattgtttcgatcgtataaagatgctgctcgcgcagctttttctcaactgaagcgtctgcgtcctttgagtaaatcgatcctttaatattatttctttggcgcagccattcttcactgatagaggctgaactctctaaaatatattcaaaaagacgttgattttgttcactcactactgtttaccctccgttcactttctccttctatccaattacttacaaaacgtaccttatgataaattcatgcttcatattttttcctcgtccatctctatcatacacgataaccgctttgcatacttatagagaattagatataaacaagcaggtatttgattatctacatagataaactgccgtgtatgatgcaactatcatttattttcacatgaaaggatgttaattgtattgaaaaaatcaattattttgttggggattctcgctacaagtattggattatccgcttgttcaaacaatacaacaacttcttctgccacaaactcttctgcacattcaggtcatgaacatcacaaagctgcagttgctgatattcgcgaagagactccgggagcagatgttttaccacagtttttgaagaaccagtctaaagatatgaaactagtttatctatccgttgctaaaaatcgtgaactacttgaaaaaattccttgctactgcggatgtggcatggaagtgaatcacaaaaatagctatgactgctttatttttaaaaacaaaagaaatggagcagttgtctgggatgatcatggaaccaaatgcggattgtgtatagaaattgcagctaaagctatgctcgactataaccgaggcaaatcaataaaagatatccgcaaagacatcgatgaaaaatataaagaaggctatgcacagcccactcctactccttccttgtagaacattggcagtttttaagtaaacattcgcgacaggtatatataaaagtagaaaatatcaaaaacacgttcttttttagcgttttgaaagctgattcatctttgaaacagcaaaaaacactcaaatagctatttgagtgttttttgtatactattctttcacaaactcttttgtacttcttactgtatcaatcggacgcacgagcttctcaatttctgcacgttttggctctaaaaacggaggcagtgataatttttctccgagcgtttcgtaaggttcatctcccataaatcctggtccatctgtcgcaaattcaaataaaatttgtggggctactcttgcatacaacgattcaaagaagtgacgattcacataaccagacgtatggaaaccaaagcttggcattcggttaatccactcttcaagagcctgtcgattttctacgcgaaaagcaacgtgatgaaccgttccaaaaccttgctgagcctgcggaagtttttcattgtgttcgactactacttgcgcaccgtttcctccttctcccacttcaaataggtgaagatctccttcttgagcaatctctttaaataaaaggactttttccatcatttctttaaagtaattaaactcagcaatacgaataaagataggcccgagtcccgtaatagcgtattgaagagggacagggcctttttgccaaggagtacctgattcaactccttgatttccttcatcggaaattaactgatactgctgatcatcaaaatcaacaaacgaaagcgtctttttcccaaatagctcttgaatccccgtatgctttacttctaagcgatcaaagcgctttacccaatagtctaaagcctcatcatttggaacgcggaaagatgtttttgaaatttcatttgttccgtgaaaaccttttggaatgccaggaaaatcaaaaaaagtcatgtccgttccggcgctgcctttatcatctgcaaaaaacaaatgatacgtttgaatatcatcttgattgaccgtttttttaactaagcgcatgcctaacacatatgtgaaaaattcataattcttttctgcactgcttgtaatagccgttacgtggtgtattccttttaagtggttcattctacattcctccggataaatcgtctagtttatcattcatcatttatctttaatttaaatatctttaattaaagataatataccatgattaattttcctttgtcaataaagtatggatgatctcggaaggaaatatgtatatttttacatttaaccaaaacattataaatgaggacgagccaaatcggcaataaaacatcgtataaacaaagagcttttgaattgtaaaaactctttgtttattctttaattttcaatatgcttgattataactgcaggattgcctccgactaccacgttatcaggaacattttttgtcacaacggcacccgaagcaattaccgcattgttgcctattttcactccaggattaataacggctcttcccccaatccagacgttatttcctatttctacgcgttttccaaactcagctcctgaaattctttcaagagcatgcaaaggatgagttgctgtatagatatgtacacctggtgcaagaaaacaattatctcctattcttatttcacatacatctaaaagtacgcaatcaaagttagcataaaaattttctccaacatgaatgttagaaccgtagtcacagcgaaaagtaggctctatgcaaagagaatttcccgtagacccgaacagttcttttaataagttggtacgtctttcttcttccctttctgttgtttggttataaagccttgttaatcttcgagcgttctcacgttcttttattaattgcggatcagcggaaagatataattctccatccagcattttttgtttttctgttttcattttgcatccccttttttgtagttccttctctaacctatactgatttattctcttacacgatatcatgtttttaaagctttgtccggtattcgctgagattatcacccaccagtcaaacattagttaatttaataactcccggaagctaattttttaatctttttatataaaaggaatagtaagagaaaacttcatcacatatactatataaatttatataaaaggcagggatatcatgaaagcacagcgcttggtagatgaccaaaaaggaacatacagcaaggaggttcagaagcactttaaactaaaaataaatggaaaaattcacacacaaccctcaccacaatcaccttcctcaccccctatacagaagaaaaaccttaaatacaaacctcaaaataaagttctacgcacgtatgataaaaaagataaaacattaaatgatacacaagaaaagctcataaaatctgcaaaaactagattaactaaatatgaaaagcttctattaagcaatcagctttcagaatctgcggctctttactcaccttttgggttagaagaactggtacgaatggctagtagagaggagtgaacgatttgtgttgggtgaaaaagtaatcattgatacaaacatttgggcttcacatgcgcttaattatccagaagttgtggaatacattaatgaacttatttcaaataatgcggaatttttaatgcctaccgttgtacaaatggaacttctgtcgcattgggaagtagaaacaaatcctcaagtcaaagcagtaaaaaatcattatatttacgatatgacagataaaattgtagacgttacaagtgaaattgcacagctagcggctcaaattcgcagaaaagccaaaataaaatccaataaaaaaattaaaggcccggatgcgatgattgccgcatctgcttttatacataatgcgaaactgatttccaacaataataaagattttgcttggattacatttaatttcagctatcaaggtcaaccattatcttatgtaaatcctattaaagacacgattgcttacgcttcttttattaaaagcttccaacttcccaaccttcccgatgctgataacttacaagaaaacgagaaggaaagctaatttgtttttattttcaaaatactccttgtctcccgccttttttaaattaaaagtttgatgagtacatactccaattctttctgtaatgaatacagtaaaaagcataaaaacttaggcggtgaaaagagtgaattgtcaatattatccggaacaacctttagaagagtatcaatatggctatgattattattcgaatccccaagaagctgacgaaagattcccttatggttattatccataccctcgcccacggccattttatccttacccttatcctcgtcctatttattaccaccccccttacttttaccctcgtcctcgtccgttttatccacaccaagtgtattggagataaaaaaagaagagcgatcagctcttcttttttgtttcttgatatttagacatctcttctttaataatggtcacaaacgcttcattttgctcaatttcaaaaacagtaatagctttttctaggtaggttattccttctttaagctcaccaagctgacagagtgcttctccaatttgataatgcagttctcctaataaataaagcgtctcatgctgaatacacagctctagtcctgcttgtgcatatttaaccgacttttcataacgttccatttgcaaaagcgcacgcgataatccatataaaattcgaattttgacaagaggatcttttaacttaggaagcaaagcaatatgctgcaatccttccataaacgtactgaacgctttttttaaatgaccttcttcttcataaataatggcaatactatttaaaatagcaatctctttttctgaataaaactgttcgctcgtacgcgtgaacgcaatagctttttccaatttacgaagcgcttgttcaaatttatttccaatataataatcacatatggcttcgtgccataggaaaaattgtgcgtgaaaaggatcttgaaacataggattatctttttctttgttcaccatatgtaacacggtttcataatcgcgttttcgtatataatgcctaatggtcgatttaatttcttttgaataatcgttgggcgttagctctcctgcttcaaagaaataattcatcggaacccctaagcgtttcgataaatgatagagaacttcactgcttgcatgaatttcaccttgttcaaatcgatgtagctcttcttctgtacaaattccttctgataactcgacagttgtcatttccgcaatctttcgcagatcttgaatcagctgacctacttgttttttatcattcaaaaaatcaccttacttaatgtcaataaaccctgtcaaaacaacgttccatgatatatttgtacgtatattgtaccacttagatagtttttttatcaatagaatcaagaaaaatattccaataaaattcttcaaattataattgaattatttcaaacaacctccagcctcctctttagacatatcacccctttgcacagcagtcattacttgatcacagtaatatgaagttttactgtatccttcctcatcaatctcttttcgaatttgctcttttgcttcatcagaaaaattagcatcttgttctgcgattatttgtttttcgtattcttcttgctctttagccaatttttcttcctcttcttgatttaactgttcctcgatctcagcctcttcagcccatgtttcagcttgatttgcttcataattatcgattgtttcttgactaactggagattctgcttccttctttttctctgcttgttgagttgctacacgttgttcttcggcaatcttttgttgtctttgttgttcggctatttctgcttgtcgtttagcttccgcttcttcttttgctgtttgctgtgctaattccttagcctttctttcttcttcaacttttgtagcgtacgcacgtaaatctttctgttcatcttgaatttgtagagattcagatttcttatttaattctctttcattagtctttttttctggctttacagcagtttctttcttagaagtctcagcgttcttcccttccccttggtcacatgctcccatagttaaactcaaagacaacaaaatgctaccaactaacaactttttcacaacattctccccttaacttttctctgtatagagtgttacattaaactgataaactaatttgactaattaatttttctaattcaatgattaattctttagggctgcaactattgttcattacgttattacatatctttagaagctcaagtttaatttctatgctaatttcctcagatttcaattgttcattcacaacacacagctcctttaataagaaaataatactatataaaaggttatttttgttataatttcaattgtttttcttctttgtttttcgataattttcttttggaatcatccccattctctgcatctttttctttataattaatgtaatccaccatcatactttctataacttttaataattcttttcctttctcttctgtagatgagcattctctcatagattctcttaccttcttaatcttcgtgtatttcttaccatctactccaaagtgaatcttatgatgatgtgctttacaaacactttataagttactaataaataaacgtttactctaatcctctttcatttccataaggtgataataggagtaagcctgcctccttcaagacagacttcacataaaggatttaacctcttcttcctattgcgtaatttaatccataggctactagaataacaggcttgctcttgctcttgctctttcttatctactctctgttccttgtactctttatgagtatcttttttgcacttgtcacaatatgtatcataagctaattgacgacatttctctgtgttacatatcttaggtgactttttaggcatgttgtttagctaccttttttaccctttattatttagcacatattttaatttccatactatagacataataagaagccactcatcagagtgacctagcattagatttattctttacttcttcaggtacataatctaaaagtgtagatattatcatattaaaataccatggagtaaggttatttccagcactttctttcaattcatttcgtagcttttcaccccatacagggtatctgtcattactttttgcttcttctaacatatgatctacaacatttaataccttataatactcattttcttttgcactaatataataattcttctgttcataattcataactccacctccttttagttacctatgattttccctgttttaaccaaattagacttgttaactccctaaaataaaaagccgaccttatgaccgactttccttactgaactaaatatcatctcttccaggcactttaaatactgctttaattttgtatatatctttcttaccttttaaggcagtaacccttgtaatcagttcaatagtaacccctgaaactaaaaggtatggcaggtcctgaaataggcgtctgtcccccacccaaaaattttggagctttagcaggataccctagtggataattcccccaccaactttcaacttcaccactagaattcagtacatatccagtaggacgcccaaaggaaggcatgaaataaggatagaaagcatagttaaaaggagtataaaaattagaatagaacatttaatcacctactttgttccagcatgtaaaaaaaatccttcattaaggtatgagagcttttcttttattgtgaatcatcattttcaacaactttttattatttgcacaaaataaaaaacacccaagctatgggtgctttttatacacttaacatgttaaaggagaaaacgattcgtcagcaaaagaagtactgaccattaatattatgctcgaatgtgaattcacctatactgtgcggttctcattttttattataaagcttgctagtccaatatcaagaactgttctttcatgagattgtatgtcccataattgttgatggtaatctggtatatatacacttccgtcatattgagctttaataacacgtcggaaattctcacttgagcattgcacaatgtaggactttacgccattttcctctacaacatttagtactttaaaatcaaattgaattttcattctctaaccaccggctttctacctaataatttctacaaaaagtgtaataatccttctctatatattactaaaagaatatttttagctgtcattaatcaatataacttttagctgctccatacgaaaaaccataaactccaactaaccataatctcatttcatgcctttgctcatcagttaactctatgtccgtatcttctggaacgtcttcatattcaatatttccctctaacaactgttcgaagagtacttgattcattaatattagctccattcttaataatgattttatgtttcagcatattaacttctacaaaataaaaagccactctaaatgagtgacttaaacttataaaaatattaactttcacctcagctctacaagtaaataacttagtgccctatctaatgcttcaggtatagtttcaacctcttcaatcaactttgaaccagtttttagttgataagttaaacctgtatcgaaaattttaattccaccagcaacttgattgttagattttaaaactttactcaaactcaatatagagccttgaacttttaaaaaaactgaacaatctggaaatgaaattttattttcctctttaataaattcaacttctggttgttggttttcatttaattttacatttaacatgtcaataaaagaatcaatgacactttgaaccgataacaattcgaaatgttttcctgaaactttagaaacgtaagcatccatccagtttttacttttccccattaatattcccaccttttgtgtagactattttattctacaaaaggctagttattctcaattttttaaatattaatcaattttcaagattctttccgacataggtaaatccgaattcaatttatgaagttataacaataataacctcgcctatttctctagcccgtctatacataattgacaaactaaacatatgttagtatatattctatttcttcatcgatgaaaggatgagaacgtgtggtagctaaaatcaattcacttacgattggtaacatttctggaggaacttttatttttggaaatgtaaatcaagtgtgtcccgttacaagtacagaatccaattcacaaacaggtttgggatcaaatgcaagtcctaattcaagttcagtaacaggctctcaaaacacttcttctcaacagtcacctagttcaacacctactcagacgcctactttaggaagtggaaatacaaatacactttgaaaagcatctctacgtataaggatgctttttattacaacatttaatttacatacacttttgatagaatgtaaactaataattgatatattcaaaagtaacttgataagcttcattcttggttaaaccttgtaaactcattaaatactcaaccaacattactcgttaattactagctaaaggttcatcatctccttcactaatacgtaatatttcttcatcgctgagttctccatctaatattttctgataaaattcatcgattattatacaaccaacctttctagacattattaaaagtagatactatgttctaatttcacaatgaacttaatatcatttattgtatttaagacaacgggagatgatactgatgagcagatttgatattgaaaccttaaaaaagattcgtgatgatttacaagaaattcactctactgctatttctaattatcatgactatccagaacttatggatacaattgatcatttagcaagagttgctaacatgttcgcaaatgataaaattgagaaccttgtgaataataacttgcgtgctgacccacaaggttacattgtgtcaaaattatcgtctgcttcttcacgtatgaaaaattatcaaaaaggcatcggcaagcgtgaagtaggttcttatgaaaattgaatacacaggctggagattttatgatgactatacagaaatttatggtagaaactacttaattcatcatgctggctcaatgttggtgccagtttcaagaataaaaggcttgactcatgataatgttttgtctgtagaaaagttaaatcgtcttcttaaatcgattgagaatcacggatatgtaacaactagttcctctcatatggatattaatctaacattatttccaaacggtgatttctgcgttagcaatggaggtaatcatagaccatatttagcaaagaagctaggtataactattattagagccgttgtggatgtgtgcattccacttaatcttttgacagatgaacaaattcaatattttgagtctataggttcttacgatttacctaatagcccagaattaaaagatgtagcatatgccctagaactaatgcctagccaacaacttgctaaacaaactataattcatattcaataagcacctaataggtgcttattttttattagctaaaataataaatatactgacgaatatatcagaatcctttaatttatatcgttcagaaagtcataagttttagacagagataaaccgttttaaaatgtatacttatatgggctattttaagtagttagtgctcataaaagcaacaatattatccccatgatacaagcgagctctttgatacaataagggagttcgcttatatttttagttattgtggaacaactatagcttttagcccataccagggaatccacccataccagggaatccgcccataccagggaatccgcccataccaggtgatccgcccataccagggaatccacccataccaggtgatccgcccataccaggtgatccgcccataccagggaatccacccataccagggaatccacccataccaggtgatccgcccataccagggaatccgcccataccaggtgatccgcccataccagggaatccacccataccaggtgatccgcccataccagggaatccgcccataccagggaatccgcccataccaggtgatccgcccataccagggaatccgcccataccaggtgatccgcccataccaggtgatccgcccataccagggaatccacccataccagggaatccacccataccagggaatccacccataccaggtgatccacccatgcctccatgtctatcaaaactttgtcttgtgctatccatattatctctccttcaaataggttacagtctagactatgtagaaacagtaataaggcatagacatatacctattcccccaaaaaaataatgaaattcccaaaaatttattacttatatttattagataacgtattggattaaagagtaacaatatcataattgctaaatatttatataccccacacttttaacgccttcatcacatcatcattttcacctggtggtcaattgtttcggtaatattgagcagcaagtgacacaacacttactgttctttttcatttaagttatttaaataaataatttgtcgtcatttcatcacaataaataagttcaacctaaattaaccttgaaagactaacttaagttgaacttattaagatataaaagcaccttcgaaaggatgctctttttttcgcaaaataatttcgtaagagtacaaatcgctatatcttcgttctaaatcaccgaattgaatagtactatttagttctttaccttttgggattaattcaagcttcttctttcctgcctacctctatttttgatagcagagcatctattttaatattaacttgactattaataaataattgtaattatttattaattcttttcccttcagttttttctttttcgtagactgtgtccctaaggtcatcaaacttctcaactaaatctgctcttcctaattttattaaagaattataccactcttcaatagaaattaattttatgtctccatttccatggttgaatttatgacctcttaaatataatagccaaagttctctacattcttttctagctgtatacttttttactgtatcgtctgtgaaataagcaaatggggataatttagcatcaatccaaatatcttcatttataataaagtcgggtctaacattgtctatccatttattataagaaacctcattgaataaaagctcaatagcttcttttgctaattcttcaaactgcagcccataagaccacaattccttgcctaaatgcttcatattagcaaatttatcctccatattatatttcacaaaaaattctttaagcccaccatgtgttttaataatccaatctctcattccagttaatttataagtaacaaagtcggccgaaataagcacttgccccttttcttttagcatttcatttattttttctaaaacaagttcatctgaatatatagtgttattaatctcaacgtaatcttgcaaatcaaaggtatttaaaaactcttcaaaacttccatgttggttataaatatatgcataagccccctcatatttgccctttattatttctgggttaaatacaccaccatttaatatgaattgttctttaatcaatcgatagcatagagcatcattccagttatattgaacgtaataactcttattaaaggcattaaaaattcgctttatttcatctaccgtcaatgtttcaaccttatgtttttggaactttacatttctaatttcattaaagacattctctgataaaactccctcacgttttaagatattaaaagcagcacgtgtcttttgaaggtagttattaacgctagatgcctttactccttttcgagcaacctgcttaaagcggctacttgtatcagacttttcatgaagcaaccaattaataaaatctctcgcatcatccaaggtaatatcagaaacctgtttgctggtttcgaagaatgtaattaaatcgttaaaaatggaattgtattgatttaaagtagattgagccatgccttctaaagttttaatcttaataattttctctttagcttgtttaagatttatttgagttacttttgctccctttcttattcgctttgcacacaaaaaaggcaaccccctttgaatatggaagttgccttaacagttcaggtagtttttttattatagacaatttttagccttcatgactatttacctgccctctaaaaaccttattatatcaacgtttagtaaggatttcgcagatcttgaatcagctgacctacttgttttttatcattcgaaaaatcaccttacttaatgtcaataaatgtttttatcctacttttctactatactccaaacaaaatgactttaaaagagataatgggctattttttgaaactcttgtcaatcttttctccctatcaataaagaaaaacagcacatcaatgtgctgtttttctcaagtttgtatgatttatgacactatatatccttaaatagaatcaaatacttgacgcagttgagctgcgcttttattgatcgcctgctgagcgagtgggacaaattcatgaaaccctaaaaatccgtgaatcatcgtttcataattttcataggtgacgggaacaccgtgattttttaatgcgtccgcgtagtcttttccgctatctcttagaggatcatactgtgctgtaataatggtagcgctcggtagactcgataaatcttctagtaataccggagcgttatagggatgctgttcttcttctttattgtttaagtagtgaagacgaaaccaatccataagatcttttgaaagaaaatatccttccccattttctttcatagaggcagggtgctgatttttaaatcctacagatggataaataagcagctgatgaacaatagacggaccctgcctttcttttgctaaaatgctcacaaccgcagcaaggttgccaccggcactgtcgccaccgacggcaattttatttgaattgatatttaattgagacgcatgagctgaaatccaatccagggcgtcataggcatcgtttactgcagcgggaaatttatcttcgggagcaagacgataatcaacagagaccacaatacagtttgcttcatttgcatacgacctgcatatagagtcatgagtatccaggcttcctaatacccagcctcctccgtggtagtaaacaagagcgggaaatggccctgttccttcaggttcatacactcgtatagtgagcgtacgttcatttaattcaatttctttattatatacttttttaactgcttctttggaaggagttaaagacatcttttccatttctctcagctgcgggggtgtaacgtcctctaaagaaggacggggcatttcattatattgatttagaaatatttgaatatgcggatctaacggcattcttcttctctctcctttcaaggtaactctatatgtaatgatgaatgaaatttcagaaaaaatccaatatattgtcttctcagcagacttttgtttgttttaattaaaaatgggtataacaattaaataaagaggatgatattcgtatatattttattctcacctatataaatataaatacgtacaaaggaggcacaccgatgattattgtttatataagcttagctgttgttttggcatcacttgcgtatcttatttacgcaggcgtatcatttaataaaaaaatcaaaccaactgtgaactctgtaaatgccacttctcaacatcttcaaaacgaaactgatcatatcaaagaaaaaacaaatcatttaaaagtaacacaagcagcgattaaaacggatgtacagtacaaaaaagattcggtcaaatatacagccaactcatttaaacagcttgttaatagctttaaacgttaaaaaaggaaacctctataaaggtttccttttttattacatcgcctgagacgtatctttaggaggcgcagccgttttgtttcggtggtaaatagcgttaatctctcctccaataacgagaattaaccccgttaaaaatagccaaagcatcagaacaatcacgcctcctaagcttccataagtagcagaataattaccaaagttgcttacgtaaaatgagaaccctaaagatgtcagctgccataacagcgtagcagcgagcgctccgggccatacatgagcaaaaggaaacgttttgtttggagctaatctgtataatacggataaaacaagtaccataatgccgacaccgataatccagcgcagaatatttaaaaccactgttgtacctgaaggaagagaaaaccattcgcttatccaatttaacaaaacccctccgaacactggtaaaagaagcgatacaacaattgttacaattaatccaattgttaaaagaatggacaagcctcttactttaataaacgagcgctgttctttcacgtcgtaggcttggttcattgcacggataaaggcgttcataccgtttgaagcagaccaaatggttcctaaaatccctacagtcagtaacccgccgtttggttggcttacaaattgagctacgttatctttaaagattgcagctgtttctcccggcataacgctttgaaggacatcgattgcctcttccggtttaatagatagatacggaacgatggatatcagtaaaataagcatagggaataatgatagcatataataataggcttgctcagccgctagtcccgttgcttggtcttcttgaatttctttaccaagactttttccaaatgataatagctttttcatgataaacctctactttctctttttttgttcttttcccattttatgcacctttcaatcttgaaagtggagaatttcaagcaaaatctcaaatcaaacgaccaagagaaagtagaatgatgtttcctacacaaaaaaagttccagctcaaaagagccagaacttttcatcagagtatttatgtagagcagactagcgaatgtgtccttgtgcaccacttaattgctgttgcgccattgcaacaagatgcttcgtcatttctccaccaacggaaccatttgcacgagccgtttgctcagctccaagctgaacgttaagtcttcccgcgacttccgtttttaactgatcaagaagctgttcagcaccttgaactaaaataggattacgatttgccatgtttatcactcctttcctccaacagcttatataggttaatgttcctttcacttgaaattttatacaacatccttcaaaaaaaaagatccctggctatcgccgagatcttttttctttttaagcttttctacactcgttcaagaggcattgtgcagcagcggaaagaaccgccggacttaataatttcagatatatcaacttcaattaatttatagccccgtttccttaactcttcattcacttctgtattcattggcaggctgatcacccgttgattaccgatggataatacattggttcccatcgtaaactgctcttcttttgttacttcaattaagtcatatttcatgcgaagtaaatttaattctttctcatgtaaagctggtgaaaatacaagcgcttctgtaggtgataaaatatttaacacacaatcaagatgaagataagaccggtcaataggaatcggaacaacttcatacgctggaagcagctcttggatatgctccacgccttctttacttgtacggtcgctgagtgcgataaaaatagcttgtccatcaatcagcacatctccaccttcaatgggatggtccggtacctgatgaaaaggaataacttgctgctgcagccactctgctagcacttgttcttctccacttcgaatttcgctgcccattttcgtgacaataatggtatctccgagcgtatagccaatatcccgcgtaaatacttgttctggaaatggctcttgtgcagatagcccgatgacttctactccttctttttgaaggcattcgacaaattgacggtgctgctttgaagccaagctctcatcaatattttcgtcggcataatgcttttgtgtttcattaataatttcttcaattttcatatatgtaggcggacaaacaatcacacgttttaatgtatcatattcatttttacacccataactattcgtcattttagctggctgtttcatttgcatctttttaaatcccccttcgtgcatttatgtacagtgttccctaaatctcctgaaacataaacacgattttactgaggaaacacccctgcgcatctatctaaaaaactttttcaggcaagaaaaacaaaaaaacacaatacttcttctaattacaataactgttagtataaaatagtctagtaactgtacaaaaaattggaggttaatatgaataaagtagcgaacgcattatatgcgggcagaaaaattttattaatactgtggatcatcctaattgtcggatttggcttttatgcggctaagcttccttctgtgctgggaggaaacggatttgaaatgaaaggaatgtataaagataccgagcagcttttagttaataaatttgatgttagcgaagctcagatcatcgttttgtttgaaaaaaaagacggagtttctgcctcgaaattccagcaaacgatcgctcagtatatgcaaaaagcaaaggacaactcagacgcgtcgaaagtcgacataccaacggcttctaacaagatgataaaaggaagcacagcgtatggaattatccactttaatcacgaggatggaacgatggataaacgagtggaaaagatcagaactctttcagctgaagaaaaagaaatgagtgtaaaattaaccggtggtcctattattgaaaaagatatgaatacagcaagccaagcagatttagcaaaagcggaagctattggcattcctgttgctttagttgtgcttcttctagcttttggcggcgtggtagccgctgcaatccctctgatgataggaattgtaaccgtcgttaccaccatgggtgttgtctatttctttcatccgtacacagagctgtccatcttcattttaaacgtgattccaatgattggattagctcttagtattgactttgcccttttatttattaatcgctttaaagaagaaatccaaacaaaatcagtagaacaagcaatcaaaattaccattcaaacagcaggacgctcggtcatcttctcaggattatgcgtatttattggattagcgggaatgctgtttattcaagtggatatttttcaaaacgtcgctcttggaggaatggctgttgtttttattgctgtgttttcagctcttacgctgcttccttccatactggctatattaggtacacgcattaatcgtttacgcatcttaaaagtcagtgaacaaggcggtcagtctaggtggcgttcattcgctacatttgttatgaaaaagcctgtaactatgactattgtttctcttatcattctgttagtagcacttattcccgttcgagacatgcatctagaaataccgtcttcagaagcgctgccaacaaaatacgagtctcgtcaagcttttgacacgtataacgatacgtttataaataaaaacacggcagacgtttattttgtgctaaaagctaagcaagatatgctgaatgaaaagcctttaacaaatgcctttacttttataaaacaattaaaagaagattcgttagttaagcaagtcgattctatttctaccgctttaaatgtaaaatcgagtgatcagcttcaagctatgctggaaaacccacagataagtgcgcagacaaagccagctgtagattcgttcattaacggacattatatgcttataaaagctatgctagatacagaccaaaattcagatgaagcaaaagattttgttcgaaaatggaaagacaaacgttcacctttcaccgttcatattggcggctatccaaaatttgaacaagaaatattcgatgaaatatatgaaaaagctccatatggtatggctcttgttttattttcaacgtatgtcattttaatgattgcttttcgttctgtcctcattcctttaaaggctatcattatgaatattttaagcttaacagctacgtttggtttacttgtatggctgtttcaaaatggccatttaggtcttacccaatctaatattgctttagtgctgccggtctttgttttcggccttgtatttgggctcagcatggactacgaagtctttttgatttcgcgcatccacgaagtgtatcatcaaacccacgataataatgtggcaacggtagaaggcttagcttccactagcaaaattattacgagcgctgctttaattatgattgtgattacaggagcctttgcttttacagatgtaacgcctgttaaacaaatgggtgtaggaattgctttagctatatttatcgatgcaacgattgtcagaatgcttcttgtcccttctcttatgaaattgctcggagatgccaactggtggtttttcactaaaaaacgcgataagtccagttccaatgaacagttaaaatcataataaaaaaacccgctcacttgagcgggttttgcattgaagatttctttatcgacttaattttgcaaaagcgataatgccttcttcatcgtctaattccagttctagtcctgctgcgtatgggtctacgttcatttccgtatccagccaaaagcgcagcgcttcaataatgttcaaagtaatatgaacctgcttacgatcatgcacgtatgactctgctgaaaaaccgtagtcatcatcatacattagctcaatctctacttcttgaggctgaacttgttttttttctgcgatatataggcacatcgcattgataatatcttgttcagaaatttttattgtctccaagatttcacttcctcatttttacgcttgttgctacgtacgctttggaataactttactacaagaaggattaaagctacaatcacaagcatgtttaccataaagcctaaaattgggcctaatggtcctaagctagatagtaagcttccgaataataagcccgcaattcctcccattaaaagacctttcattaagccgccgcgctttgagctagccgctgtacttttagatgatgagtttttagacgtattgttttgcttaaccgaattactgttattgtttttaaataagcttgattggttattgcttccgctgtcaaaagagcgctttcctgatttatacccttttgcgcttgctacgtttgaaccgtcatgaataagtgatccaccaactggtgaaaacacaaccgctaatgcgataaatgcggccaataatttttttaccattgctttccctccactaaatgactaacgtcacatatgttttttcatatatgatttccatatatgttcctacgttttatcataccaaaaggtttcacttttttatataaaaatgcatcaagctccatcaaatgttcacaggattaaacatttgcacgtatttcgtgcttatataacatcatttagatataaatcaaagacattcataaaactaacaaaggtccttcatcttcattaaatacagcttattttacactttcctaaaaatattatctaaagtaactgttgtagagttctttggtttttccacttctttaataatgtctttataggctacctttgcctttattactaattaaaggatataggtgcttataggacgaataccatacaggaaacagcgcctcaaacatatagtacaatgcattaaaaattggctctgaaagcttctaatgctgtacgtttgcagttaattgatggtcaatgcttcacgttatctacttgcctttcataaataagagttttctcttatatgaatatgtatagatagactaaagttaaaaaggagagatacgatgttgaatgaacagctcccattatcaacagcaaatttatcagatgcaatggaaggtgcaaaccacttagacttttctattaagccattgcagcgtcattacaaactatttggaccggctcttactgtagatacgcctgctggcaataattactcagtgcttgaagcgattcgactagcggagcccggaagcgtgctcgtcattgatggaaaaagctactgtaaccgtgccttagcaggagatttcgtagtagccatggcgaagcttgttggaataagcggtattgtactagatggtgttatacgagatcaggaagacattgaaaagctcaatttccctgtattttgtaagggctctacgatcgcagcaagcagcaaaaaagaaaaagggatagtaaatggaaccatttcctgcggaggcgtgaaaatccatcctggtgattttattgcaggtgacgacggtggagtcattgtcattcctaaggaggaagccgaagaagtattagcaaaagcacgagaaaagtggcaaaaagataaagatagagaaaacgaagtattaatcagcaaagaaactgtgtatacgtatttagataaagctttaaaataaaagacctccgcttggaggtcttttatttgtcatattgtaaaaattctaatcgatttccgaacgggtcgtggacaaaaaaacgctctctccctgcaataggctcttcttcagaaagagtgcatcctgaatgtgtcagcttacgtttaagcgtattgatatcttctacaacaaaagcaggatgcgcttttttagcaggtatgtagtcatcttgaatactaatatgcacttcttgagttccacattgaaaccatatgccgcctctgtgccttagattttccggcttaggcacagttttcattcctaaaagattttcataaaaatttcttgcttcttgctcgcatccttctggaccaagaagctgaatatgatcaattcctagaaacatccacaaacccctttccaaacaggtcttcctagaagttattaatcaatgactctaggattgtgaataacctgcagctcttttacagcttgcttcatttcgcttttacaaattggacaagttggctgatctccgcttttgaaattatctcgaacccaacaattacacgtatctgatgtacattcccaaacttttgtttcttcaataacagccggctctaaatttttacgattatacatacacatcgtctcctttaaacagtactttttaagtggataataaatgaagattaacttagcgtgtaaatgtggtaaatggtgcaagataaagtgatactatacatccgtaaatcaatctttgaggaatacatacggcgtcttgaaagactaaaatataagtgaagtcataacaaagcagatagcagttgctattcttaaaacaacgggatagtctgaaaagaacaaaaatgaagatcacaaaaattatatattttactattataacagagtttatatttttttacaaatcagcttccatttacttatttttctttgcataaaaagaaaaatagcgagcaaataattctgctcgcttttccatttttatcgagtttgtccgtttccactcataatatatttaattgtcgtaagcgcaggaagtcccattggaccgcgtgcatggagcttttgagttgaaataccaatttcggcgccaaatcctaaagctcctccgtcagtgaaacgcgtagaagcattatgatacaatgcggctgcatccactaaagacaaaaagcgtgatacggcttgttcatcttccgaaataatggcttcagagtgttttgtaccgtatgtttcgatgtggtcaatcgcttcgtccacactttctactaccttcatcgcgatagctaaacgcaaatactcttcagcccagtctttttcagccgctggctttgctccaggaatttcagccactgctgcttcgtcaccgtacacttcaatattatgatcgttgaatgcttgaattaattcatctttatgagaatcgagccagctcttgtgcacaagaaccgtttccgctgagttacacaccgcaggtcgatctgtttttgcgttaattaaaattggaatggcctttttagcatcagcttgttcatcgatataaatatggcagtttccaactcccgtttccaacacgggtaccgttgcgttattgatgactgcttgaatcagtgaagctcctccgcgcggaattagcacgtcaatatgctctttcatggtaaataattcttgcgtagccgaacgatccgtacttgaaataaactgtaccgcttctttaggaaccggcgtttcatcaagagccttatggataatgtccacgatagcttggttagatgaaatagctgaagagccaccttttaacacaatggcatttccagatttcaatgctagccctgttgcatctaccgttacgtttggacgtgcttcataaatcattccgataacgccaagaggcacgcgtacttgctttacatctagaccgttatccaatgtccagcttgataagatatctcctgttggatcgtctagctcagcaacttcacgaaggccgttggcaaattcttttacacgttccgctgaaagagcaaggcggtccatcagcgcttcgtcaaaccctttttctttcccgttttttaagtctacttcatttgcttttaaaatatactccgtgttgttttcaagtgtagaggcaatcgttaacagcgcatcgtttttttgttctgttgttagtaaacttaattgcttagctgctttttttgctgaaatagcttgttcttctactgaatacttttcatttgtttgtaacaccaaatcactcctggattcgttttagttttgtttgattttaaagtgtgaggcataagaggtaaatgcaatcatgcaaagaaaaggaagggctccttttctttacagcatgtttgcttacaaaccgaccggtactggaatttctaagtgacacactagcccttcgctgtctacaatcggttgatcaattggctcattcagtgcaagttcatcagatgaataatttgtcacgccaagagccagctcattttcgtctttatctagaatacgtacaactgctcgttcactaaagtggcctttaatatatttaacgtgctcgcgaagtaaaggctctttatcttcaataattgcacgtttcgcggcgtcttcgactactatttccccttcaggaccagagttaaacgcaatccactgctttttctgattaaggttcgcagaattatcttcagattcaaaatacgttcctgttgcatctccatcaaccgcttgtgttaaaatgtttggcacgccagctcttcctaaaaatgctgggattcctgacgccatagcgattttgaacgcatcaattttcgagcgcataccgcctgttccaactgaacttcctgaatctcctgcagattcttcgatttcttgtgtgatttcccctacgtgaggaactaattttgcatttgaatcctggcgagggtccgcgctgtataagccatcgatatccgataaaataataagcaggtcggaatccactagtccagcaactttagctgaaagtgtatcattatcgccaaattttaatcgattgatggttaccgtgtcgttttcattgacaattggcacaatgccgcgttctaatagcacgttaattgtatttcgtgcattgttgtaacgattttcgtctgaaaaatcatctctcgtaattaagatttgagaagcaacgtatccatgtgatagaaacagttctgaataagcctccattaacagtccttgaccgattgaggcagctgcttgtttttcaggtaaagagctaggtcgctctaagcagccaagcttgcggtaccctgcagctacagctcctgatgaaactaatagcacttcatgaccgctatcttttaagtctacgacttgatccacaaggcgctcgagcttccgtctgctgatttcaccgtgtgaacttgttaatgaactacttccaattttaattacaacccgcttcttattgtcgggactcatcaaatcactcctagtgtgttctgtatgttttcttgtttatgatttttttgtggtgaggaattcacgaagaagataagtgacgaattaattagtacttgccactttttgtagttgagcactcatttcttttgaacgctttgatgctcctttgactgcttgcatcattgcttctccgccgccgtgtttagctaaggcgtctaaaccagccgctgttgtaccgtttggagacgtcacattttcacgaagctccgtcggcgtttcatctctttccatcatcattcttgctgcaccgtaaatggtttgggcgccaatttcacgtgctagctcaggatcgagaccttcttctttagctgctttttcgatatgctccataaggaaataaaaataagcgggtccacttccggcaattcctgtgaaaatgtccatttgaggctcatcaatcacgtatacctttccgattgcagaaagcagctcttttgctgttagcacagcatccattgcagcatattgacctggagatatagccgttgctgattgctgaatcatacttgatgtattcggcatcactcgaatgacctgctgttcatcatgcaataactcttccatgtaagaagacgaaatccctgcaagaacagataggacaagctggtctttgttgatttgaggctttaattcgtttaatgcctcttcagcgccttttggcttcatcgctagaataaaaacgtcaatgtcatctgttttcagctcgctgcgctttactgctgtgataccatatctattttcaagttcatgcaatcgcgcatcattgcttcgatttgttacgataatattttcagcaggtaatttctctgcattgaccataccagaaatcatcgcttctgccattgatccagcacctaaaaaagcaactttttgtttttgatccatcaaatctcccctgtcatttgttcgtatttttgttctcgtttctttcaacggttcctatagtaacatgctgaaaaagagtgtcaagttgaatttaaccgtttttttcctccttgagcgtataaccttatgcatatgtaagcgtaaacaaaacttttttaaatatttttttctgcaaaaaaaaacgattttttttataaaaatacgtttatataaagaaaaacggggcatactatatagtttggactttaaatttttttgcaaacaatagaggaattttgaaaacgttatttgaacaatataataggtttgctaaaatgaacctatgtaccagcatcttggtttttttaaaaaaatttacttttgatgtaaaccacgctgtgctgtcgacattaaaataaacaaaacgacatacagtctaggaagtgtctaaacattattggaggttctattatgaagaacaactcgttttctacagttccatcgtcttcagaaggaatagagaaacaggatttacacgttgtgggaattggcgcttctgccggagggttagaagctattgagcagtttttcgctaatatgccttcaccaaatggaatggcgtttattattgtgcaacacctttcctctaagtataaaagttttatgccagaacttttagcaaaaaaaacaggaatgaatatcaaactgacacaagacgggatgactttacaagaagacacaatttatttaaatcctccccatcattacgtgatcgttgttgatcatactcttcgccttcgtccttatgaagaaaatgatcaggtaaagtacccgattgacgccttttttcattctctggctgctgcaaaaaaacaccggtgcacagccattattttatcgggaaaaggaaatgatggaacaggaggagcaaaaacgatacgagagtatggcggaactgtacttgtacaagatgaaagcacagcaaagtacagggatatgcccctaagcgctattgatgcacaccttgctgattatattctttctcctgctgatatgcctgaccttgtgcaaacgcatgtcagccaaactgaatttacatataatgaagaaacgctgcaatacatatattcattaataaagaagaaaacaggcatcgacttctctatgtataaaaaaaacacggtgctgagacgacttgaaaagaggatggctttactcgatccgccctctcaaacgatggaagaataccgggactatttatgtaaagaagccgaagaaatcgtcgaactgcagcgagacttgctgattggagtgacacaatttcttagagataaagaagcattctctattattgaagaacaagtcatccctcaattagttgaaagaaagattcatagtcaagaagatgaaatccgcatctgggtagcaggttgttctactggtcaagaagcatatacattagctattttgcttcatgactatttatcaacaatcaaccgttatttcgatgtccgaatctttgctacggacatcgatcgtcaggcaatcaaaagagctagtcaaggtatttatgaagaagcggaagttcattccttctcagcagctcagattaatgaatattttgagcaaacaaaacacgggaattatcaagttaaaaaaacaatccgcaaaatgattgtttttgccccgcataatataggaaaagactcgccttttgtaaacgttgatttaattagctgtcgaaatatgatgatttacttccaagctgaactgcagcagcgcattctgtctctttttcatttttctttaacagaagaaggcgtactttttttaggacctagtgaaacaacgggaaacttgtctgatttgttccgccctatcaacagtaagtggaaaatatttaagcgttccgggcagcccagccgacaaattacgggaacttttaatctttcgaaatccaacttgcatgaaggtgatttttctagcgtgccgctgccaagtcaactttataagcctcttccttcacttaaattagatgagatgtatcagtcaatgattgatcactttatgagcccttgtcttgtattaaatgaatataacgaagtgatattttgttcaaaagaagcgactcagcttattaacgttcctgtagggaaaattaattatacaattttcaaaatggttccagttcacgtctctttagccattggagcagctattaaacgcgtaaaagagcaaggtatgagcgtatgctgtcagcacattgagtttgtcataaacaacgtgcagcgccgttttaatattacgatatctgcccttccaacaaatcactctctttacttacttatgtttgatgaacagacagatggtgccattattgataaggaagagcccatgcttcttaatcaaacaagctctattagtgagcttgtagtagatttagagcaagagcttcattatacgcagcagcatttgcaaacgacgattgaagagctagaaacagcaaatgaggagctaaagtccacaaacgaagaactgattgcttctaacgaagaactgcagtctgttaatgaagagttaattagtgttaacaatcagtacgagcgaaagattgaagaattaacggacttaaacaacgatatcgataatttattaatcagtacaactattgctaccatctttttagacgagcagctgaatattaaattatttacgccggaaacgaaaacagtgatcaacgttcttcatcaagatattggaagacctttctttcatatttcgcataactttagatatgaccatctaatcgaggatgcaatgcacgttttaagaacaaataacacccttcaaaaagaaattcaaagctacgataaccaatggtacagcatgaaaatgatgccttatcgtacaaatgagaatttaattaacggtgtagttattacgtttattaatattacagaaattaaacgatcaaatgaagaattggctattacatcatttgcagtcgctcacagtcctacgggcatttttattaccgatcatcaaggtaaaattaagtacattaatcaaaaattcatggagcaaaagcatgcgccgcaggaagtatttgggttacacctctatgacttatatacaaaaaagctgggggttaaaagatttcctaagatttggaatggagtatacagaggagaaaaatggaacggagaaatttcctacgttcaagaagacggagaaaccgtttgggaacagttagccttaatgcctgttaaaaatgatcaggatgaaatcatccattacattgggttaagcgaagacatttcacagcgcaaacagtcggaaatgatgctcaaaaattcagagatgctgtcagcacttggacagctggctgctggcattgcccatgaaatacgaaaccctcttacatcattaaagggctttttacagcttatgatgcaagaagaaacgtataaaaaagaatatatggaagtcatgatgtccgagtttaaccgcttagaactaatcgttagcgaactgctcattctagccaaacccaaagtcgtaaaatatgaaaataaacagataaatttaattcttcaagacgtatgtacgctgctgcatacacaggccattcttaaaaacattactatttcaacagattttgaagaaaaattacctgttgttcattgtattgaaaaagatatgaaacaagtatttatcaacatggtgaaaaattctattgaagcgatggatgaccccgggtctattctggtggtatctaaatttgatccagatacaaatcaagtagtcgtccaagtgatagatgaaggaaaaggcatgccgaaagatcgattaacacgaattagcgagcctttctatacaacaaaagaaaaaggaacaggattaggattgatggtgagtcacaaaatcattagtaatcataaaggaagcatttcgtatgatagtgaagaaggaaaaggaacaacggtagaaatccgattgccgctttcttaatgtactttgttcttctgccttaaacattcaagctcctgattaattacatcttggatgtcaaacaaatgtgtagagaccaattcaatatattctccttttcctgcttcaattacgtcggagcggataatacttaggaggtcttgaatggttagcacatttgttttcatttctcgaaaatgacgctgaagatcaactagctgcatttttttcgccgtttctacatctgtttccctgactgaaaaatcttggttcactggtgatgagtcttgcataagtatagagcgaaactgttgaagagttgattgaacacttgtcatatgctcatgaataggataacagaaaacagcgtgcagcgaatgataggcttcaggcttaaaatgaaaatcaaaaagagcaaccgggttagaaaacgtgcgcatatttacttcgatttgcacttcttcctttccctggagtgctctttttactttttcttggctgtcttcatcaactagatctaaaaagttctgaagaggcgggaaatttttcgtgacgcttggtgtaaattcaattatttcgttgtctttattgagtaaaaacattggaaccggaatgtgttgaatcggcaaactgatcatatttcttccccattgctaacattttatcttgcgtcgaactttctttattgttgattagaagccagtctttaaaagcttgaatatgattaatgaatatggttcttgaagatcctgaagccgacaaatcgtgcttgttgagaagcctgctgcctaccaatacaagtgggtgttgcgacatgctttcaatctcagcaatatacttttgtaaatccggcaagaggtgtacttgcgagacagacaagcacactacatcagggtcccatctttcaatgctttttagagcaaacggcagcggcaaatttgctcctaaatttttaacttcccatccctgttctctcataagtcctgcaatcattttaatgcctaagtaatgctcttctccttcaatgcaaaaaagaagtgctcgatggcgctgaggcaattgatgctgtgatagctgaaagcgagttaacatatagtcacaggctgcagtagccaaatgctcgtccgcgactgaaattttattttctttccaccttttccctatctcgtacattgcttctgtcagaaacgtgtatacgtcagttgaagaatggccttcttctatatacatagcaatgagcagccagcttttttgaacgtctccttctagcaaacaatcagctaaagccactacattacgagagtaaacgataagatcacgcccttttcctaaagttacaataaatctctaggcaaaacttcctctttgcaagatggacaacatgcatagacgcctttattttcatcatactctacgttcatcggctgcttgcatgctttacatacagcatgtacgtagtttaaatatttttccactaataaacgtgttgctccacttgttttcccgcaataatagcaaataaaccttacttttcctttttttgttatctctacttctcgcatatgctgacaagattcacagcgatcccagctgcgaaggtaattgctcaaagaatattgtggtttatttgtttctatatacattttcgtttcttgatttcttgttttatcttcggtaaagtcaattgaccgaataagctgtttagcgcctagctttgattcaattctagctgccataaatgcttcattctttccgccataaggcatattaatccatatagtggattcatcgattataagcagtgacatcggaacagcagatgaaatgacatgagcaccgtcaattcgaacttttgctggttcacgagtaagaacggtcacttcacctttaagcgaatttaacacatcccgtatttcttgaggaacaagggaagcataaggaatacacaataaaatctgctgccgagcttgatataagtctttttttaactgactgctgttcgatggatggtaccaaatcaatttaggatgctgaatgacttcttttaaaaattgctgaggttgatatactttttgattttcgttaaagtggttgaccaacttccataacgctcgctcctttggcacatgctgctgggcaaacgactcgtctgaaagcataataaattttccttttgaacgcgtcaccgccacatttaccaatcgatcgctattttcatttgttaaaagtaaccctggttttgactgcggctttgtatcgaccgtatcaaaaatcatgatatctcgttccgcgccttgaaatttgtgtacggttgctgcaattatatcgctagctggttcaatatcttgaagaaatgcgttgatcaatttagcttgagacttataaggagttacatagccaagagtagccgaagaagctttgcgtgcccgcagcatcaaacttaccgccaaaacagccgttatcacattgtaacgtgagccggaagcgacatctcgcatagcggaagaatgcaaatgaccaatgttaagcataaacgctgcttcatgagcaaacggccggctgcctgctaccacttctcgacttgttgtgacagatggatgatctgctactcgattgctgtaaatatagcgatttgtaaaagctgagatatctttatgcattcttctttgcttcgtcaacataaaaagatgcgggtgtatctcaccgctttctacttgctctacaagacccgtctgctcaaataaatctcgctgcagccacttcttcacttcagcatgagaagattgagataccgggggaagctgtttaaaatcgccgcatacgacaattcgttttcctaacgtagctgcaaaagcaatttgcggtgcatatgccatgctaatttcatctaccacaaccatatcaaattcactttgataaagtaatcggtcaatagccgcttttgataaagtagtgcctacaatatacgcttgatcaaaaacatttttctccgcttcaatccacttgttacgaagggcgtttagctttttgttaacttgctgaagctggtgagctctattgggatacctgcttaagtaaactcgttcttcttgtaaatcacgcatctcctgagctaaatccggatcatcttctccaatgacttcttctacttttatattttctaagccgctgctttttgttgctccgtatcgaatgagttttccttttttccaaacttctttcttttttaactgacgcgcagtttcttgcagcaaaccgtccaccgctgcattactgtgagataataaaaggatccgctttgatttccggtaatagcttgccgcgattttggacagcgtgtatgtttttcctgttccaggaggcccccaaatatacgtagtacggttataacgcgctcgcatcaacacttcatgaagagcattcttagacgtatactccttatgacgaacaggactatcacctctcataagacgtttgattctcactattttttgcctgtaatcttttgcttccgtgagtctatcaatgagagcctgcaataattcccatggttcgttatatatatcaagttcgtctacttcttgtccaataaacgcatctattttaaggtacaaatcaaacccttctgttccgataacttctcctttactttctttatgctggtggacaaggcgtacctgagctccatcaaaaaggtataaatcggctgtgcgttcaaaccggtaaagatacgcatcctcctgctgccctaagtactctccttttccaaccgtatacttttctccgccgtgtttcttcatataattaatctcaattgaaagtgcgcgcacccatgcttttaaatatgaagagatagagcgtttttccatagatgtctaactccctttttatccgttcatttctaacttgtctattctatcatgtcatttgaatatagcatagcttcttcatttttataaaagcagaacaccttttttactattctatctctacagacaaattaagacttttttcatcataatcgtagaaaaaccgcgttttttctataactttagacgtattgttacaaacttgtaatataaaacctaccattttgtcatgagtttgttacatattgctgatagaataagagacaactattggaaataaaggagaaatattagatgaaaaaacacatttttacattaggggctacagctttagtatcaattggaattgcagacgcagcatcagctgacacagacacgcataaagtaaaagctggagaaacgttattcagcatctcacagcagcataatgtaacagttgaagacttaaaaaagtggaacggtctttcttccacattaatttatgcaaaccaaacattacaaattggatctacatctactgactcttcatctagttcaactccaactacgacatcttcaaatcatacatatacagtaaaatcaggcgacacgctttatcgtatcgctaaaaacaacggtacttctgtacagcagctaaaagagtggaataacttatctagtcatttaatttatgtgaatcaagtactaaaaataagcggaacagggactgtttcatcatcaccttcagcacctgtacaagaaaaaacaaacgaaacgcaagcatccccggctcctagcaacagtaaaagttacaaagttcagcctggagatacaatgtggagcgtagcacagcgacacggcatttcaatttctcaattaaaacagtggaataacttatcgtctaatacgatttacattaatcaagtgctacaagtaggcggacaagctgcagctcaggcgaaaccatcaacgccatcacctgctgctccttcaacaccgtcgacttcagcaccggcacctgctccagcgcaagaaagcaagtcggtttcaaaagagattacggttgaagcaacagcttatactgcttactgtgcgggctgcagcggaatcactgctacaggcatcgacctaaggtcaaatcctaatcgaaaagtaattgcagttgatcctcgcgtgattccattaggttctcgcgtatacgtagaaggttacggagaagcaattgctggagatactggcggtgccattaaaggcactcgcgttgatttatttatggcatctcaaagctcagctttaaattggggacgcaaaacggtaaaacttcaaattttagattaatcactaaaagcagaagcgtgttagtcgcttctgctttttaattttttttcaaacataatcatatcgatagcttgcaagccattctcgtaaatcggtggaacgtactgcaaaaagaaattctttttgacaccactttgataaaagcctgcctttttataaaatgctatgttttcaagactggagtccgctgttcctacaatcattttagaataatggttacactcatacaatgcttctaactttttaatgactttgctgccgattccttttcttctgtatgcttcttttaaaccgatattctttacttctactgccgatttcttttcatcggtgaggcactgcacaactcctatctccttcttttcatacacaatggtaaataaggaaccttcatttatatacgacttcaccactttttcgtcttcatcccctattaatagcaggttcaaataggaagcgcgcctgtccttgtggatttcaataaggtcgatactcatctttatcctccaaaaaataagtcaataatattgctgcctcttgaagatgatttattatatagctctgaatatccgcagttcgtgcaatataccactgtaaagtgattgtgctgaacatctaagtatctagacagtcccgttcccgttgtagcaatttcttttgtttgtgcttctgtatgtccgcattttacacaaccgtttttccccattgtcatactcctttataaataaaataatttcttatttatataaacggatagaaaaggaaaaagtttcatttaattgataaataaaggaaccaaggaaagaggctgggacaaaagtagtttaaatgaaaaaaatccaaattattaatcggaattctcgattgataatttggatttttacgttgtcatggtgaacgtaggttttatgtaactgcttctagctgttgattggaggacaaggcgaagactcctgcgggaaaagcggaacaggtgagaccccgcaggagcgcaagcgacgaggaggctcagggaccgcctgcggaaagcgaagccttgcacggaaatcaacagcggtgtaacaagctatttgtactagctcatgcatccaatttattcgtctttggatgggattgacttagttacatctcaatttcttcttacttttaatatcaacgttctaactgtacactcgatttctatgacagcatttctcttttcataatttcaacgtttttttgatgacattgtgcggtgaaatcagagggaaacgccagtttatcattgagcttatcgagcgcttctttacttttttctttcactgccgcttgcagttcatctaaataagagctggccatctccactcgcctttgaatttcagctcggtaatgtgtcgttttcccgtgcccgggaactagcgttagattttggtgcttagctaaaatgtgtcgcgcagtggcaagtgtgtcgcggtaatcgtttacactttcatatatgtacggatattcaaaatccgataaataatcccctgcaatccatattgaatcatcgacaatcataaataggccatcgtttgtatgaccttttgcaaaataacagataatggatgtttcacctaaagtaatatgctgttcattttcggttacaacaatatccaactctgggaatataatatcatgagatctttttatataatagtcatgatcaaactgcttaatcatttgaactttttcttctttgtccggatgatgttctaaaaatttgctgccgataaaggtggcatttaattctaagaaagccccatacccaatgacgtgatcaaaatctccgtgagtaaaaaacacatacagtttgcggtggtttaagatctcttgaacatgctgtttaatttcattaatttcgtgaggaagccacgttggatcgacaacaatgacacagtcttttgtttcaatcactgcagatgttgtttgaaatagcgcgctttcaaaaaccgtcatttgctccgttttatattgaatcatgagaacagctccttattttttctatcacctttattatagcggaaatagagagataagggcgcgtatgacggtttataaaacgaaactatgcaagatgtgataaaatgcggaaccagccaaacaatgaaatccaaataggaatactaaataaggttccccaaaataaacctttcaaaaagttcccttgattcattctgatattcctcaccttcatcgtatgttggttcttagtctagcgcagcttaatgaaattttagtgaaaaataaaaaaagaagcagttgcttctttttttatttattataaaattggtgatcatacttaattttcggcagctcgcgtacttcctgcgacatttccgttccgcacatcggacagttataatcaaccgtaacaaaatcttctctcatccacccattacatgattcagattgacacgcatatacagtcgtatccatcatttgatctacttcttcttctacggctttttttgcaaaatacatgtgcacagctccctttttttcttagtatatgtaaaattcccattttttatttacagcttgattactttttcatccggcgttattggacaccactatttaattgtgtataattaaataaaaagcaatagactggaggcaacatgaatggaacaactttataagcagctgcagctagaaaatcagctttgtttctcaatttacgccacgtctcgagaaattacaaaggtgtacaagccactgctcgataaattaggagtaacctatccgcagtatttagcccttcttgttttatgggaacatgaaacactcagcgtaaaaaaaatgggcgaacttctgtatttggattcaggcacccttactcctatgctaaaaagaatgcaggatcaagaattagtgattcgtcagcgttctcatgaagatgaacgcgtcgtttttattagtttaaccgaaaaaggaaaaaaattacgtgataaagcttgtcatattccagaagaagtttttagtatgacgaataagtcgcaaggagaattagagaagctgaaagaaactctgcaggaattattgcaatcactgcatacgtacaatcaaaaatagaccatataaaattgcacataaaaaaacgcctggattcaagaaaaatccaggcgttttttatttactcagccgttgtatttaacgttacgttaacatttccacgcgttgctttagaatacgggcagaattgatgtgcatcttctactagcttctcagctacttcttgtgaaacgcctttaatatgagcgtttaacaccactccaattttaaagccatcatcagtgtggtcttttagtagacttacctctgcagtaatagacgaatcaatgtcttttttttgtttcttagcaattaaatttaaagcaccgtcaaaacaagcagaatatcctgctgcaaacagctgctcgggatttgttccttcttctttgttatttggagaaggatttacaagggttaaatcaataataccatcatctgatttaactcgaccatctcggcctcctaccgctgttgctttagatgtaaatagtacgtctgacataagatcacctcatagattattttatgtaatttcattgcagacaatcaaaaagtcgcaatcaaattcattttgtaatcactttgattaccgtgatagtaatgtacttccccttctataatgagtgtaaacctattattttatacaaaaaaagagagttacctctctttttttcctctttgtttttttaaaccgctttgaataatgttatctccatatttttcacgcaaactttcgaccgctttgtataaaggctctttttttgcttgctctccatatgtaaacaaatctaactgttcttcttcctgaagatggtggctcacttgaagagcagctacgcctaataaacgaatcggttctccgttccaatgcttttgaaataataccgcactgtaatgaaaaagatcgtttggctcgctaattgcttttgaaatagtttggcttcgagtaatggttttaaaatcactgtatcgtatcgttaattgaatcgttttgcttacaacttttttcgctttcatacgagagcttacagaatgcgatagtttatttaaaatagggagaacttcatgttcatctactgcattttgagatagggtcgtagagtttccaatagatttaaactgtgattggcgatcagggttcacctgtcgatcatcttggccccatgctcgttctttcataacttctccttttactccgagagtttgtttaagaagaccgggagcggcttttgctagatcaccgatggtcacgatcttaatcgcatttagcttctcagctgtttttttaccgattccgtgcatttcctctacggcttttggccaaagaactgtttggacatctctttttcgaaggacggtaatccctaaaggtttttgcatatcacttgccgttttggctaaaaatttattcggcgcgattccaattgacacaggaatttgcagcgtctgtattaaatgctgctgaattgactttgctatgtcaagaggagagcctaattcagcacagtttgtaatatccaaatagccttcatcaattgaagcaggctctaaaagaggtgaaatggttactaaataatcaaacatgtttttggacacttggcgatataatggaaaattaggttttataacaaccagctcagggcattttcttttcgcttcccaaagaggcattggcgcatatactccgcgtttacgagcaatatagttacaggttacaacaattcctcttcgttcctttggattgccagcaatagcaagaggcttatctttgagcgtatgatcatgtgcggtttcaacagatgcataaaaagcattggcatcaatatgaagaataactttgccgtttttagggtacatcattttcatactatcacctctttctgtataattaatccccgaaagaagaacgtacattcttatttattataactctttttttctaagttgtgcgtacctatactttatttttattttaagcgaacactgtgtgtcactctctcgtattctaatgaagaaaggaggaagaaaacgtgattgatcagcttatcggagccattaaccaattaggctacggatatttcttttttatcattttagttggagccaaccttactcctattcctgacccagtatatattatgcttgcgggcagtcaggctacttctccatccgttcagtatattccagcttttatacttacctacagcggcatgatgattagcctatatcttaagtttttgatagccagtcttttttcagctcagtcgcttgcgctattaaaacgcccgcgatgggaaaaaaatgtgatgaaagtcgagcgaacgattcaagaatatggatctcacgccatcatcgcaagctactttttaccaggaatgcgacatgtgatgcctttttttctcggagcaagcggaatgaagcatgggcattatattaaagtctcattttctttcggttttatttggacgctcgctttatttattttcggttccttttttaatacgacatcttcttatactgacgtgattgagatcactttagctttttgtgcgatcagtttgattatctatgccgtccaaagaagaaaaatacgaaaaaaacagcagtagtttgtgtaaaaagttctttttcacaaactgctgctgtttcatttatattaaatgacttcattatatccctttacaaagtatttgcgcgcgcggtaaagagctgattttaacgtagtcatctgcatatttaataactccgcaatttcttcatatttaaatccaaatccatattttaatagaagcaaattgcgatacttaggattcaatttatttaaaatcgcctgacattcagccgcttcttcctttctaagcacctgctgaataggcgtatacataacgggctcttctttgtaagaagacgtatagcggtctttcactattttacgccttcctaaatcacaccgtttatttaatgcgacgcgaaacatccaagcttttattttttcaggatcgaccatttcttgtttttctaaatattttaatgctacttcctgcgtaatatcttcggcgtcttgtctattcacgccatttttcaataaataagccagcacctgatttaaataatcttgcaattcctcgccgcacataataagttctccttctttattttagttattttagtttttcttttagttcgtttggcagctcattttcattcaacatgtaaatctgaggagtatctacttgatctttgtaataaaaagcaacaaaataatctccagtgtctcgtaagttcgcacgttgaagaagtgtttctacctgctgattgttttttactttaactgatttctcatccgccgttagcgatgtaaactcttcttgaagacgatagtcgcttttaagatgagaagagtttttaaacacttcggttttttctacgtcctttggcataaggcgggcacgttcatataaatgctcttttttcagccatgcttctacttcgctataagacttttcccaagaagcgttttgtacgtcctgcccttttccatccatgaaattgattgacgcccagctttcttttgtgctgtacatttcatcaaacgtttcgttcatcatcgactgtttgactacgtgtataagctcttgcactttttctggatttgtaatattaatggaatttgactttcctggaacagaaaaacttacgcttttaattttatctgtgttttgtgttcgtaaaagcggatggaaattttctttgtactcttttgtttccgcaatttctttataaaaagctttataatctgaaaatggaataaagtactctcgaactatttgctttccattttttaatttgtaagcaaataccgcgatttttccattgctgccctctatttcactttgtttttcaggatccatcttcttatctttagatgctgtaatttgtttttgcagctgacgaacgctcttaatcgtttctttacttgtatagtaatatggcgcttcgtaatagccattcattccatttgcatagttttcaggtttatcggtcaatcgatatatatcttcatcgaaatacacactttcaatctctgaaacttccggcactttagtagaatatccgaatacatctaaatgaatgataaagccaactatagctgcggctattacaaagcctagataccctttccatttcgtaaagatacgccacgttttatttaaaataatttgagcaactatatagcctattaatgaaccaataatatagcccacgaccatccatgaaaatccacctttcatgctgccgaagtaaaatccgcccagcatcagtgaacaagcggttactccgtatacgaatacaggttttaaccagccaactgaaatggttagcgtagcagcttctactcttcttttttgataggtgattaaagcaatgatgtaaaataagacgatgagtccaatataaacaaatacactagtagaaaagcttttatgagctaccatttgcgctacgtgtgaaaacggaataaggctgtcaacatttttgttcacgtaatagtcatacgcatagccgtaccagtaaaactttacattggatatagctaaataagagattccgccggggagaagaaatagaacgtataaaaagattccttgcaggacagacattcccgtgaacattcccgctaaaacagttccagctagcacaaataagttaatcagaatactgtagccgacccagcttagaacatctcttgttgtataaacattctcaaccgttaaaactcctttaacagcaaaagtcacgattcccgtaattaaaacagggacaactaaaaccaatgcgcccagaagcatattttgatgaaacagcgtagaacgtttaattggtaaactatgaatatagtcagccgcaattttcgtttgtatatatcgaaataggaaaataccaagtaacactggtacaacgaacataagcacgaattctagcccgccaaatacgtcaaataacgtgtctggtttctctatataaggctcaacctttcctgtaaaagtgaaaattagttgtaaaggcaaagcgaacagtagtactaacaagtagacaagcccaatccatcccacatttctcatggattgaatccacatgcctcggttaaacgatgatgttttcgattgcataacccacatcccccatttcataaataaagatttcttctagcgtaagtggcaagatgtcaaaaattaaaggcttatacgatcgaactttgttgactaagtgattttcttttcctcgaacaatacaaagcaagacgcttcctcgtttttcttgatataaaatgtctagcgtgtcataaagcgctagcggcacatctccttcaaatgcaacttgaattttgtgcacgtctgattttaaatcatccagctctttttcaattaataattgaccgtgatgcaaaatgcctacatgatcacaaagatcttccacttctcgcaagttatgtgatgaaattaagatcgtcatttcccgttctgccacgtcttgaacaagaaggtttttaattttttgacgcattaccgcatctaacccatcgagcggctcatctaagataagtacatcaggcatagcagacagcgctaaccaaaaacctacttgacgctgcattcccttggacattctatgtacttttttatgtaattgaattgggaaagcttcttttaatttttgaaaccgctcttcgttccaagtcggatagacacttctataaaaagacgctaattgcttaatcgttgtttgagggaaaaaataaagagaatctggcataaaaataagacgttcttttaaaccaacgttttcaaatacttcctcgccgtctattgcgattttcccgtgatcttgcttataaatacctgcaatgatttttaatagcgttgttttccctgccccgttggagccaagcagtccgtaaatagatcctttttttatagaaagcgtgacgtctcttagagcttccatttcttcaaactctttttttatcgccttcagttcaatcactatcgcttcctccttttactgatttttcagcctgtgaaataagtgatagaatttcatctttatccatccctaaatacatagcttctgccaacagttttactaattcttctttcatctttttcaccttctcgttatttagtgtatcaacttgaggcgttacaaaacttcctttgcctggaactgaataaatataattctgatattctagttcacgatacgctttttgaattgtatttggattaatcgttaattcttttgctaacagccgaacagatggaagcttttgatcggccttaaagacttcatgaataataagctctttcaatttatctactaattgctcgtatatcggcttgcgactacgaatatctaaatcgaacatagtctgcctcccttcatctacccaaaatcatgatgtgtgtactaggtgtattaactgtattactcatcgcattacagttaatattatagtatattttttggaaaaaacaagtactttttttacttttgttacaaacagatgacaaaaaagtgtttaatagctttatagataaaatgcaaataactgtaactaaatacgtgtgctgccttcgttataagtcaaagtactcctttaaatcagcacctcgttttatttttcttacccaagtgcctctagttattacaatagtaatgttttataatgtttataattaatttttttaatataaaaggagccatactctatgtactatgatgcgttaaagacgtttgtttctgttgtagaagagcaaagctttacaaaagctgcggaaaagttaatgatttcacagccaagcgtaagcgtacacatcaaaaatcttgaaaaagaatttcaaacttccctgttcctgcgttcacctaaaatgttaaaaatcacacccagcggcgaaattttatacgatcgtgctaaacaaatgattcagatatatgagcatacgaaacgagatatttatgaacatcatcaccgtgtcaaaggaatgctaacgattggcgccagtttcacgattggcgaatatattctcccttcatttttagcaaagcttcgtgaacaatatcctgatattgatgtagaagtgactatcggtaatacaaaggaaatcgctcagcttgttcgtcatttcaaagtcgacgtagggcttattgaaggtcacacggaagaatccgacttacatattcagtcctttatggacgatgagcttgccatcgttgcgtcagtggatcaccctttagctcagcttaaaaaagtagaaattgatgatttacaaaatcagcggtgggtagcgcgtgaaaaaggctctggaacaagagaatatttagatcacgttttaatgtccaacggtttaaaaatgaaaagcatgctaacgatcagcagcaatcaaggaattaaagaagccatcgttcacgatttagggatgtctgtgctgtcgctttgtgctattaaagaagatgtagaacaaaagcacctatcgattctcaacgttaacaccgctccttttaagcgccgtttttcttatatctatcctgctaacagcgctcataaaaaagtagccgagctttttattcagcttttaaactaaaaaaaagactttccacactgagtggaaagtctttttaagtcaatagccatacatgtctttacattcttttttagtgaacatgcgtctgctgagccggcatttttgacaaacgaaaagctaggagaaaggctgttgtcagaaacacaccaattaaagcaataacacctttccagccgtacgcactccagcataagccagccaccgtccctccaacgcttgatcctgcatagtaaaaaaacaaatacaaagacgaagcctgagccttgtcatgagtggctcttcttcccacccagctgcttgcgatagaatgacttccgaaaaagccaaaagtcagcagcaaaagcccggtaatttttatccataaaaccggatgcagcgtaacaattgaacctataagcgtaacagcaatcgtacataacagcacttttttccggccgtatcgatccgccagcgtccccatccagaccgagctgaatactcccacaaaaaaaataacaaaaataaaacttacaagcgtatgattccaagaatacggaggagcggataaagcgtatccaatataattgtataaagctacgttacttccaagcagtgcaaaaccaatagcaaaaaggcaaagcatccctttatcttgaagatgactgcgaagagagccggtaagctgacgaagttcaaaggaccgggaagtaaagttttgtgaatctggcaagttcataaaaaaaacaaaggtggccagtaaactgattgcgcttacaacatcaagagctacggaccagttgaaatattgcgtgagcacccctgtcataagccttcccgctacgcctccaaaggcgttgccgcttatataaatccccatcgcttttcctaaactccctggttcaatttcttctcctaagtaagccatggccacagaaggcagccctgctaaaacgattccttgaatgacgcgaaagactaacagcgtttcaaaggtagagctaaatgctgtcatgatgcataacaatgacgcaaaaattaacgatagacccatcagtttctttcgtccccacacttctgataaagaacctaaaaaaagcatactaaccgcaagcgtgatggttgttaacgaaagagacaagctggcaaacgccggagatatcccgaattctctagaaaattcgggtaaaatggcctgtgtacaatataaaatcgaaaatgtgttgaagcctgctgcaaaaagcgcaacatttgttttgcgaaaagctgatgttccaattacggtataactcacagttggtcacttccttttttctctaaaaaaagcatatcacggtttttttattctgtataattcattatgtaaatcgttttcatgcatttcggtaatgagtaaagtgaaaaggtaatgagtaaagtgaaaataggaatggacaacagcctgagtattttcaaacaactgtatgcaagactgttatgctttcctgttttacacaaacattaaaaaagttgagccagtttttcatggctcaacttttttaatctaacacataagatgctaatactttttgcacgtcgtaaatgcttttatctttacgaaattcttttgaaatcggtgcactagaacccgatacccaaatatttaattcggcatctaaatcgaacgttccagcagtttctacgctaaaatgggtaatcgtcttataaggaatggaatgataatctgttttctttcccgtcactccttgcttatcaacgataattaagcgtttcgtcgtaaacaccattaaatcgcgaatgactttatacgcttgttccactcgctcgttggcaattaagatattttgtaagtctttttcagttcctcttatatctgcttctgatgcatttcctaatagtccatctaatatacccatgctgatcactcctttatatctacactaccgcattttgttctgtctggaaacccaaaacgtttttttaatgaattaatttactttcacgcgctttttttgttaattttgcactcgttttactaagaggcttatgaagaaaaatgccaacgagcagcacgccaagccaaatgcaaagaagcaccgtaacgtcttttctgacaatatccgctaacatgcctcctaccacttctctcatcatgcttattgcataggtaaatggtaaaaatggattgattgcttggaaaaaagcaggcacgacttgaatcggaaatgtaccgcccgcagcggaaagctgaagcacaagtaaaacaatcgccatcgcttttcctgcattgccaaatatcgcaacaagcgtatagacaattgtcataaatacgaagctgcacagcaagcccaaaaagataaaaggcactttatctacgacatacgttttgattataaataaatctcctagcgtcacaataaaagcttgcacgagagcaatagacaaaaacgttaagagtcttccaagatagacttcatagcttttgaatcgctcttcctccgctacttctacgcttaaaatcgaaactaacagcaaagctccgacccacaagcaaagcgttgtataaaacggcgacatagccgagccatagttcggaatcgggtaaagtctttcttctttcaaaagaaccggcttagcaaaaaaatcactttctttttgcacgtcgttttttagcaaattaataatatcttcaatattttctttttgctgaaattctcgtattttatccgctatattgtgtacgtttcgttcaattcgtggaaagtcttttgctattttcccaagctcctgctgcccaagcaagatgccactggctgttttagacaggacgttagaaacatccggcatgcttttattggcttcatcaagcagtgagtttgctcttgccgttttatctttcgcttctttgattgcttgttcaacagcaggcacaatcgtagaagaatacgaattcgttaacgcatttaatctagaaacagcttggtccgtacgagagctgaatccattaagtacgctttgatttggagcattcccattctttgtttgttgctgcatactgtttacatcggaaagctgctgctgtaaaagcgtgtttacatcttttacgtcattaataacaggtgaaagaactttttgttgagataacgcatttaaatctgtaagaagcgtaagagtctctcctgtgtcagcaatttgttttgttaactgcccttttagctgttccgctgctgcgctgacttcagccggtgctatatctttttccatcagctgattcttcaattcttgaactcggagagctcgttgctgaacccgatgcagtgtttcgttaatcgttggctcagcgttttttaaaacttcatcgcttttagttaaaaaagtgtttagctgctgagtcatctgtgcgccgtcatctgttagtctctctacttcaggaagagcggcctgagcttttgatacaatagctccagctttttgagtggtgtcattcgcttcattaatgacttttttgatttcaggaagacgattttcgagctcaaaaatccgttgttcaacttgttgaatggtcggcaaatcccgctgcagtgtaatacctagttcgttaaacactgaaaaaatagctccattcgctgttttgacgaatttttcactgatttgttgtgttaagctgctggctcctttgcttgtaattttaggcgccactgcgtttattttttcgttcactttataaataatgaccggtttttccaaacgatcttgaagaacggtaccaagcttttgtgaaaaatcttttggaataacaatacttgcataatagtcaccgtgctttactccgtgatcagctttttctttggaaacaaacgtccatccaagcgttttatttttttttaacgttgcaataatatcttttcccacgttcacgtgctgccctcttatcgtagaaccttcatcttcgctcgttactgcaatggcaataccttcagtccgcccgtatggatcccaagatgcttttatattaaaccatgcgtaaaaagacggcagaatcataagcgtcagcacaatgataatcatcgcccaattggtgaaaattctttttaaatccctcgtataaatataaacagtatttttcatatgtcccacccagttttattgttacaagttagcttatccatgttcgaagaaacatatttctgatactatagaaaaagttagatatggttttactagaaaggatgatgaatatgacagaaagactttattatagcaatccttacataaaaacatgggaaactgaagtgatagagacgcgctctctttcaaatggttacgcattaacgttaaaacataccgctttttatccagaaggaggcggacagccttctgactacggtaatattgccggaatcgacgtaaaagatgtgtacgaagaaaatggagaagtatatcatatcgttgatacactccctgaacaaacgaacgtcacatgtgaaattgactggcatcgccgctttgatcatatgcagcagcatagcggacagcacttgctttcggctctattaatcgatacatatgatatttacaccgttagctttcacttaggaagcgaagcagtctctatcgatttaaatgtacctcagttatctcatgagcagttattacacattgaaaaagttgtaaatgacgctatttacagaaaccgtcacattaaaacgtacgaagtgaaaaaagaagatctacatactcttgcgcttcgcaaagtacccgacctaaaagacgaagtggtacgcattgtggaaattgacgggattgatgtttccgcctgctgcggtactcatgtgaaccaaattggagagcttggccttattaaacttacgaaaacagaaaagcagcgcggcaatacacgcctcttttttaaatgcggtatgcgtgcattagctgattatcagcagtctcaagaaatcgtagcagaacttagcaataaattcagcacaagccgtgaattagttgtagaacgcattaaaaaattggagactgaacaaaaagagctgcaaaaacaactagaagaattaaaaaatgaaaatgcagcttatttagcaagtgaattagaagcaaaaaaagaaggttcatttctatgccatcactttgaaaaccacacactaaaagatgtgcaagctttgacgaagcagcttcttcaaacacctgatacaacgcttctttttgctttttcaagtgatcaaaaagtcttgctgactcacagcggcagtgaagtaaaatgcggagagctttataaagagctgcttccactttacgatggaaaaggcggcggcggaccaaaacaagctcaagccagcttttcatcttctgaaaatatgaacgcatttattagcgcagtaaaagaaaaaataactggagcataacaaaaagcctgtctttttaaagacaggctttttccattcaatcagcttactaaatagccaattaataatccaattgataaagtaaatccaaaaaacgtatttgtttgcgcagttgctttcatcgcaataagctctccgcgtacaaatgcttgtacggcttgaattggcttaggtgcactaagaaacactaagaaaatccaagggctaatatcgaagaataccactaatgcaacggtccaaatatacgcaatgccaaacaaagtagctaaaaatccaatcgcatttttagaacctaataaaatggctagtgtacgacgtccgccttttgtatcttcttctatatcacgaatgttgttagacaaattaatcgcacctactaaaatcgcaatcggaagtgagacaaagatgctttcagacgttacggtattcgtttgaataaaaaatgaaatcaacacgaacatcgcgcccatgcaaagacctgaaaataattctccaaacggcgtatacgcaatcggaagcggtccgcccgtatacaaataaccaatcgccatacctactaatccaactaaagcaagccaccagctgctgtttgcacatatatatacacctaaaataagagcaattccataagaaatcagtgctaaatttaataccgttttcggtttcatgccgtgtctgacgatggctcctccgatacctacggagtcttctgtgtctaacccgcgtttaaaatcatagtactcgttaaataagttcgtcgcaatttgaatccacaaacatgaaaaaagcatcgcaagaaacatccaaacgttcacatggccataaaacatggctagaactgttccaattaaaaccggtacaaacgatgctgttagcgtatgaggacgggttaattgccacaaaatcttccctttactgtactgctcgactgcagctttattttctttgttatgacttgtcatcatcctcttcccttctattacgaaccgtatctctatttaaaagtgctgcttttaacataacgaatgatagcaaacttactctaatacaatacacgtccgcccaacaaaaaaatcacggaactctttaaaatataagttccactctatatcataataatttattggtctttttacaagatgaccgcttatacatttccgatttttttctacaaaaatctcctttgacgcagaaattcataggaaaaagataaaaagcctatacgaaaaataagattgagacataaagaaatgaatccaatctaaagacgagtaaatgggatgcatgagctgaacctcctgttacaccgcagttgatttccgtgcaaggcttcgctttccgcgggcggccgctgagcctcctcgtcgcttacgctcctgcggggtctcacctgttccgcttttcccgtaggagccttcgccttgccctccaatcaacagctagaaggaacgaaacacatgaaagctactttcacaatgaaaaaaagccgaacgaattggattctcaatcgaaaatcgaactcgttcggaccttcctttaactaacatacgttcgtaaaagcctctttttttatcactacatcttattaattaaaatcgtcgtctccatatcttctgcggaatcttttatgaaaacacgaatcgcatatcgcatgatcatgattccaaggaaggtctttagcacatgtactgcacgttcttttaaattttttcatatcttttcttaatacgttatggattttatcggtaagctcttctcggacacgttcccagtaaatagcttctggccttctgtccattcgatataaaaataaaagatgcaggccaatcgccttataagacagctctaatttttccagtgaaccttctatcatccgtggttcaggtaactcttctctgttaacaatcgtattcatgctggcaacccactgttttttcaaagagctttctttggctgaaaaaggcagctgcaagtagccatataaatcaacaattggcattttcgcttcaatcagggtgtctttcacttcctcataaagctcacgttcttgtgcaaggtttgatttttgtgtaccttttggatttttaaatttagcccacatgtcaaaaaacgttccgaggtcatgatgatattctttaaatcttcttagcatatctgaagtaggcgcaattgaaaatttgctgatttgctcgtctgttgaaaataacagttctctcatttgctttgcatctttagcgaatgcaacttctccaacattgtagaggcccttccttccagcacgacctgcaatctgctttaactcttgagaagtcagcaatctcctcttttgcccgtcaaacttcatgttttctaaaagcacaattcgtctaattggaagatttaaccccattccaatcgcatctgtagacacaatgacatttgtttctctattaatgaactgctcaatttgttttcttctcgtttcaggcggcatacttccataaatcacgctaactttatgaccatctttttctagcttagccgctgtctgcagaacttttttacgggagaaaacaattaaagcatctgcgggttttacttgttcaattttgaactttctaagatctacttttaaaggtatatctctttcatactcatgaatttctgaaatcacaccgtctaacatctcttctaacatacttctaatgcttaaactcccgataacatgaacttgtttggcattggctcgtgtgatcgctttataccatgaaaaccctcggtctctgtcttgaatcatttgtgcttcatcaattacggttacatcgccatgttccaattcactaaacatctctacggtaccggccatatgctgagcatcttcaacaatcttttcttcttcacctgtttttaacgaacaagggactccgtctttgttcagcttttcaaaaacttctaaagctaacaggcgaagcggcgctaagtaattacccgaagcagctttttttaatgactttaatgcggtatacgtttttcctgtgtttgtatcaccgagatgaaggatgtattccgtttcttttcttgggtccatttcgtattctgcaccaaaaatataatttaactgtcgctgttcttcttcaatcagctttttcttttcttcacgttcacgttcttgttgtaatcgtctttcttccagctgctgttgatatctctcttgatgctcttcaatcgtcaagttgtgatctgaaacttctagcacatcggaaagcttttcttctacgagcatttttttatattcatagaccaaatccgataaatcacttctaagtgcttttataatatccattcgtgttaccgaagcatttgtataagatttatattcttctttaaatgaagttggaaggtcatccataatcatagttggaatgatttcataaatcttatcggtgataaatacctcgtatacatcttcatatgtttcaaacaagataatcgttgaatatctgtctaattctgagcttacgccgccggtgagctcttgaaaaaagtcattaactgtttcataatcatgacgtgttaaatcaccgtttgttattaattcatcttcaagttcagtatgcggcgcatagttttcaatatactttgagtttgttttaatgtcttttgacagctgatgtgaaagctgttctcttatatgtagatagtacagctctttgtttacttccaaaataggagctgcttctaagtttaactgtaattgatatctggcttttcgatcattaatactttgctgtctttctttctcttttctttcttcttctttttcggcgaattcagctcttgcttctccgtatagtgatagccactctgctttatcgccctttccgtattgctcttctagccaagaaaaagaatcaaactctataccttttctcgtttctttagcaaataacttatctatagcttgaggtttataccctttcacctcaaagcctttctctgttaaatatgaccttctgctttttttagatacagaagaaacaactgcttttctccacgtagtcccccaggcctttttaataaaagagtgcctgtctgttaaataagtctcaaaatctggacattcgtcttgttcacctattacgctttttatatcctgtagtaatgtatgtttagttttttcaatggccctgctttgaatagcctctaattcgagcataaaattctcctttggaaagttttcctacatttattataggaaagacccctgacagaatcaaatacatgttattactttatttttagctagatcaagaacctctcttcttcctgcttttgcttatttcttagctatttttaacacaaaaagcccctctaaataggagctttttggttatttttgataattcagtctattttaaatatatatcaagcatttttgtcgattccctttgagtaagggattgaaagctgtgaaagtttggttaacaatacatgtaaaacacctgtaaataaaaaagctaagatcgttgcgcctgtggctagcgggtgaacgtaggtaaaatagtaggcaaatacagcccccactatgtaagatacatacacatgaaggttaaagccttttgtataccagtacagtttattttgtttttctaaaatagctgaaacgtcatagtgttttcggcgaatgatataataatcaacaagaacaatcgcaataatgggaataaataatacgccgatcataagcaaaaagctttgaaaatttgtcatcaaccactcttttaataaagaacctaggactgtgacaactcccatggttagtgccggtatccagaacctctgctttggaaaaatagataaataagacatcgtcgcgctatacaataccattacgttggttgacagcaccgataaaaaaattacgatggcagctactaaccctaacagcggactatatgcaccaattaaatttaccgggtcatacgtttgcgtcatatttccgagaattgaaaaaccagaaaccgttgcgcctaaccccatcgcaattaaagttgcgacgttatatcctaaataagttcccgcaatgcccgttttttcagatttacagtttcggttataatcgcaaacaatgggaatccacgtaaaagctgtagctactacaatatcaaaagctaacattcctgtaataccaggattttcgcttgctttcatttgaattaattttgctgcatcaaattcgataaacaaatagctaaacacaacggttgctaaaatgaccataagcgtagctactaatttttccgttgcttcaatgcctttatgtccgtatatagaaatagctactaccaacacttgagtaagaattgtaaatagattgatattgctgtaaccggtcaaaaaagtaatggcatgatttaaacttagccctgccatgtaggcttgaatccacgcccagccgatcagtgtaataagattaacagcagcaggaagcatagctcctctttgtccaaaagctggtctcatcaaaaccatggttggaagaccggttcgagttccgatatctcccatcaacacgagcggtatggcaccaactaaagagccaagcacaataataaataatgcctttaaaaatgtcatatcgggtacaaacagcattccggtaaaaacggtcgttaccaccacattggctcctatccacatggaaaatgtagagaagaagcccatacttcttttattcattgcaatcggctgcacatcatcatgggcgagaccactttttgttgtcattcctattccacctttcacttttattgataccaattggctcgagctagcttggaatttgtattcacatgttttgtttcagtaaaagcagctaatcctgatggacctaactcccggccaatgccgctttctttaaaaccgccccacgccgtttcaatatgaggcgtatggtagccgttgatccaaatcgttcccgcttgaagatgttcagcaactcgctctgctttcattaaatcattcgttaaaactcctgcagctaaaccaaatctcgtgccgttggcaagtgctatggcttcttcttcacttgaaaaagattgaacggtaataacgggaccaaatatttcttcttgtacgactttcatatgctgctccacatcgacgagcacagccggctttatatagtttccaccttcgcagtcaattaacgttcctcctgttaataaattcgcgccttcttcttgacctaacttgataaaatcccgtattttgttcagatgctccttgctaataaccggacccatctccgtttcttctcttaagggatgaccaatttttatagcagcaacagcctccgtaagagcagaaagaaacggcttataaatagattcatgtacgagtatacgcgatgaagctacacacacttgtccttggttaaaaaatgagccaaacattgtccagtctactgcaatatcaattttactgtcttcaaaaataagaagcggagatttccctcccagttcaagcgaaactcttttcatctcttttgcgcactgctgataaatacgtttgcctgtttctaatcctcctgtaaaagagactttggctacgtctttgtgttcaaccagtgcacttcccacttcaccgtctcctgtaagtaaattaaacacgccttctggtataccagctttttcacataatgaagctaactttaaaaaagaaagtggcgttaattctgacggcttaaacactaccgtatttccagctgctaaggcaggagccagcttccacataccaagcagcaaagggaaattccaaggaacgattagcgcgcatacgccgataggttcttgaatgattttactgtttgtatcgtcgaacatgtcttttgtccacggctgattttcttctattaaatttgcgtaatatcttaaacaattaatcgtatcttcaatatctaactgcgcttcttttatcggtttgccagtatttaatgtttctgtttcagcgaatatactcgcttcattttctaataaatttgctagtttcttaagcacctctacacgcagtgatttatttttcttccattcactctcctcaaaagcctgctttgctttacctaccgcttcctctacttgttgaagcgacgaatcaaatactttcgctatgatcttattggttgctgggttgagtatttctcttttacatggttttgctcgttttttatctactgttacatttacttgctcgttcatagtccaacactccccatagagaactcttatataaaagtgggaagataatagtaccttcccacttttacggtcttgcttatattcagtcgcgtgctttcactaacagcgcttcttcttcttttgctttttttcttaatgcaataagcgtgataaattcatagacaatgttagcagccgctgctgctgtaatttggccatggtcataagctggcagtacttctactaaatcaaaaccgacaaaatcaatatttgttaagcctcgaacgaattgaagcgcatcgtcaatacttgcacccgatacttcaggcgttcctgttcccggtgcgtaaaccggatctaaaaagtcaatgtcaaacgataaaaatacaggtccttctcctacacgctcatgaataatttctagcattctttcaacgcccagttttttatattcatttgtcgtatacagagctagacctaagttctttgcatcttctaaatcttcaatgccgtatagaccgcctcgcataccaatttgaatggagcgcgacacgtcaattagcccttcttcaattgctcgtctaaataccgtaccgtgattgtatttttgttcaaaatagctatcccacgtatcagaatgagcatcaaactgtaaaagcgctacgggtccgtgctttttcacgatggcacgaagttcaccaagcgtcattgaatgatcaccgcctagtgaaataggaataattccttcattcacaaccggcgttaacccttcttcaatttttttatatgtttctaaaatatatcccggaacaactgacaaatcgccgtagtccacgcctgaaatgtaatcaaaaatattaatcttttgttctgggttatacggacgaagcaaaatggagaaatctcgaatagcttccggtccaaaacgtgctcctgtgcgaaaagactgccctgaatcaaatggaatacccgtgacaataaaatccatatctgcatttacttgttctacatacggaagtctcataaacgttcgaggcccgcaaaaacgcggagattcaaatgaatttttcggctgatattttggcatgatttattcctcctagtgggtttcattcattagcgccgtgtcaacatgttagatactgacgctttttatttagatactttttattaatgcaaaatgcatgccaaattttatcaccctttttcgtgtaattatggacgatttttaattcataatagaatcaaaacaaaaaaaacgattcaaaattgaatcagttaattcattttgaattaaattttccttatttaatattgtactttcgtaaacgtcttacaaccgtaggctgactaattcctagtgcatttgccatttcatacgttgtttgacactgacgataagcgcgaatcagccagtttttctccacttctgcaagtgcttgctgaagcgtcattccctgagaggttaacgtatcaagagtctcccattcttctttttctcttctgatattttctgagtaaaacgggaggtcttgaggcaagatgctgttttcatctgttgttaacacgaggcgttcaattgtattttcaagctcgcgcacatttccgggccacggatattcaaccaattgatttaatgcttctgcatgaaaaaatttcttcattttatatttttcattttgtttatgtaacacgtgataaagcagtgccgcgatgtcttcttttcgctcgcgaagcggaggaattgtaatcggaataacgtgtagccgataaaataaatcttcgcgaaaggttccttttttaaccatttcctcaagcggctgatttgttgctacaatcagcctgaagtttacgtgcttggctcgttcacttccaattttggtgactgttttttcttgcagcacttttaacagcttcacttgcatatcaagaggcagctctcctatttcatctaaaaaaagcgtgccgttatgagctaattcaaactttcctatttttccttttgtacttgcacctgtaaaagagcctgcttcgtatccaaacatttcagattcaaacaaactagctggaatggctccgcagttgatttcaataaacggctcttcttttcgttcacttccatagtgtaaagcacgagcaaaagccgttttaccaacacccgattcacctagcaacacaaccgttgcatcgctgtctgccacgcgattaataatcgaccatacttttttcatcgattcacttcgtatgaccatatcatttgactgctgttcccgaagctcttccacttctagctgatatgttttcattttcacttcaagctgctgataatcttcttttaagcgctgaagctctgttaaatcatgtgaaaagctgattactcttttcatacactgatattcatcatacacgggaataccggttgccattacaactttacccgtttctgttttttgcatcagctgtacttctttctttttctttaatacttcaatcgtaacggaaggtgaaaatatcccgcgttcttgcaattcgtatacggtttgtcccactaactctgacacgtcatacccgtatatatcacggcagttttgactcgctcgtaaaatacaccctttttcatcagtgatgacgatattgtcgttagaagcatgcaaaatagcttcaagctctcgttcaatcatctcagtgcagtactccttttcattcaatttgacttttcaaatatttctttcttctattttatcaataaactcccttattcaacacaaaaagctcctttaataggagctttttgtttaagatagctgcttcattttttgtttaaataacgctactttaatcataaaataagtaatgttttcaggtaattcttctttgattggctttaacttttcatcgcctactgacgaagcagcttgcaaaataagctgttcgccttcatccgaaagaaaagatgaccagtcaatttctttttcttcttcagcgcatttaaacaagtgattttcaatggtaatgcggcttaattcacgttcttcagcaatttcatctaacgattttccttgctgaaatagctcatacgttattaaatgagacccttcttttgatgacgctcttgcttttttcggagcaggcgcagatacttctcgctttcgatctggattttcttcacaaaactgtttgatttcagctgtgaatcgttctccgtatcgctcttgtttttgctctccgactccttttacagtggcgaactgttcaagcgttaccggaagttttgcacccatatcatgaagagtatcgtctgaaaaaataacaaaaggaggtacgccggcttcgtctgccagctgctttcgaacggaacgcaaatgagcaaacagctcgtcatcttggacaatttgcttcacttccatttgttcttttctcatcactttttccgtcccaagaagcacgccttttcctttggccgctacggataaggtaggaaatgacccttgtcctactaaaataaactgctcggaaatcaaatactcaataaaatcgctcacttctttagccgatcggtcgctcatgacgccgtacgtttttagtttgtcaaaaccaaaatcaactacttttttatttcgtgaacccgttaatacttgagcaatcatcattttaccgaagcgttcgcccatacgaatcatacaagataatactttttgcgtatcgaccgttacgtctatttccacacgatcatccgtacagttgctgcagcggccgcactcatgcgcttcactttctccaaaataatgaagaatatacgcttgcaagcagccttctgtatgacagtagttcaccatactttgcaacttttcaagatcttgaagctgctttttaggattcgacgttgactgttcaatcaaaaagcgctgcacgcgaatatcctgaggtgaataaagcacgatacactcacttggcagcccgtcacgaccggcacgtcctgcttcttgataatagctttccatatttttcggaagctgatagtgaagaacaaagcgaatattggatttatcgatccccattccaaaggcagaggtagccaccatcacctgcacatcatcttgcagaaagcggttttgctcttcatcacggctgttcgcattcataccagcatgatattttgatacgttaactcctgacttttgcaatctagcatgaagctcttcaacatctttacgcgtagcggcatagatgattcctgcttcttggtcatttttacgaatatactgctcgatatagctgattcgatcctggccttttaccacagcgaacgataaattttcacgttcaaacccagtcatcaccgtgtactcttcgttaatatgaagagctcggcaaatatcttcacgcacttgaggcgtcgcagtagccgtcagccccatcacaatcggagcgttagacagcttgccgatcagttcattgatgcgcaaataactcggtctgaaatcatggccccactgtgaaatacagtgcgcttcatctaccgccacaagcggaataggaagcatttgaagctgttccaaaaattgtggagactccaggcgttccggcgctacataaagtaacttatactccccaagcgacacttcttctaagcgctgctgtacttccgtatgtgtcagcgagctgttaatatatgtggctggaataccagctgcgttcagcgtgtccacttggtctttcatcaaggaaatcaacggagaaataaccagggttgttccttctaaaagcaacgaaggaatttgataacaaagcgatttccctccccctgttggcataatacaagcggtattgtgcccttctaaaacataacgaatcgactcttcctgtccttttcgaaacgaatcatagccaaaataggactgtaaatgtgttaaagcttgttcaaaatacaaaatagcgtcctcctttaaaataagtagaaatagtagttgagggatccattggaaggatttgagacgtagggttttattttatcaaacattaagggatgttgcacagaattcgttgatttaaggatataacaaaaatgataagcgaaaagccctcaatttataactctctttcctatcacaaacagtctttttatgtatgtcaggactcctttcctaaaaatctttccccattccattcttttttcctgtatacttaagaataggaaagaggtgcttaccacgagacatcctgtagaaacgatttattatttagaaaatccacagcgtaatatttcaacatatgcttccacaactcagttaacggttgagtctgttgtgaaagatgtgtttggtgttgcttgcgtagcagatattaaaattatgcttcaatataataaagaattccgcaaaagtattagtcaattacacaatgcaatggacgatgatcttacgttagaaatggtttttcgagttgcttcaaaagaagatttgcttcgatttaaaaaaagtttacttgaaagtagtttagatgacgcagaaacgtcaatagactgtccattcagcgcaaccattcaattacaagatggtcgatatacatggaacgagtctacttctgtttatgaaaaacaaaaagaacgtctttcatcttaaatttctctatttttatgtatgcaaaaagcctagatcttagctgtttaagatctaggctttttgcagtttgtactgtaccttaaaagatcaaaaaaaaaaccgatgcaggaaaaaggatggctaaagcttcttcccgcttattcttcaccagtttctccttaaaaataacagcgctgcttccccttcttctatgttaggctttttaactcaatttcatgaaataggttttatcacttccaataacgtgtatacacaaaacaaggagataagttgattaaacttctcttcattactcaacgtattcaaaaaagttgtctatcatacaaggaggttttttgaaatggtaaatgtaaaagtagttgaaaatggcgtacaggcaaaagatacaattgaacaatttttgcgtgaaggatttacaaaagacgaagtttatttacttgcacaccatcaagatcgctccgaggatttaacagctgcaacaaatacaaacaatataggtctttctgaacaaggagtttttgatgcgattgcgaatgtatttcgttctcgaggagacgagcttcgtgccaaaatgcgttcattaggattatcacagccggaagctgaacgctatgaagaagaattagatcacggtaaagtaatcgtcgttgcatcaaaagttgcttaatctaaaagccctacagcagggcttttttatttttgtcttactcccttactaccctttcattaaagaagtcattcatacatatgattatgaagataagagttactgcgaggagtgatatatttgattataggaattgaatacacaaaacgtgtaaaagatggattagtcgttaaaaatattccttacaagatacacgatagaccttgtgatgaaggctgctgtaaaaatgataaaacgataggcccaagagatagattgagggttaattggctgttaaatgtttttatgcctagcaaaaatataacggtatttgattataaatattggtcagaagaactaacttcgttatggagagagcaccgaagaaaaactatataatacatctgataacaaaatctccttaagaaataaggagattttgttatttactttatctccgcaccaatctatttaccaagcatttcaacgattttatacctttagatgggggtaccatcaccattataaattgctgcgtgagatgctttttcttccactcatcataatcaattttatatgtaacatttcttagctgtgtttatccttttctgctgaaggtaataatgaagatgcataaactatataaagggtgaaaagttatgattaacgtcattgagacactacttgattatataaagaactcttctacagatgattcgccccctcgcccacatatcggtgagactatgggatgctggctgtattttactgttttagcggaagagatacctgccttagagacctgccttaatacaacaaccaacagtgaactacttaagcttactcaagactcaaaaaccctggctgaatcctaaattgatacactaaaaaaattaatgattaaagaaggaattccacttcctgaaataccggctaccaagccgaaatccgaccctaacagtattccattaggagcaaaagccacggattctgaaatcgctaacttaatatctgtaaaaatcgcctctaatatcgtcatgtgcagcacgaatatgggacagtctatcagaaccgatattggattaatgtggctaaaattccatactgaaaaagtcatattgggatcaaaagtgaaaattctaatgcagcaaaaaggatggcttaaaattcctccttattattatccacctggagcccctcataactaattgaggtgttctaaggtaagaaacctagataaccttacatctaacacatttaacgaggtgcttgaccatggatttccctacaattcatacaaatttttgggacgcggttattggtgttcctgtcgtattaatcgttacgcagctggtaaaattgctttttcatcctaaaaagcaatatgtgccgactattgctttagctgtcggcgtgctcttttcagtatttattagtcatccccatcatattattgccggattgtttatgggctacttttatggatacgcggctattggcagctatgccggtcttaaaacaacatggagaacgattagaaaagatacgtctccttattcgtcagactaaaaaaccagcgcaatattcgctggtttttagttttcactacttatttcttctgctcctagctctttggctaagtgaacaaccgattgattaattttccatacgtaataaatgttatgcagcagctgcagatgctgtaagtttcttgattgaacggacgtatcaaaataatctaaagattgttcaatcttttgtcttacatcttcaagtgtgtatacatacgtccctcgctctcctcgtaaagctttttcaagctgagtaaagttgcttgccactttctcttccacttcctttattacgccatgaaattccacttctttataaaaagcctcgtttctagtagaagatgctaccaaatgcttggcgtaataattaatggcggtaaaaacggtcaaaaattgctgaagacgtgaacggccaacgaaacctttgataataggatctgagtcgacctgaagctgttttagctttttttctaattccattcctttatcagctaaattggcaaacaaatactgattcgtaaaacgatacaaataagtgtgaacaaattcttttaaggccgctacgtattctactgaagtgtcggttattttatctcttgttcgtttaggaaacacaagagcagatacggctaagccaattccaactcctacgactgtatctaacacgcgagctagcaataagctctctgaaattccgccaagaagcatgtcatacataaaggctagcatcatcgtaatccaaaagctcataaacgaatacgtaataggaaagaaataaaaagccatgaacacacagataaaaagcagcgttacttctagtattccgggggaaacatagcttgcgacaacaaagccaaccgctgctcctaaaagcgttcctacacttctctggactgcttttacaaacgtactccctattgtttctgtgccaagaagcactaaatagcctgctaacagcgcccaatattgatgcgatggagataaaaaagagccaaatattaatgtcgcaactgcagtgatgaccgcttgaatagactttttcgtagatggttttaatcctttttcttcatcattgtccacttcgtcttctttttcttccgcttctttttggggctgtttttcttgtttcacaattgcttgctgcagctcataggcttcatcaatcacgtgatttgatatcgtttcgatacggcggattaagtaaagccaatctttataccttttatcctgaggttcgagttcacttaatttttggcgcagctcttgcagatgctgagctgcatccgttaaggaatgagtaggattttcatttaatacttctgcttcgcgaatcgattccactagctttaacagtagctgctgaatatcaaaatgattaaatgcttttaattcactgagctttcgaatcgccggggaatatgtctgaagcagcataactgtatcaaatacataaaggcgcatctgttcagctgttacgccaggccatatgtcgtggggatctgtatttccaagctcttctgatgctacacgggcatactccgctagttttttaatattgcggttatattgtttgatttgagccggttcaatttgtttcttttgaattaactcaataattaaatcaagcaccaaattcacttgaatatgaaatgacttcattgaagacctcagcacgttggcaggtcggtctttaaagatgacaaaattatagataaatgcacagcaggctcctactacaactccagctaacagccacggcagctgagaaaacgtaacgtgtaaaatagaagcaaaataaaaagacataaatgctaccatcgataaagagaaatagcgaataccaaatttttgtaaataaaaagacataaacgccaacagaacgagaaaaatattttctgcttgtccatatcgtgatagaaacgagccaatgccgagagaaacggcgctagaaagtgctactaagcctgtggtaactttttttgctttcgttgtttcatcatttacaactaatatacccatcaggccaattacacctgctaaaatagcagcggtaatttgtgagcttcccgctgcttttaatacgataagcataataacgaccgctgtaatgacgctgatcgtagctttagaagccgttttgagcctttttcgtccaggatctgcagcgactaagcgactaaaccaatatgaaaaaataaacaccctctcctttcgtgctgtagagttctttgtagaaagagtaatattattacttatacccttttttattcttttctatcgtatgtaagcacgtttttccactataacattgcgaatggctaaagagctaaacaaatgcttaaaaacacatctgctttctgtcagatgtgtttttaaataaataatcagctattacaatgtaagagaagaaatttcccacccttttgttaacgaatttctttttaaagtaaaaaccatcgttgtcttttgagcccctttatcttcgtaataaataaggcaatctacggcgattttctcttttgttttatacttttttgcatgaaataagtccgttttataataaatagtcgagatcctatgcaattttgcccatagcttatgctcttgtttcacgcgcaaaaccggctgcattaaagcatcgtcatcttgctttaaccctgttaaaaacatatttacgacttctgccggctcagcttttaatgcatattcatcaagttttcctcctgcttttaataccattaactgatgacctggatccacattttgagacttgtgagtcgtacttcctgcaaaatgaatgcaaaaatgaccggggaacccattttcaagcgcaccggctccgtgaggcattccgttcatggaagctgcaagcatttggcctttaaacggaatgagaacagctcttcggttccagctccatttcccattatataagtgcttcattactttcgtatcttgacgtgtaagcggctgaacatctgcatggtgtgagcctgctcttcgctgcacgtaaaagtaaaaaccggtttctacatcgataactttaaattttttccccttcggcagtaaactttctacacgtttccactttaatacttttcctgtgtcacttactggaaagtacgtaaggttttcttctgctttcatcttttggggatgcacaaaaaaactaataagcataaagactaaaatcattaattttgtcattgtctaccctcattaccttgtagtttctctatgtaatatgcgaaagtacacatacaattataaatagaaatttttacacgctcgatttatggaaaataatacaaaaaagagcttgtgaatcctatacattaaacggttcattttattcatactaacaggtgaaagcgaggtatatgatatgaatttcacttggatggttggacttttaatgctcattcaacctctttctacacaagaccacttatctattactcatgacggtaaaccaattgaacggattgaacgggacaaagtggccgtgcctcttcttcctgtacctatggttgatcatgatcaatacaatcttcttctaaaagaattggataaaaaaacatatagagagcccataaatgcccgcattgacaaaagcggacaaattgtccctgagcaagtgggtgtcaaactatatcataaagattttgcggagaaattttatacttatttttttaacggcggtacgtcaacattagaaatcccgacgcttcctgttccgcctcgcgtggataaggagctgcttgcaacgattcgaattaagcaaatcggtcattatcatacggtatttaaccctcataataaaaatcgttctcacaatatttctcttgcggctgaatcgctagacagcagcgtcatatttcctggggaagttttctcttttaatcaaaccgttggaaaaagaacggcagcaaaagggtatatgcgtgcgccaattattgtaaaaggagagtattctgaaggagttggaggaggaatttgccaagtttcttctaccttatttaacgccgtcgataacgctggcgtaacgattacgcagcgttactcacacagtcgcagtgtttcctacgtacctcctgggcgagacgctaccgtcagctggtatggacctgactttcattttaaaaatacgtatagtgatcctttgctgattcgagcgcaggtacacggaggagtcgtaagcgtggccgtttactctactgatgcgattgaatataagcctcggcgcgtgccttgggcttctattgatcaattgccgaaagggaaaaaaattgaatcgcatgttgatactgagcctgccgattaatcatctcttccagctttttataatgaacataaaaaagcctaaagggtatcctttaggcttttcagtgatataattagcagccgtagccgccaccgtaaccaccgctataacaactacatccgataattactaatagaataaataatacaactaataaagcgaaaccagaaccgaatccacatccagcattagacatacaagcactccctttcaacgtaattttctgttgctaaaacaaagaaggttcaaacatggggtgtttctcatggataggttattgtatgtctgcctagacgttttggtttgctgttctgctcatttttttaaaattgggcttgttttcgtctttacaactcggaaaatgtaattctgtaaaagtaaagctcatttccactcttcctttaaaatcgcgtaataatattcatcccaccatcctttttcagttggaatacattttttaaaatacccttctcttctcatcccgatcttctccataacacgataagaaaacgtactctcaggttgacaagtagcaataatccgatgcagtttcattgggttaaaaccatagtccactattgcttttgccgcttctgaagcatatcctttctgatgatagagagaattaaatacccagccaatttcataagtatggtacccaaaatagttaaaaaagacgatatgaccaattagaattttttcgtcttttaatacaactggaaaatccctaacatttcctttcatattttcatttacaaatttcttcgcatcatccttactaaaaagaccttctggtatgtacttcatgacattagcatcagatgtatattcgtagacatcttgccaatcttcatatttaaatttgcgtattagtaatctgttagtcttaatgtccatgtggttctcccctatctctaagctatctttctatacgcttgtttcgatagtgaagatataaaaacctctttgccctaagttactattgcttttgttgccgcttctttaaaacaagataaagtgactctgcgaaaaagaaaaacaaaagagaaaaaaggacaaataattcggccacttccattacacgaaacgggcttaaagcattgtatagtgcctgcagtaccttcgttccttgaaaaagatcaattcctacagaaagagcgatcacagatccaaatagcagcaggctaactccaataattttcatcattttccctcctcacctaatcattacttacctcatagggtcgtcattttcatttaccgtcatgcaaaagatattttgttaaaaattacataattatacggtttttgttcaaattaataaaaactatagtaagggtgttttcatttatgccttcgttctttaaaaatcaaaaatctaaaaataaccttccacctcaggcagatcaaacaagcagcgaacaaacagcttcttctcttaagaatctgctgtctgagaaccttaccctcattaaagagaaaactggaaacagctcagatattgtgattcgtcattttaaaataggcgtcaataacagcttggctgctgctatcgtctacatagaagggattgtagataaccaatccattcaagattacttactgcagtctcttatgaaagataatcaaaaaaacgaactaaacgatcaaaatgcattggagttaatttccgaagacatcgtaacaatcggcaacgtatcgtttgcagacaactggaatgatttactttcttctttaatgtcaggagacagccttcttattgtcgacggcataagccgcgtactcagcataagtacacaagggggtgaaaagcgttccatttcagaatctactacccaaatggtagtgcggggaccaaaaggtgcctttactgagtcaattggcacaaacttagccatggtgcgccgaattattaaaacacctgacttatggctagagtctatgaagattgtccgggtaactaaaacggatgtcactcttatgtatattcatggcatcgcaaacgataaagttgtaaaagaagttcgaaagcgattaaaaaacattgatattgatagtattttggaatcaggttatgttgagcagctaattgaagatcaaacgctcactccatttccaactatttataatacagaaagacccgatgtggtggcgggtaaccttttggaaggaagaattgctatttttgtggatggaactccttttgtacttattgctccagcgttgttcattcaatttttccaatcggctgaagattactacgcacgctttgatattgcgacgtccattcgtcttttgcgggtgtttatgtttatgatttcacttatcgctcctgctacgtatgtggcggttacgacatttcattaagagatggtacccaccacgcttattgtagctcttgcggcacagcgagaatccgttccattttccgcgttcgtggaagctttttttatggaagtcacatttgaaattttgcgtgaagcagggattcgattaccaaaagctatcggctcggctgtatcgattgtgggagctcttgttattgggcaagcagcggttcaagcaggtattgtctcaccaggtatggttattatcgtatcgattacagccattgctagctttgccacaccatctttcgatatggctatttcagcgcgtttaattcgttttttatttatactaggagcggctacattcggtttctatggtattatccttattctgctaatgggggttggacacctgtgcagcttacgttcatttgatgttccttacatgacgccattagccccctttattcctgcaagcaatgaagatacattactgcggttaccttggtggacgatgagaagaagacctaaattaattagtgataacaaagttcgtcaaagcaaacatcaaaagcctgagcctccttcttcacgaggcatgattaattaggaagttgaagaaggtgatcaaaatgaaacgtaaaagtttatttttactgttaatgaccataatgatggtattgcttacgagctgctggagtaaaaaagagttaacggatcttgcatttgtatcagcaatgggtattgataaaacgaaagaggggcggtatgagctcacctttcaaattattaatcctggaaacgtagctggcttacaaggaggcggcggtacccaaagtccgcctgttactatctattctgcttctggcgataatttagttgaagcaagcagacgcgcttcagctagaatttctcgaagactttattttgcccatacaaacttagtcgtgattggcgaaaaactagcacgtgaagaaggaattaatatccttattgattctattgatcgcgaccctgagtttcgaattacgacttccttagtcatcgcaaaccagtcaagcgctgctgatttggtaaaaacactaacgcctgccgataaaattccagctaacaaaattatgaaaacgctggagttcactcaaagaaaatggggagaaaacttaaaggtttcctttcaagaagtgatgagatctcttggatctcctggaggggaggcactagtttcaggttttcgtttagttggaaaccctcaacaagcagaaaaattagataatctccagcaaagcgcaccagaagctacccttcgtgcttctggcattgctgtttttaaaaatggaaagttaatcgactggttttacaatagtccagccagaggcagcgtttggatccttgataaaatacaaggaaccgatattaatgtagattggaaaggaaaaaaagaagcgcttgcctatcaaacagttcgtcaaaaagcgcaggtatctgtaaaagtgataaaaggaaaaccttatgcgtccgttcatactcgcgtagaaggcgatcttggagaagtggaggtccctgttaatacacgtcaacctgctgtaatcaaaaaaatggaaaaagctgcaggtaaagaaataaaaaaagaattacaaacagctattaaacaagctcagacagacaaagttgacatttttgggttttgagaagcgctggaacgcaagcgccccaatcagtgggaaaaactcaaatcagaatgggatgacgtttactttccaaaattagatgtagacgttacggtagaagcttatattcgccgaacaggtctgcgcaataaatcatttctttctagcgtaaaagaaaaacaacactaagataaggaggtactgggtatatggaaaaagcaaaaattagcgccactcaattatttattctcatggttttatttgaactgggaagcgctctattagtccctcttgcaatgggagcgaaacaagatgcgtggctagctattttaattggaatgctgtgcagctttcttttctttttagtctatcataagctctattcctactatccggacctcctgcctacagagtatatgcagaaaattttagggaaggtattgggaacccttcttgcatttgtatacattgtctattttttatacgatgcatcacgagttctaagagatttcggagagatacttcttacttttgcttaccccgatacccctttatttattgccaatgcgttattaatgctggccattatctatattacccgaaaaagaattgaagccatagcgagatcaggagagcttctgtttatttttatgtactttctggctgttgcaggcttcattcatacctgtactgcttctgattatcgtatttttaaggaataggaagaagcagcacggatagttgtatctctaataaatagaaaaaatagcgttaaaatgatcgaggtgatgttcgtgtatatatggttttatgatcattttgttaataccatcttatttccgcttacttgtatcatgctagtgtgcgtatcattaggactgtatgcatactttaagctaaaaaaaatgaaaaattgatactagatggctatttccctcattcaaaacaagaaagatacaacaagataaaaagcaactgttattcccgctgcaattaaagctggctttaatttatacttggcatattcaataacagataaatctaatattttggcgatggtattcgtatcgtcgcttaaaggtgaagaaaatgctccaaatgaaccgcttgcaaatactgcaccgataatcaacggcaaagaaagatctgcagaacttgcaagcgatacgccaagcggcattaaaatcccccacgtcccccaagcagatccgataaaataagaaatagcagctccaaagataaacatgaacggggtgatgaacatatgaggaatccacttggaatgtgcggtcacaaagttggaaaaccccaagtcttctgtaacagcagataatccccatactaccgataacaacagaataacggacattaagtcattgcctcctgtgataaaaccattaagcaaattctgtaaggtaaagcgctgaaataagaaaaaaataagggtaattaatatagttataattaaagctactaccatcgcttctagcacgtctgctttaataaatgcttcaaaaaaagtgtgactcttatgatgtccactccaccatgttaaaaataaagtgagcgaaatcacaacaagtaaaggcactaacagattccaaggcttagaaggcaaatccttcgatacgcaaggatgacaatcatgccaatctttttcgtcttcttcctcaagcttcataggagccgtagatgttgaatgatgaaaaaagctgaaataaatccctactaaaataatcacaattgaaaagaaattataaggaatgctttgaatgaataaagaataagcgtcttgctttatgccttgatgatcaatcgccatttgaatgattgataccatatatccgacaaatgcggttgccacgggaattaagacgataacaggagtagcagttgtttcaataacaaaccctagctctgctgtcgtcattttcacttttttcagcagcgctctcatgatgggcgcgatcgtaacaaaacgaaatgtcggagcactgaatgtcccaatggttgaaacataggttaaaataagggctttttttcttgtatcaattctttcagcagctttttccacaaaacctttaactcctccagccatcttaatcattccgataagccctgaaaacgcgtataaaaagacgacgatttctatattacttttatttctaagagcttgtacaacgtagtgaagtaatttttcaacacctccgataatcgaatgatcaatcaaataagcgcctatcaataagcctaaaaacaaccctggcagcacttgtttggtgaaaatagctattggaataacaattaaaaacggtataattgaaaaccaaccagattccataggactctcccctatcttaaaaaccatattagatgtcttcacgtatcgttcattagcttttaatgtaaccccaatattatgtgtatattcacgaaaacaacacgtataagcagtactgcttggataagatatttctgattaaaaacagcataataaaactctttatttctacaacaaaaaaagcagtttgcacatgcaaactgcttttgaaaagaagcggaagacgaggttcgaactcgcgacccccaccttggcaaggtggtgttctaccactgaactacttccgcgcgtatatgaaagtaaagatgcgggtgaagggacttgaacccccacgtcataagacactagatcctaagtctagcgcgtctgccaattccgccacacccgcgtgtgaattaaaagataactccaaaatggcaggggcagtaggaatcgaacccacactgacggttttggagaccgtagttctacctttaaactatgcccctagaaatgatttcttcaaaagaacctcgtttattaacgacgctatatcataataaaacatatatggaatttcgtcaataggtcttttgatgaatcataactagtactagcggtttcaaaaaaactgtgaggcatatcacagctttttacacattcccttcaccagctgcagtcctctttaatctccgctatttgtttttagagactctgctgtaacaacgtactatacaaaatgtctccaaaatcgtgtaaagaccgaaagaatatgtagcagtgcagattttataggaggcacgtttttttgagaatccgtattaaaatccacaggttctccctcatttcccacaagcgtactgtaagaaattttagtttcaatagctcctgttaactcggctgcaaattcttcactatctatcataaccatggattcagtatttaaaaatgcagaacgtgaatctaagttaaaagaaccaactgcacttaaacgctgatcataaacaacagatttcccgtgaattgaatagggcttttgatattcataaagctttgaaccagcttttatgacgcgattcttcactcccaagtatgcagaaaaagccatagcatttggagtggatgtaatagaattagttaaaataattctttgcacttttggttttacttgcttatctatatactgttccatctcttttgttggtacgatataaggactttgaacaacaatggatttttcagcttgttgcgaaagcttaataaatgttttccatataaaaggacttttattaattctttgaataggatttgtaataaaagaaacttttcttgtaggcatcgttgattctctccatacaatataaggatggacaaaaggttcgtttgcttttttggcctcttcgtattgatctatcaacaatttttttcctgaaagaccacgaaattgtttagttttcttgagctttggaaaagcttggcgtgtatacggatgattccataatttctctatatacttttccattgagagaatgacactatgactttcttgctttgtgttataaatcagcacatcacggtcatagacaaaatttttatctggttgactggccaagtatttatctccaatgtttcgtcctccactaatacctaattggccatcgactactattattttatcgtgaagacgattatgccatgtccaaggtttaaaaatagtaaagggctcatagtactttaattcaatattattgtggaaagctagagcataaagaacattttttctcttaccttttaacccatgagagatcccatctaacagcacgcgaatacgtatacctcgatccgcagcttcgaataaagcgcccataagtaaatccgaagaacgacctttaccgatggaaaaatacgcaatatcgattgtatgcctcgcttcttgaatcatctgcatccgaacaagccctgaaaaataaccattttccaaaagcataactcggtctgtggattctttcttcccgtaaaaattctcagtattcattacttttaagtcttttcccttatgcaaagggacataaaacagtaccactgcagttacgaatacatatatgaagtacaatacgacaatcattattagtatgtttattagcatgtttcctgtcacaatccctttccattcttatcgttctgtttttattaggattcttacttttttaacttctataccttttaaaataagaatggaatgatggattatttgttacatcactgttgatttccgtgcaagtcttcgtcttgccctcaaaacaacagctagaagcaattatatacatgaaacctacgttcacactaccaataaaaaaagcagaagttcattatcttctgcttttacaatttatactctctattgtgaacctgctctaagtaaaacagcggctcttttattgattaaggtcgttttccatatcttttatatcttgctgaaactctgttaaacgctgacgctgtgtttcagaagcattttcaagcgcattttcaatttgctgagaagcttcattcacttcacctatcgcttgcttcgcttcatggccgtacgatgcatcatttttagcttcatttgcctgttcatatgcatctactgcccctttatgcccctgctgtgctgcttgaaacgattgttgtttatctttattgtatgggtattttttcatcatagtgctcctttccatttgttcactctttagtgtggcatttttctacttattcatacgacgcttcaataggttaaagctaattgaatattccccataacaaatccttcaatcatttaagagccctagaaaatatcttctatctcctgaaataatttctatattttacaaaaatatacaattactttctttggcggacatcatacgaatagcttatctgaacgaaaaaatgtattggggttgactgcatgcacttgtttctttccttcttgatcatttgtgcagggattatatggatggaaataaaaagattacctcaacactctcataaaagaacagaacatttttattgtgttcatgacaatcagtatcataatcgctcttgcaaaaatctttcggctgcctctaccgaatccttctgattgggtagaagtaatgtttcagcctttaagtcacttattattccgttggatcacttaattagtgtatatggcaaaaggatgtgctcattttgcttaatgaaatcaatatttcagctgcgcagtttcgcaaattagtaactttgtatagcatcggaagcacaattattgttgtacctgccgctattacagctgatgctcatcaagatgcctggattgccgcatttttcggtgtagcatcaggcattggcttagtttttctttttacctcactaggaaaaatgtttccaacgcttacgctgatggaaatgaacgaaaaaatttcaggcaaactatttggaaagattgtttctgctgtttttgtgttatccaatttatttatcagcagtcaagttctttactatgtaggaaattttctcactacacaaattcttccctacacgccgcttacagccatccacattgcatttatgggtgtggtcatcgtaggagtacgcctaggaatagaagttattgcacgaagtgccgagattttatttccttggtttgtcggattattcggacttctctttttgtctatgatccctcaaattaaaatagagcatattcagcctgtgttcgaaatccatccaaaagcttttattcgtgctgttttaacgtttttaagcatgagttctttgacttataccattctgcttatgattttttcttcccatacaccagacacaaaaaaggcaactcaatccttttatataggtaatatagccggcggactagtgatggttacgttaatcttactcggaattttagtagttggtccttattactcccaaatcaccatgtttccaagctatgaattaggaagaagaattgatgtaggaaactttcttcaaggaattgaagtagtcattgctattttgtggttcattactctcttttttaagctttgcatttacttttacgctactcttttggggtttgccaatgtatttcatataaaggactacaagctattttcttttccagtcgcactcatcatgattaccctttcccttattgtgtatccaagcgtttcttatcaaaaggattgggatacaaaaacgtggattccctacagcttacttgtaggcatcttatatccactttttcttttaattgcggggtttattcaaaacaaaaagcggcgttctagcaatggatagaaactcacaaacctttaataaagaatgcaccttcagtataagtaattatttttcaggaaaatataacactaattattcatgtataggagctagtgtatgctaggggtattggggttacttattgtttacacgctcatcatttggtttgaagtacctagactacggcaaaaaaagcgaagaaagaactgtggctattctatacagttcttgcaatcggaatggtcgtaagcatctgtaaagcacttggtttaaatgttccaaatccttctgatttatcagccgctatcttcaagccaatcagcatatttttactttattagttttttcgtaggggctttttatccttttattctccttattataggctgggtccgctttagacctgctaaaataaaaaagataataaaatccacataaaaaaaagcaggtagtcacctgctttttttatccttgaagcgcttgaagacctgcctgatttaagaagtgccaaggcttattaaaatgcggctgaaagaaaaagtccataaatccaagctcatcgatggtcatttcctgttgtacgcatacagacaatgtattgattgcttgagtagcatcaattttagaaataacctgtgcgcctacaattcgtcttgtttcttcttcatatactacttttaacgtaatattttcgtacgttggcatgaattctggtcggttattctctgatattgtgatacttttcacattcatatcaaaaagagaagctgctgtttctgttatgccggtagatgcaacattgtaatcataaatatgcaagcctgatgttccctgtgttcccatatacttaatcatcggcttaacaaggttttgagctactaatgttcccattctaaccgcattggtagcaagcggaatataagcatgtttcttaatgggattgtagtaaatagcacagctgtctccggcagcaaatatatcttttttgcttgtttgcatatattcatcaaccacaattgcgccgtttggaagcatgtctacttgtccttttactaagtctgtatttggacggaaaccaacacacagaataacaagatccgcttcgtattcgccttcagttgtcactactttttcaacagatccctcgctgcctacaaatttagtaactgctcggtttaatgctaatttaactcctcgattttcaaactcagtttccattagattcgtaaattctggatcaagatatttatttaaaatgcgatcagcactatcaataaatgtgacttcttttccatacacttcgaatgcttctactaattctgcaccaatatagcccgcaccgattacggctattttcttcgcttgcttcgctttttcaataatgtgattagcatgctgatagtttttacaaagcacaacattatttaaatcgatgccttcaaggtttggaataatcggccatgatccagttgtcatcactaatttatcaaatgtatcttcaaattcttcgttggtttctaaatttcgtacagctatttttttaccatctgtgtcaatattcgtaacttcatgtttcattttcatatttacacccatctcttgcaattcagacggtgaagagtaaaataaaccatttgcatcttttacgaccccgcctacatagagcgcaattccacaagacaaaaatgaaacattatcatttcgctcataaactataattttagcttctggataaagttctgccatattttttactgctgccgttcctgcatgtgtacaccctactactgcaattttcatagatgatatcccccttaggattatagaaaatgtgatattgtgaagtttttcacataaattgtgaaatgtttcacatatcttttacaattcttattatacaaacatgtttgtcctttttcaatagatatgtgaaaaaaatcacatactttttttaaaaaagatatgttacagggttctttaactagctttgaagcttgatatgatgcgctgcggatgttacaaatagtactctattcagtctggcactcttcattaaaaaaatgagtgtctttgaaaaaagctctgtgatagagccaaatacaaaaattaaaaatagaaataaacatatggcccagtaggactcatattccactccaccttacttactcatcacttaatccatattatacgaaaaaagtgcgataccgtggtatcgcacttttttacgttacttatcttttttatcttgaagggcttgtttcaaagcatcacccaagcttgaaccaaatgctccgtcatcgttatatttgttaaggagctttcgttcttctcgttttgaaatctttttctttttgtcctcagctttttccactacttgacatgaacggcattggaagtacgtgcctgcttttcctgagtgaatttccattcgcttgtgacactgcggacagcgtcgattcgatagtttagggtcttttgcccgtctatagctgcactccaggcttgaacaaacaagcactcttccttgctttgttttcttttcttttaagaaagaaccgcattccgggcacttagagcccgttaaattatgaggtttgtacgtttgattactcgttttcacttgcttaactagcttttctgtttgttcgcgaatatttgttaagaactcttttgcatttccttttcctttagcaattgcttctaagtcacgttcccacttagccgtaagctcaggcgactttaactcatctgctactaggtcaatcagctgcttcccttttttggttgcgtgcagacgattgttttggcgatcaatggattcattttgcagaagtttttcaataatatctgcacgtgttgccggcgtacctaaattatgtttttccatttgtccaagaagatccgcttctgtatagcgctgcggcggctctgtaaatgcacttttcatcgttacatctttaatgagcagcttgctgccttcttccatatcaggcagcttcaccgttgcttctgagtctccaccagaaacttttttgaagcctgtattcacgacttgctttccgcttgctactaactgttccccatttacttcaagctctgctttaaccacttcatactcatatgcaggataaaataatgaaataaatcgctttgcaattaagtcatacagttttcgttcatcagctgataaatcctgtagaaacacaggctgatccgttacgataatagcatgatgatcacttactttttcgttattaaccactcgctttggcaactgtgcatttcttaaaattggacgaacctcttctttatatacagcagagatgctttccaaacgctctttcatagtagaaaccatatctgttgttaaataacgagaatctgtacggggatacgtgactaacttatgctgttcatataacttttgaagtacattcaatgtcttcttagcagagaagttaaagcgtttgttagcatcgcgctgcagttcgtttaagtcataaggaagcggctgcgcttctttatgcatcttgcgcttaattgtttttacaactgcctcacctgataattttgagtgcagctcttttgcacgtttttcatcaaaaatgcgcttttcattgcccttttgccaagccgcttcaaaagatgaaaactgagctgtaagcgtccaatattcactaggtttaaatgtactgattacctgttcacgctcaattatcatcgccagcgtcggtgtttgtacccttcctgccgataatggttcttcgtatttagtcgttaacgctctcgtcacgtttaaaccgataagccaatcggcttctgaacggcaaaccgctgaatcatacaagcgattaaactcttttcctggttttaactgtttaaacccgtcacgaattgctttatccgtttgagacgaaatccaaaggcgtttaaacggcttgttccagcgtaccttttccataatccagcgtgctacaagttctccttcacgccctgcatcagtcgcaataattaactctccaatatcctttctttttgctagatcggatactgtgcgaaactgagagctcactttacgaattacttttaatttcattttctcaggcatgattggcagatcttctaatcgccacgttttatattggttatcataatcctctggtgtttgtaattcaactaaatgaccgagtgcccatgttacgacatactttggtccttcaatataccctttttttgtttgggtgctgccaagtacgcgcgcaagatcacgtgctacacttggcttttctgctaatacaagtgatttcattttatgtatacctccaattcacttgttccattatacatgattgtatactttttgtacgacttcaagattaagtttacataataatattataataaataaagctgaagaatttctcttcagcttctagctacttcttataaaatagtcgcgagataattaaaccgatagctcctaagacgataaataacaaggcccgtatagccattgggataaaaggtaaatcgtataaaacaagtttaaaaagtgttaagaacaaaattcccacgccgatatacgttgctgttttaaacgttttaagtgatcctattacaaatgctgcaatggaaagccctaaccaaacggccgtcataataagcgtttgcggattagcggaaagaagattggtgccagcggccgtaacttccgtagcaaaaattaaagaaagaatagaaaaaacaatacttcctccaactttgaacgtatcgtgctcatcctgttctgttttttgaatgctgatccatataaatactagaatagaagctaacacaacaacccaatttaatgccggaagagacagcacttgttcgattggtgtaactaagatatacgttgcgctcagtatataaatcgtataagaaaatagttgatgaagtagatttttatacgtcatggcgatatagtaaacagcaattccttgaatcacatataaaatgactccttctcttaaatcgacgagctgatgaataaaaaacgctactgcaacaattaaataggtaataaaaaattcaaatttctctttagaacttcttactgcgtaaacacctaatgcgtaaataataactagcgcaagcatcaccattgtgatcctgccatcgtcaaaaacggcgagcagccacccgtacgtaactgctaaactcgatagaagggtaaacgcatatacttggagtacggactgtgatagaaaaaaactagaaattaagcataaatgctgaataagaatcgccatacctaataactcttttacaccattatcaccaacaaacgagtaataaattagtagcgtaagatttaataatactgcggaaagaacatataaaattgaatatttttgtttgattgccacatataaaaaggcaatatacagaaacgtttcatagccaatgaaaacgggcgcattaggcgaattactttcaataagaaaaggaactagtacgcctccaaccgcgctaataatacctaatgcctgtgaacgataaaagactgtcgcgataatccctaggataatccagctcgcatttagtataaaagcaagcgttggtcccgctaaatgatacaggctatgcatcgcaaacgtcgttaatatgagaataggaatagctcctcctacaagtacttgcccgagcaccaacctgtcctttttaatttggaaatgacctgtcacagcaaaacctattgaaacaacgaaaccgagaacaacttttgctttttcattcattaacccatagtcagaggctgctttaaatccccatagtacgccaataataaatacaaaaataaaaattctcggcagccatgtttgaaaaaggactttttcccaatcaacaggttcttctattgcctgtgagcttttagctgctgtttgagcaggacgtttagtggtctcctcgcgctgctcgggaggagcgtgaactgtttttgatcttggagaatttgttttatatacgagcgactttagcctggctacgtcttcttctaaactgcttatttttcgttcaagttcttctattctttctttttccatatttcctcaccctttctctttaaagtatttgtgatgtttatatgtatatcttacagtacttaactattataccattaaaaggaacatctcttagaaacattctatttttagcaaaaaaaaatacagcgcccttttcaaaagaaaagttcgttgtataggatgtgctgcattttttatgtcactttctcgctgtatgtactatgaaatcccgcttcgatgtgggctacttgaaagctatggtgaccaattaaatatttaacaatatccacacggtcaattttaccgggcttattgttcattgcttctcgcaccatagattgaaatgtttctttgcaaaacttcttttcatgaagcagaatcgtttcacaatactcttcatggtctccctctgaaatacgataataatgcatttctttcacccctttttaatgttatacctattacataccccaaatatttctattttaacaaattaattttattattctttatttttccatatatatggtttatagggcaacgtttcgaaattcgtcgttataaatgctaatttgaagccgctgagaaaaacgttcttgttcgatatatgtttcaggcattaatccaacaggatataccttagggttttcgccactgcctaatatgtatacatacatctttccttcgcttgtatatcgaactttcgtcgaaatacccccttgctcttgaagaggcgcataaacagctcttacattatctcttatttcttgtacaaacccatgtagttcaatatcagaatcataataatggtttgcttcatacaagccgtaaatacgagacttatcgatatcacataatatgttccaaaattcagataaatcttcttgaaacaacacttgaataaaatttcgtgcagcttcttgctgttcgtttgttaattcttttgttagcgcaaactcttcattttttaacatctcagtcacctcccttttgtatgtaatacgacaagagataaaaataacctcttttttcaacttattagcaagcaatttatttttttacattaaaaattgaaaagttattttgactaaggcgtcagaataacttttcaattactgtagaataattacgtaaaatattcgatttttgcattcggaaaatactgatcaatgtaatgttctaatgtttctcttaattcttgttcttcatcttttgcgtatacatattttccaattccgtaacgtccccatttgtagcggcgctcctcttcattcatctcaagctttgttttcggataatttttctcgattacccgcttggccggcttggtaaagcgatgctgaatcatttcaaacgtaatatcatctcttgactcctcaggtatagaggcgtcaagcttttcaaacaactgacggtatccctcttgccaaccttcatgaatgtaaataggcgccacaataaagccaagtggatatccggcttttgcaactttattagcagcttcaatccggtaatcaagaggagatgtaccaggttcaaagttttttataacataatctgcatttatgctaaagcggaagcgcgtgcgaccattatgtttagcatccaataaatgatccacgtgatgaaatttagtcacaaagcgcagttgacctagttcactttccccaaaatattcaatcgcgcgctttaatgaatgtgttaaatggtcaattcctacgatatcagatgtacaagccgcttcaaatcgcgttatttgaggggctctttcctgcatatattgctctgcttgacctagtatttcttcaacattcacgtatgtgcgaatatatggtttgcttcccattgtggtctgcaaataacaatagtgacagtgccccatacaccctgttgcaaacggtattgcatattcagctgacggtttagatgtatcaaatttcaatgttttacgcacgccaactactaaagtcgacttggcattgcggtatttttgcaaatcatttttccccggtatattacgcacttgattatgagaagttgtttgacgaatctcaattcccatcttctcaaatttttcttttaattgaacaccaagcgggtactccatcgcccctggctcaatatatactaattgaggtacaaaaggttttatcatcatctacacttccttttttctaatactaatagcgtttgaaaaataaaaagactctatccttggtaattatttttcaaacaaaaaagactctccgtttaagagagccttgcgtcagtcatattgttcataatcaaatatcttattatacattttttcagcttcttcatacgttgaatacacggcatcatcttcagctaacaaatgataagactcatgtaaaaacagcgccttttcacctttgttttcaggatgttcaacaatttcagcttgattaatattcgcaacgtttgccgtatgaggatttcggtaaataacaaatacttgatctcccacttgatattcttttttctccacgatcatcatccttttcttctttctttactcgtatgatgcccgcttttgctcattttatccggtaaaaacacttcatggcatcatcaagaattcatacgcttttacgctcaataaaccgaaaagggagctcaattttctgaggagccttgcttcccactaatgtaaaaagcatttctcccatttccctaagaggaagttcgatggttgttatttgtaaataagaagaaagcggatgattatcaaaaccaatgatagctaattcatcaggaactgaaatacccgcttgttcgcactgagcttttattccgatagctacttgatcgtttgttactaaaagcgcctgaggccgatttttcatctgcactagtttttccaccactttttcaccatctgtcacgttcaaacagccttgaaaaacccattccggatgataaggctgatttattctttctacatattctttgtatgcttgttgccgctgcaggctatttgtacccgtcattcttccaatgcagtagccaatatccgtatatcctttttcgtttaaataaataagggcttgcttaaaagcttcataatgatcaacgtatacggagcgaatagaacgattctgtacgttttcgcacacggctatcggcccgtactgctgataatattcaatcgtgctccagctgcttgctctagaacaaataatcactccatcaacttgctttgttttcagcatatgaagcgcttcttcttctttttttacatcatagttcgtctggcaaataacaagctgatactgcttttctaacgcgtgagatgccactccttctaaaagcagactgaaatacggatgattaataaatggcaagacgacggcaatcatatttgttttcccttttgataagtgaacggcattaatgttttgttcataattaagttcgtgaataacctgctctaccagccggcgtttttcttcttttacatacggatgatgatttagcacccgggatacagtcgagacagatacaccagctttttttgcgatatctcggatatttgtcatgttttcacctttttctcttgcgctgaaacgcgtttcatactttattctcattataaagtgaaacagcaagaagctaaacccgttcccatcgtgtttttattcatttatgtaaggaggtcatttcatgggtattttattattcattttattatgcggaattgaaattggaggagcggcttatgcacttaaacaaaatgagacgctttggaaggagttagatgaagaaaagccgactgattttttcaaacagtaaaaagcccttaaaaagaacatcctttttaagggtttgatattacgcagcttctttagatgacttagactttttatttaaacgaggaaatccaattacaatcgcaatgattccgcaaaccgctgttaacattggatagaatgtaaatggaataatctcaatcggtgaaactttagcaaatcctgctgcgagaagcatttgtgcgccgtaagggataagcccttgaacgctgcatgaaaacaagtccagcagactggctgatttacgattatcaattgaatacttatcagagatttcttttgctaacggacctgctgtaataattgaaatcgtgttattagccgttgctaaatttgttaaacttaccagtccagcgatgctgaattctccgcctttttttgtttgaatgcgtcgtgttaataaattcaataagaactgaataccgccgttatagcgaataagctcaaccattccgccgattagcagagatagaataattaactctgacattccgccgataccttctgtcacagttttagcaagagaagaaagcgtgtagcttccgtcagctaatccaatcacgccggctagcacaattcctccggttaaaatgcttaatacgtttgcaccaaatactgcagcaatgagtacgccgacataaggcaagattttaaaccagctaaaatctttaatttctactgatgacgtgttgcctagcgtcattacaagcaataaaattaccgtaacaatcgctgcaggaagtacaataaaaaagttcacttttaacttatctgacatatttgttttttgcgtacgaactgctgcaatggtcgtatcagagattacggataaattatctccaaacattgcaccaccaacaacggcagcaattgccaatgtaatggatacatgcgcttgctcactgatccctacagcgataggccctagcgctgcgattgttcccattgacgttcccatcgaaattgaaatgaatgcgccaataacaaagattccgactaccactaagctttgcggaagcacagacagagctaagtttaccgttgaatcaacagctcccatgcctttagcgacttctgaaaaagcacctgctaaaataaaaataagcaccataataatgatatcaggatgccctgctcctttagcaaaacgctccacttttacattaagtgaatctttgcggttcatagccagcgccacaatggctgcaatgataatggctactaatacaggcagcttataaaaatctcccgttataattcctgatccgacaaacaggactaaaaagacgcccagcggtaacagcgcccagccgtttcctttttgttgttccattcttaacacctcttgtttacgtaataaaaaaagacctcttcttattgataagaagaggtctcttatttgtatcataagattacccttctcatcttccaaacgaaacatcgtctgctggatttggcaccgcactgcgtacagccagttgccgagacatcatagggccagtccctccgtctctcttgataagaagtttatagttgttttaaaaatagtctttcactactgtaagctctttttatttaattgtcaaatgctattttagaaaaatatatagtgcgaaaattctcacatcaattagctacgtctcgttttaaaaacgctacccaagctacgcccataaagaagacaaaatgcgcaactaagatgaaaattgaaaatggaatcgtcatgccgtcaaacatcgtcttcattccgtccatatactgcacaaagtttgtgttggcgaacagcaaaaatttcccccaccataaaccaaactgtgatactattccagttactgcttttgcgccgatacttacgacaatagccagactggaagcaagcgcgctgtttctaaataaagacgacagcatgaatgcgaacgtcatcatcataaacgtttccatatacgcactatcatacgtaagcgtaatgtttttaagcagctgcgcatctccttctagactggtaaatccaaagaacaatgctccccatacaaacgaaaaaagcaaatagctcagtaaataatacaagctaattaaaatgagggttaggtacttggatgctaaaatcgttgaacgtctagcagggcgaattaaaagaagcttaatggtacctgcttcaaactcttttgcaaccattgaccctccaacagcaagagcgaaaaattgaacaagaatcagcatacctgaactaaatgacaggaagttcaaaatgttgtcttctgttcctgcactgtttgctacttttttcattaatagagccatacaaagagttaaaataccgatggtaataaacgtgacttttgtacttcttttgtgaaaccatttcatatgttcattttgaattagcttaagcatggtgctctcctttcgtaacggacataaacgaatcttcaagcgtctcatatacaggggtaattcgatagactaaaatatcgctttccactaattttctatttacagctggaatttgttcttttacaatcgccacgtcgataatatgtgatctcatcgttacttcaaattcttgtgataaaagatccgctgctttttgcgcgtcagacacctcaaattctacgtacattccttgatcttgacgatttggagataggtcttgaacggcttttaactcgccgtcttgaataatgccaacgcggtcacataatgcttctacttcttttaataagtgactcgcgattaagatcgaaattccttcttccctgcaaagcgtttgtaaatatgtacgaaattctctcattcccgctgggtctagaccatttgtgggctcgtctagtaaaagcaatgcaggcttatgtaaaatagcttgagctactcctaaacgctgtctcatcccaagagaatacgtcttcacttttgcatgaatactgttttcaagctttactaaagcaatcacttcatccaagcgttctgatgtaatcccttcatgcatattcgcaaagtggtttaaattttgatagcccgtcagataatcataaaactcagggttctcaataatcgctccaattgatttcatagctgatgtaaactgttcctttaaaggaaagccgttaacggtaatcgttccctctgtttctttaatgagtcctacgacggtacgaattagcgttgtttttccagagccgtttgggccaagcaacccgaaaatctcaccgcgctcaaccgataaggatacatcatgcaaaatggttttcttcccaattactttactgacatgatctacttgtagcactgtttctgtcatcatgtacatcctttctttaattagcaatacgccttctattgtttctcttttttaactatttgtctactataaccttatttttggaaaagtagcccattcaaattattcgtattatccgcttacatttgataaaataaaacaaactttagttagaggaggacttctacataatgaacttaaccgtataccttgccgggcaaatccacgataactggcgagacgaaattaaaaaccaagcagaacaattaaaccttccccttacctttgtcggtcccatgacagatcatgaccgctccgacaacattggagaagaaattttaggaaaacagcctaatgctgtcttaaaagatgaagctgcttctcaaattaataatttacgtacgcaggtgctccttaaaaaatctgatgtggttattgctttatttggcgaaaaatacaagcagtggaacagcgcaatggatgcggcgacagccattgcattagataaaccgctaattttggttcgccctgaaaaactgcatcacccgcttaaagaactgtcaaacaaggcccaggttgtagtcgaaacgccagaacaggctcttcaagcattagcttatatttttgaataacaaataagagctgtcggttctgggcagctcttatttttcatttatccctgaagctcattactaggggaaatatttttttagcaagctaaggctattccttttagtttctttcattttcaacatcaaaacaagcaaaattgtacttagctactcatttttttgatcctgacgttccataatctttaatcattaattttacatcatagttaattggaacttcactaaatgtttgatcccaattgtctttaaccctcatccatactctaggcctcttaattctcaattgatttccgaacccggccacatcgactttatattctttttgcattttttctaccgtgtttcttacgaggtgcttcacttttttttctgagtttttttgcaccttctgtaaaaattgattttctaaaggatttcctgagaccacccaattttcagatagcctcccctcggattcaatatgcacattgaaggagatgctatttcctttgacatgaggttcaatatgacttttcatggattctatttcgtatacaatcagctgaccggtctttttatcaaagcttttcactagccctcctttcccttttcctgtgatccaagtcagaccatctagttcttcttcattcaaaaaaccaatcattttgtttgttttccctttaattatcccagcaccagcaaatttgatttccccatttgccgataatacattttgcaatagaaaactagtccctgattcaatattgctctctaatttaatgagcgacgtgggaggtaaaattctcgttgttcgataggcattttccaccattccagccaaacgaaatgccgggatttctcctgctgtcttcgattctagcccgtcgctagctctccctttactaataagtacaagacagcttggtctaatctcattatcacgaagaaactcatttactaattttcctaagctatacgttcgtgcaagagcctcgccaataataattacttttagatgttggctggcaatggaagtctctcttctcaatgataattcacgggtcatttgatgaatagaatctcccgtttcagccatattcacgtaagccttctgctgagatcctccttggacagttgttgaacttgccacttgcggggtgatcagctgataggttgacgtaatcaagttccttttgggatactcttcttgttcatcaaattctttttcagtcagggacttgttagctttatcaagagccatacctactcctaaacttcgttcttcaatttcatgactgctccaacagcccgccagaggaaagagcaaaaaaacagaaagcaaaaccgataagaagaaccgtacgtgattagaggcttgtctcatactttttcccctttatttttgaaatgataagaagcagtaccggtaaaaagccaaataaaatcagggcagcattgccaaccatatctcctaatttaaatacatcattgatatttctagggatcatggaaatgagataaataaccggaagcacaccatacataaatggatggatattttttttaaaaagctgagacagtcctaatgaagcagcgtaatggttaacattaaaagaagtaaacatttgcataatccataccaccagcagcaaggaatcaaagcgttcaaagattaacccagttaattcataacttcttattaaatcaagcgtaggccacgttctcgtaaccactccatcgactgagaacgctccgataaccatcacgacggtaataacataaagaagcaaaggaatcgcagtaccaactagtacagcttttactgctttgtttggttctttcatgaatgccaatattaaaagcatgaattcaggcccagtaaacgcaagagctgttgtccttatcccttttagcaccggcgtaatacctgaacctagtaccgggcgcagattatccacttcaaatattttgatactcataaaggcaacaagtaaaaaaagaataaccgtaataggtaatataatctcaaatatacgggcaataggatttattccccctcttatcagataaagacttgcccacataaatggcatgataatagcccattttggggttccttccaacaatagatatccagttacctctgccaatgaacgagcatgaaacccacccagtgccaaaaaataacctatcatgaggaaactaaataacttgcctatccatttccctacaatttcttggctgtattgataaaaggttttttcagggaagcgttgacttaatttcaccatgattacccctgctatcatggtgattatcccccctaaaataacagttagccaaacatctggtgttttcactttttccgcagctgcccggggcaaggtaagaatccctgttccaaggataaagttggtaataataatagttgtttgaggcgtcgtaatacgatcttttgaatttatcatttctaacggcccatttcctttcatcataagctacccttttcgcagaggatctttggtgtgcatcatctttggacgtcgtttcatcatcatcagaggcatacggactaccaagtctttccattcacttaaacgataaggaacagctggactcatataaggtacgccgaaactttttagtttcactaaatggctcatcataaaaaggaaaaataagatgacgccatataatccaagtatggcagcacaaagcatggctacaaaacgaagaatacgcaatgtgattcctacactatattgcggaatagaaaacgaggaaatggcagttaacgccactacaatcaccaaaatagggctaacgattcctgcctgcaccgcagcttctccaatgattaacccaccgacaatgcccattgctggaccaattggtttcggcaaccggagtccggcttctctcaaaatttcgatcgatagttccataaataaggcttcgataagggcgggaaacggaacaccagaccttgatcctataatagaaatagctaacttagtcggaattaaccctggatgaaatgaaataaacgcaatatacaaagccggtgtaaaaagggaaagaaccactgcaatataacgaagaaaacgaatgaatgtaccgggaatccacctttcataataatcttccggcgactgtaacatcatgctaaacgtaacgggggcaatcaaagcaaaaggcgtcccgtctaataaaatggctactctcccttccatcaaagcagcaattacacgatccggacgctccgtattctgtacctgaggaaagggactaaggtaattatcttcaatgagttgttcaacatatcctgactccggtacattatcaagatcaatttttttaattcgtttttctacttcttcaactagctctggatcaacaatctcctttatgtaagcaacaactaagtcttttttggaacgctttcctacttgaaatttcaccagcgacaaattttcaatatctccgcttcctcttaataaagaagtattatcacttaaagattcagtgaagcctactcttggccctctcaccaatgcttctgatacgggctcttcaatcgtccttgtttttactttgcttgtaccaagaattaaggcagatgataacccgtcaatcaaaagcgccgtagatcctgttaagacctttgatattacttctttaatggaatgaacctcttctacatcaccgattgataatacttggcttttaataaactgttttgaaaggttttcttttgcgtaaagctgatcctgttggtattcttttgaaaaatcagccatcaatgatgacaaaatatgtttttcaataagatctttatctgatagcccctctacaaaaataatagctgcctgaatgccggtgcgccctataataaactcccgaaaatgaacgtcggagttatgaccaatttcatttttaactacttttagagttaaagctaagtgatccgtaacatgattagataaattttgaggtgtaaattcctgtttgtgttccttctcgttcgcatggtttcctattttttttattgttgatctccattttttcactttcatcactcttcctctgaattacgaatcccgctgaataatttgtagattatatacgggatgaaaaacactagaactgcttgtataaaaactggcccttctggaagataggaaacaattaatttccacatgataatcaccctatttatgtctataacaaagctattctagaaataagcatccgtaaaacatcattgtttacttcatagaaattcttttatttaccaggtagtattattcttctttttgtttcttatacaaaggaatacaacatccatcttaaaaaagaaaaagagctgattactgaaggcttagacatgctggtttgctgctcaatgttttggtgaatgctagaataatcaagttttaccgctcaaaaattcccttaaatggttgacgagtgcttaaagtgtcggttacactttatgtttgaaatattgtattcatatcgctcttatctcaaaagaatggtataattttatagatattgaatttggaggactgctcatacatgattacagttagtaatgtaagtttacgatttggcgaccgaaagttatttgaagatgtgaatattaaattcacgcctggtaactgttatggattaatcggcgcaaacggtgctggaaaatcaacgtttttaaaaattttatctggtgaaattgaatctcaaactggtgatgtacatatgggccctggcgaacgccttgctgtcttaaaacagaaccacttcgaatatgaagatcaggaagttatgaaaaccgttattatgggacacgctcgcctttatgaagtaatgcaagaaaaagatgctatttatatgaaagcagacttcacagatgaagacggaatgaaagcagctgaacttgaaggtgaatttgctgagttaaacggttgggaagcagaatcagaagcagctattcttttaaaaggattaggtatttctgaagatcttcacgcaaaaaaaatggctgaactaacgggtagtgaaaaagtaaaagtgcttcttgcacaagctttattcggaaaacctgatgtattacttttagatgagcctacgaataacttggatattcaagcaattcaatggttagaagagttcttaattaactttgaaaacacagtcattgttgtatctcatgaccgtcacttcttaaacaaagtatgtacgcacattgctgaccttgacttcagtaaaatccaagtctacgttggtaactatgatttctggtatgaatcaagtcaattagcacaaaaaatggcgtcagatgcgaacaagaaaaaagaagaaaaaattaaagagcttcaagcctttatcgctcgctttagcgcaaatgcgtcgaaatcaaaacaagcaacgtctcgtaaaaaattgcttgataaaatttcattagatgacatccgtccttcttctcgtcgctatccgtacgtgaacttcacgccggaacgtgagattggaaatgacgtacttcgcgttgaaggtctaacaaaaacaattgacggcgtaaaagtgcttgataacgtaagctttattatgaataaagatgacaaaatcgctcttgtaggccgcaacgaacttgcaaattcaacattaatgaagattttaatgggtgaaatggaagcagacagcggtacgtacaaatggggtgtgacaacgtctcaagcctttttcccaaaagacaactccgagtactttgaaaacggagatttaaacttagtagactggctgcgtcagtattcgcctaatgaccaaagcgaaagcttcttacgcggtttcttaggcagaatgctattctctggtgaagaagtgttgaaaaaagccaacgttctttccggaggagaaaaagttcgctgtatgctttctaaaatgatgctaagcggttcaaacgttcttttactagacgatcctacaaatcaccttgacttagaatcaatcacagcactaaacaatggacttatcagctacaaaggttcaatgattttcacatctcatgaccatcagttcgttgaaacgattgcaaatcgtgtaattgaaattacgccaaacggagtaattgacaagcaaatgacatacgatgagtatttagaagacagcaacctgcaaaaacaagtagctagcatgtacgcttaataagaaatcccctttctctatagaaaggggatcttttatatacgcacctcttgatttagcgatggcttcggagagtacgttaaaaatgctaagctagcaaatactaatgctgctccgcatatgttcaccaaagttagagattctcctaagaaaaagacgccaagtaaaaaagcggtaacgggctctgctaacgatagcgtcacggcggtagacgcatgcaccgacttgagcgctgtagaaaataatacataagcaagagccgtcgtaagtattcctaagtgaagagcgatgcctattccatttaaagaaactagccagcttatatcatacataaaccagcatgggattagtagaacagcagcggctgtgaacacaagagaagcgcctacttgcggatcaacatgctgaacaatttttttattaacagtcgtatagcaagcaaaagacgcccctgctcctatcgccatacccaaacctatcacgtcgatttgactatctttttttaacaacaagcagcagcaccctataatacccgtaaacgtggcaagcagccatttttttgtaggtttcttgctgtacactatgtaatctaacactcctgacaaaagcggcgcactcccaattgccaccattgttcctactgcaacacccgttttgataactgctgaaaaaaataacggctgataagcggccatacttgctgcagcaaccgtaagaggcagaataggaaggtgtcttacgtccactttctttttttgaataagacaagctgcaagaagcgacagtccccctacagctaaacgcaccgctccaattgccacggaatgcgcttcagcagatgctaaggcttgggcagtccctgttgttccccatagtacagcggcacataatataagtatttttgataatgaagtattcatatttccatctcctttcttttatcatagctaaaagaaagaaaaaagtttttccgcttttatgatattatttgtctgtttttaaggtacttcgataatgagtaggtgagactccttcttgttttgcaaaccatttagtgaatgaagacaagctgtgatagccgacttcatgcgcaatatacgttaccgagtagccagtctcttttaacaattcttttgctttatttaaacgtatacgcgctacatagcttttaggcgaataacccgttttttgtttaaaccaagcagaaaaataggcaggatggtaattttccagcctagcaagactttctatgtttagctcttgattaaagttagcatgaagataatcaatggatttaaacgtttgtttctttggtaaataatgctgaacgtaacggactaaatcttcaagcgcccccctgtcagtgcttttttgaagcccatcaagtaaaaggtagcgaattgctttccatgttgaattccattgaataaacgctgcttgttgagaaagatgcgcactttctgtaaatttcaacggaatatcaacaaccaaacattcatttgtatttttagcttgatacgtatgaagctgacgaggcggaatgtaaaagcaaccttcttgcagcgttaagtgctgctcacttgcttgaatatcaagagcacctgctagcggaaacaaaagctgactgtagttatgatcgtgagtatgaggtgaatagctgtaggctcttttttcgcaaataatttcacgtagcgtatccattttgtactcctttccttatttcctatctcacagaagctgttctatgccattcaaaacggtttccagcgcctttaacgattccgtgggagtatacaaaacgtccaatgaatgatcggcattttcaatcacttgaatattcattttgtttgtttttaattgataaacttcttgagtataatagtgatcacgagttcctattacaataagacctttatgagtgcatttcagtaaacttttaaacagttctgttcttgttaaaagcggcgtcagtaaaagcagcactgcgtctttgtaggcttcatctttcataattcgctgaatcagtggaattgtaccaatcgattttcctgaaaatatgatatttttatagtcattgtgagataaaacgtcttgcatcacgagatcaatgtcttgcatcataacatctgcaatctcatctgtagactttgtcatcagctcttttgggtatgtatagtgaatatgaaccacgtcaattccgtgttttagcatcagcatcgttacataatacaatagcggcttttcgtacgtatagcctagccctgaaaacataaagcaaatgcgagaacctcctgttttaatatgtgtataggtaatcctatgagtttggttgcttacgcttttctgatttacatgcatgtcactcctcctttttaaatattctaacatttaattccgtaaaaaaaccccatctttttcttaaaaaaatgagggttgaggaaatagctctgcaagcagttcataagacttctttttcgcttcataatcatggatatttgtaataattaaaaattcgtcgttattgtatttttgctgcagctcaattaattcttgttttacttcagctggatttcctacgatcatacgagggcgattggtgcttatttttttaagttcttcttctgaataagaacgattgtgcacttcttctatcgatgaaattgttgtatccccgctttttgccactttcaacagccaatcatctagcgttttggcatgcgcctcggcttcttctgttgtttctgcacatacaacaaatacgcatacgttggttttaggctttgattgatacgaagaagggataaattcttgtttataatgacgaatggcttcttgtcctccaactgaataaataaagtgtccaaatgtaaaagagatgcccagctcagcagcagatcttgctcctcttttattaataccaagatgccacagttctggctttgtttcacttaacggataagccgtcacgccgtaatacggatgatcggatggtaaattatgctcaagatgtccttttaacgcctgaatttgacgcggaaattcattgagacttttacggactccatctgtgagcgctagtcgggtcagcgcatctcctcccggtgagcgtccaagacctaaatcaattcgattaggaaacagattttcaagcagctgagcatcttctgctactttatacggactgtattgaggaagaagaactcctccagatccaattcgaattcggctcgtttgagaagctaagtgcgtcattaaaagtgtcggagatgagcctgcaagaccgttcgtattatgatgttccgctacccaaaagcgatggtagcccaactcttccgttaatttagcaagctctaccgtgcgtttcaacgcttcctttggtgttgatccgcttgaaacaggagactgatccaatacgcttagcttaatcataggtgattcttcctttcgattttcaatgtctattgtctctattgtaggagaaaaatatgaattcgtcttgaaatttgcttcacgctcataaaaaagaggttgagatattaacaaaatgaatccaatctaaaggcgaacaaataggatacatgggctgaaccacttgtgataccgccgttgatttccgtgcaagaattcgctttccgcgggcggccgctgagcctcctcgtcacatacgctcctgtggggtctcacctgttccgcttttcccgcaggagtcttcgccttgccctccaatcaactgctaggaagacctacacacatgaaagctacatttatcctaacccaaaaaaacgaaccgctcatcaaacatgttgatcaatggttcgttcttcacttcgtctaaattccttttgactcagcccttttcttattttgcttcgtgcatttctttcacacgcttatcgctcggcaacagccatgttaacagcccgaggattggaagatagctgcaaaacagcataataaactgaaggctgaacacatcggctaatttaccgaatacaacagctcctaaagctcccattccaaaagcaagccctacaatcaagccggaaaccaaaccaattttccccggcatcagctcctgagcgtagacgaccgtgacgctgaaacttgactgaagaataaagccgattagtactaaaagaggtgctgccactcctagagaaacatgagggagtaataaagtaaacggtactgaccctaacatagaaaacaataaaacatttcgttttccgaaacgatcggcaagcggacctccaaagaatgttccaaatacccctgcaatcataaataaaaaaacgtaaagctgagcgcttttgataggcaaattaaatttttcaatgatataaaactgaaagaaattgagtatgcctgctccgtaccatgaacgtgcaaaaacaagaaaaattaaaagtccaaccgcaaaaataatttgcttgttcatcgtaaatgaagcatctgattgctttttcttcaagcgttgacgattagctaactctgatttataccatttagagacactatacaaaaccactacgcctatacctgcaattaatgtaaaccaaatcgttccaaactgaccaagtccgataaagataaatgccgtaaacagcggcgccatcgactgtcccgtatttccgccaacttgataaatagactgcgccagcccccgttttcctcctgctgccatatatgctacgcgagaaccttccgggtgaaagatagcggatccgaatcctacaaataagacagatataatcacaaaataaaaatttggcgctaaagcgagtccaaccataccaatcatgcttagacacatcgcaattggcaataaaaatggcgatggacgcttatcggcaaatacgccaaacaccggctgcataaccgatgacgtcatatttaaagcaaaggcaatccaaccaatttgcgtgtagtttaaattcatcgatttttcaaggacaggaaaaagtgccggtataacggactgcatacaatcatttagaaaatgtcctaaactaatagcaaataaaatacggtaaatcgtcgcccgctgcgcttgctgcgttcgtgctgctgcttgcattcataacccttctttcttaatttaatctacattataactgttaaagtcttacaatgtctttttctattatacagtgaaagttgagattgtagttgttttctttttataaaaaagggaaaattgcctgtgaggtgagatcagtgaaaaaacatgtgcatatgattgtagatggacgcgttcaaggcgtagggtttcggcactacacgcaactaaaagcaatggaatgttccattaacggatgggtacgaaatcgagacgatcaaaaagttgaaattgacgctgaaggcgaagaaaaagacctccaaaaatttattgaagaaattaaaaaaggtccctctccgtttgcttctgttagtaatgtggaagtaaagatagtaaacaccccttcacacactcattcttttcgcgtgaaatacagttaaaaaactcgctaaatcaagataatttttgataaaatggaaaagtaagcgattttatatgatctacatataagggggaaaaacgatggttgaaaacaaaattgtgttaattacaggtgcagctcaaggtattggttatcaaattggtgagcgctttgctgaagacggagccactgttgtcttaactgacttaaatgaagatggcgttaagaaagcagcagacaaattgaagtcaaaaggctacgaagcgttaggcattaaagcagatgtgacaaatgaaagtgatattgaacaaatgattgctcaaacggttgaaacatatggccgccttgatgtattaattaacaatgctggcatgcaatttgtttccccgctcgaagaatttcctactgaaaaatttgaacttttaacgaaaattatgcttgttgcaccttttgttgcgactaagcatgcgtttcctattatgaaaaaacaaaaattcggccgcattttgaacatgtcttccattaacggattgattggtttctcaggaaaagcggcatacaacagcgctaagcatggcgtgattggcttaacgaaagtggctgctcttgaaggtgcggagcacggcattacggtaaatgcgatttgccctggttatgttgatacgccgcttgttcaaaatcaattaaaagatttggcacgtacgcgaaatgtagcgcttgaaaaagtactagaagaagtcatttatcctcttgttcctcaaaagcgcttgcttgctgtcgatgaaattgcagattatgcaatgtttttagcaagtgatttagcaaaaggcgtaaccggccaagctgctgtgatcgatggtggatatacggctcaataagaaaagagtgtcagttagactggcactcttttttttatttatttaatttcgaattctcctaaagaacctgtcgtctgacctgcttttactgcttctgcgtataaataatacgttcccactggaagagcttcaccattaatctttccgtcccacgttgcgctagagaatcctttttctacattcgtatacgaacttaacaattcccctttttctaacgttgcatcgtaaatgtaatagctaagcttctctgctcctcctggtaaataactgccgtattcaaatgatccatttccaagtacatctacatatgcagaagtaacgcgaggataatccggctcttttacaaataagatggttggaacatcgtacgtttctttattgttacttacggtaattgtcccttcgtaatagccaggagataatttccctgcatctacttttacattcaggtttactttttgcgtttttcctgcattaaccactaaatcgtttgttgatttaacgtcaattgcctgatggcttttcttaaattttactttgaccgagtatttttgactgtgatttgatagatttttaatcttaaagctttgtttttctacttgtttccctttatctttataaaagacaccgtacgagtgacttcctggtgtaataagcgtttttgctttaattgcatctactacgcgcatgcttcctgcaccttgcgtattatgagaataaaccagcccgttgcggtcgcgaagcagttccgttgtattcattaaagatgcttttacgtcttctactttataatttggatgcgcctgtaaaattaacgctgctgctcctgctacgtgcggcgcggccatacttgttccttgttttgacccatatccatgagggttgcttggattattggttggtactgtgctgatgatatcgactcccggtgccgaaatgtccggcttaatcatccatgtatcgacaaccggtccgcgagatgaaaagtcagccattgtttcatcaactgtctgatcaaatgttgcagtaaaagagcccgtaacggatccttttgctaaagaagctaccaaagcttgtccatcggcttttgataggcgaatacttggcaaagatgtgcctggaatatcagggattgtcccttctacgttgttgtaagtcaccgttgcaacagcaccggctttttttgcattgtcaactttatctacaaacgcaatgtcgccgcgagaaataaccgctacttttccttttacatccttcccttcaaagtcttctggttttccgagtccgacaggtacaaattcatactttttaccacttgcatctagtaatgccttgtcatttggaaagcccattacttcagctgaagcatagcttgcgttatctacagttaatgtcgttttatacaaattgtaaggaagctgagtcgcacccactgaaatagcttcacgagacgtccccggagagcctactgtccagttagctggtccactgtttccatttgatgtaacggcaactactccttcttccattgcccaatctaatgcaatactcgttgccaagtctggattattaatcgtatctccaagcgacagattcattacatccgccccgtcctctaccgcacgttcaataccggcgatcacgtcttctgttgtacctgttcctcctggccctagtacacgataagcaagtaaatgagcatcaggagctacccctttaattttcccatccgctgcaattgttcccgctacgtgtgtaccgtgcgttgtcgcttctccttttggatctcccgccggcgtttcttgaggatctttgtcatcatctacaaaatcccatcctttatatttctcaaacgctgactttaaatccggatggtcgtaatcgacgcctgtatcaataacggctacggtcatatttttacctgtataccctgatttccacgcttgctctgctcccacatagtaaatgcttttatccatttcagaaccgtattcttcggcgctcacttctttcgatttcacttccgttgtatgatattcaacgcttgggtaaatagcttttactccaggtaaacttgctactttttcaagatcattagctggaagttccgctgaaaatccagaaaacacttggtcatattctcgctttactttcgaagttttagaagcttttgaaagctcttttttcacttcgtcacgcgcttttttaatctttcctttactttgtgctactccttttttcttcgcttccgctacagactcttcatttaactcaacaataacttttacttttttggctgattttaagttatagtctccttgaattttgactaaagacggttcaagagccggctttgaatttccgttagcggatgctcccattgcaaaagaagataaagcaaccgaaaatgctactgtacttaatacagaccgaattgatacttttttcatcgtttttccctctccatttctctctataactcgtgctactatgtatgtcttcatccccggaacatacgcaccttttccttagctagtgagctaacaactagaatagtatggaagttctatatattactataaaatccttgagtctatggaatcattttatatattcatgcaaattaagcactaatgctcaaaaaatgaagaattttgtctatttctcgtctttccgtaacttttttattcctaaaattatgaagagattagatgaatatacaagaatactgacgaatttctgttaatttagctatttttatcagggactcacccctactttctcttcgtttacttataaggtttttttattattttaagaaaattgttcttataagcgctttttattttataacttattatttagaatatagtttaatttaatataaaatattgcacttaattaaatgaaattttaaaaaattacgaataataaagggaggtcttgcagatactaacgtcaacgctcgcacaaagggaggcatgattatgatagatttaaatttcatcctactcatccttgatcttctctcatctcttgtcactattggcatctactttacaaccaagtgagcacctaaccttctctttactcttctagcgcatgtacttaagctattacaaaaaagaagcaagccaatttttactggcttgcttcagctatataataaagtagttaaagtggaagggatttatccgcgtcttccgcctctgccacctcgttttgattcagtgctgcgttttagtgtagataaattatcttcactatcttttaagaaacgcgccattttttgttcgaagttttcctttggttggaagttgcttttagaacgattatcattatttcttgcctgacgtggcgggcgttgtgaataagaagatgagggtctttcaggtttatctattgcttttttaatcgataatccaatttttccgtctttctcattaacgactttcacttcaatttcttgaccaactttaaggtggtcattaatgtcttttacatagctgtcagctacctcactaatatgtacaagcccagtttgacctccaggtaattctacaaatgctccaaaattagtaatacctgttactttaccttgtaccttgctacctacttcaactgccataaaaaatgttcctcctcaataatattaaaagcacttcattataccaaagtgcgtaagaataacaaagtgtgtatgagaaaacaatttgttaaattacactttttccgcctcttttttgttttatgaaagaaatcagtcaaaataatgcccatattagatatatctaatatgggcatttctctcatttccaccattcatcaaacatgctagctggtaactgacgcttatgttcagtaatacgatagcgctgttcaattttttcagcggcttcttgtgatacttcttttccttctaaataatcgtctagttcatcataagaaattcctagttctgtttcatcagattgaccaggactattatctaacaagtcagctgttggtactttttcatacaatcgtttatctgcacctaattcttttagcaatgcttttccttgacgttttgttagtcccgttagaggcagcaggtctgctccgccatctccgtatttcgtaaaaaagcctgttactgcttctgctgcatgatcggttccgataactaaaaggccgttttctcctccgattgcatactgtacaatcatacgcgtacgtgctttgacatttcctttatgaaaatcagacagcgctatatctgtcgcacctgtaaacgaactttcaaatgcttccaccgtgtttttaatattaaacgtatatgtttcattaggtttaataaattctagtgacgccttcgcatccgcttcatcatgctgtgtgccatgaggcaagcgaacggctacaaattttgcttcatattcttcttttcgcaattcgtctacagcaatctgcgctaatcgtccagctaagctagagtcctgccctccgcttatacctaatacaaagccttttgcatttgctgactttaggtaggttttgagaaaatcaacgcgggcacgaatttcttgtgctggatcaatttcagatttcacatgtagctcttttcttattttttcttgcatgtctgacatgatacatgctctccttccattatatgtagatttcttactgatacagtccatgttttttactataaaaataacagagatcaggcattaaatatcttggttctccgccccgggcaaattcttgacggatataagtagagctgatttccatggctagccctttatcaagaagctgaaaccggccgtcgtcataatttcgaagcaaaggagaatgactaatagctttcaacatgtctattccctctcttgccatgatgataaactggtttttactaataagttcatctgctttcttccacttgccttcaccaatatcttgcagtaagtccgctcccataataaaaaataagtcagcgtatggaagcaattttttaaagtgctccatagtgtagtatgtgtaatgatagcctggcaatacgtctagctcatacgtatcgagcaaaaattttgggttgtctttaatcgctaagctaaccatatttacacggtgctcatccgacgtctggagctttttatctgttcgtttgtgcgatgaaggcaaaaagataatagcatctaacttctttcgatgcgcaaccgttgatgccgtccaaagatgaacattggtaaccggatcaaaagaagaaccataaataccaattttcgctcctttttctaaaagcttatctatttttttatcagggtttagctgttgaaaataagcaagcgtatctgacatgtctccagctccctactattttttatttagggcttccgctactttttgttttacgtacgcaatttgacgcgttttattttcccaacatttttcgcttaaatctactggatattcttcaggattgcgcgtgcgcttatattcatcccaaagcagctctaaattatcttttacgtactgctgaatttcttgaagttcttctgtttcatacacaagctctccgtttacaaagatatcatgatggagttcttttgcttcaaaatttgtgacgaatttactgataaacgtatgaacaggatggaacatttttaaacgttcttcgctttgaggatcttcgtcttccatcgtgatataatccccttcagatttcccattcaaattattaataatacgatatacgcgctttagccctggtgtactcactttttcaggatttgcgctaattttaatcgtatccatcatctcgccattttctccttcaatagaaacgagtttatacactgctccaagcgccggctgatcatatgcagtaatgagcttagtaccaattccccacatgtctatttgtgccccttgcgactttaaatgcataatcgtatcttcatctaaatcgttggaagcaacaatttttgtctctgtaaaccctgcttcatctaacatttgacgagcttttttagacaaatatgttaaatcgccgctgtctaaacgaatcgctgtaaaattaattttatcgcccaattcttttgctactttaatggcgttgggaactcctgattttaacgtatcgtacgtatcaactagaaacacgcagtttttatgacgacgagcatatttatgaaatgcaatatattcgtctttataagcctgcaccatggcatgagcatgcgttcctgcaactggaattccaaatttctttcctgctcgcacgttagaagtagcaccaaatccgccaatataggctgctcttgttccccaaatagcagcgtccatttcttgagcgcggcgtgttccaaattccattgccacttgatctcctactacatgtttgattcgagctgctttcgtcgcaatcagcgtttggtaattcacaatatttaaaatcgctgtttctacaagctgagcttcaattaatggtgcttctacacgtaaaattggttcattatgaaacacaagctcaccttcacgcatacatcgaatcgttccagtaaaggtgaggtcttttaagtaagctaaataatcttctttaaaacctaattcttcgtgcaagtaggttaaatctgattcgctaaatttaaatgctttaatatattcaataactctttctaatccagcaaaaacagcatagccattcccaaaaggaagtttgcggaagaaaacttcaaaaacagccttcttttgatgaatattatcttcccagtacgtttctcccatattaatttgatataaatcggtgtgtagcattacgctgtcatctgtaaacatattcattgatttcctccacttttatgtccttaaataatttttgctccgaggcaagatttaaaatgttcaagcgcccactcatgacctttttgattaaagcttgctacggctttttcataaatataaatagcaaatcctttattataggcatctactgctgtatgaagtacacaaatatccgtacatacacctgctaagtagacatcggtaatttgtctttctctcagtttaatctccagatccgttccagcaaatgcgctgtatctcgttttattcatccattctacatttggctttgattgatacacattatataaatcatttacctttccgtatagctctcttcctgcagaaccttcaacattatgaggcggaaacagcgctgattctggatgcaaggaatcattttcttgatgaaaatcaatggcgaacaccacatactcgttttgctcaataaattgacgcgtaatatcgcttatggatgtttcaatgtgtctccctggttctccgcatgtcaaagctccgttttcagctacaaaatcatttgtataatcgatgttaatcagtgcttttttcattatgtttccccctcataagtaaaaattaacagttaacatattgttaattatttgaattgaaagtttttcttttaatagcgtgctgtatagattggcttcatcacattcatttcaacaaaccggtagagctttgttggttttttagacgttctcgtcgttgtttttccatctacttcttcaataaatggcagcattcttatttttcgtgcaaaggcctgatcacttttaatcgctgcatcatccgttacggtaagcagcacagcctgcagctcagagtatgtaaactgagaaggcagaaacttctgggcaatggtcgtttgcaataaatctttcttaatttccttgattgcatctcgaatgatgatttcatgatcaaaagctaaaggcaatgaaaagatttcatctattttaaataattcaactcgagcagcatcatcattcgcttttcgctttattagactatcttgtgggacgattgcataatgtgcgtttgtaatgacccatcctctatcgtccctgccaggctcatcatagacaccatagtgttttaaatgaatatcttttacgcccgtttcttcttcgagctctcttttggccgctttaaaagctgattcatcaggatggacaaatccgccgggaagcgcccactttcctgcttcgctgttcttttctccctctgcattcaccattgctcgttggataagcattaatttcaaactcattttaggtggtttgtatggttctttttcttccgtcacaatcgtaaacacagcaatatctgacgtatagccatagggtttaggatattcttttttcgtttgattcgtcattgcttttttgttcgacattcatcatttctcctgatcactctttttacaattaacaatatgattaatgttaattatatttgttttatgaaaaatgtcaatacttttcccactaattataaagagaaggtaatttatgttgtaaataacgttaggtttcgtattttttagattttatatgcataaaaagctgagtgaagaagttctaattcgcctcccccctcagctttttttccttttaattaacgtgctgctaaaccaatcatcatgttaccgtctttaaaatactcaattacatagtcaacagacggacagtaaataaatgcttcttctgtaagattagctgtctgttgaaaaaacagtaaagcctgagctaaatcgacgcttacagctttagttgctcgtttccaaaataaaacaacctgatattcttttatattcatctcttgaagccattttttgatttcttcaatatggcgggtggactttttaattaatacttttctccaattaatttgcatgattgttaaaaaaggaaaggtgtttgaaagtttttcgaagtaaatgcttgtttgtctttttgttagtaaatctgcactgttacccaatgtttgaatataatgttctatttttttcataatcatcctccagtcgaaattggagtttgctagaattttcagagacgctctctatacaacagatactcttcttgctaaaaatcccgcagctttccaaccgtgctttttctcaacaattttgaagtttcacctttttatacaaattattcaaaataattcgtgtattttagtttaccataaaacctaatctttgactttgaatatgtaaaaccttatctgtatttcaactaaagagcgaattctacagataaagaaaagctataaaaaagttgacattaacatttataaaagttaatatacttactaaaagtaacttgattgcatataacaaacaaggggaagaaaatgaactatcaaacagatgtgtgtataataggagccggaccaggcggtgctctactggcctatctactggctaaacaaaatatatcaactatacttatagagagatctgataagctcggaaaagaatttcgaggcgaacatttaaatgaagacggagaaatgattcttaagaaacatcatatatttgaaagaattgaaagcttaggcctccttcgaatgtctagagttgaatactggaaagatggaaatatattcaaaatgatagaatctgaaaatggacatgcaggaattcatgttccacagcagcatctccttcagtctataaatagccaagcaagcatccatccctcctacaagcttatgctgggcacaaaagtaacggagttgatacaagatgacaatggtcactatatagggataaaagctcagcaaaaaggccggggtgaaataatagttgaaagtaaaatcattattggagcagatggtcgatattcaactgttcggaaacttgcgcacataaaaaacaatattcataatcatggatacgatttgctttgggcaaaaattcccgcacctgccaattgggagccttctattaaatttgcacttgtgaagcagcagcaggtggcgcttttttctcaagcaaaaggctttgttcaaatcggatggaatattgaaaaaggcagctatcctgttcttcgaaaacaatcgtttagaccgtttattcagcgtttaatagacgctttccctagcttaaacctttcaatagaaaggtttattacgtcgtggtcagactttacgcttctttctgtgcaaagcagcataagcgaagtatggttaaagcatcacctgttattattaggggatgctgctcatacgatgactcctactggcgcttttggattaaacgagtcattaaaagatgctgacttactgtctgacttactgcatcaagttttttatcaaaacaaagaaatttcaaaaacattgagacagtttgaacagaaaagaaagcctaaattaataactcttgaacgtattcagtttcagcgagaaaaagaattcccgtcccattttatttcttcttaagcctaaaaaaagagattccatagataaatggaatctcttttttgtaatcatgattttttagcagttgttctatgtaagttctcttttatgtatattccgcgaagttactcttgctttgcccgctgccatttttgaaattcaagaaattgtttaaactgctctttgcttattcctgactccgctgcttcttttgctaactcaagccactcatcatcaatatccaacgattcagatttatccataggctcatgaatcaatctatcaatactcacgttcaatgaagtagaaattttgtttagaaattgaatagatgggttgagctgaattcctctttctactgaagatatgtacgatttagcaacacccgctcggtttgcaagttctgttagcgatattccctgtttcattctaagatctcgaatacgttggccaattgtcattttaatcacccttactaatgcttacttatcgataataataccataatttcactttaccgtgcattataaataaacgttcttactgtaaagggatgattatacttctagtggacatagcttgagacttgctataaaggttatctatgcttagagaattctttatttccttactagtgtattggctaagaatttgagctaatactatgtaaaaattgtctaacttcctcgatgcttatacctgtttgttttgcttccattataagtataacccattctaagtctaacgcattttcgtctttaaaattcataattctcctcctttcttcttttttcgaaattgataacgttttctttttgctgttttcgggcattctcccttatttctcactatggttttacagtataatggatattactagaacattagacattttttaattactaaaaagcacctatttttttgaaatttttgtttattcttatcataataattttaccgttacacaaacgctacagttagacactaggaggattgtttttatgccttttctgcatacggcgacagaaaaaatttactatgaagttcattcgcccgtattcactgacaagacagaaatcattgtgatggttcattctgttatcactgatcatacgctttttgattctattactgcagaattaacccaacattattctgttattcaatacgatttgagagagacaggaaatagcgcctccgctacaggagagatatcgtttgaggctcatattgaagatcttttccacttattacatacgttacatataaaaaaatgttacttagttggagtgggatttggaggacaaatcgctgttaaatttgctgctcgctatgaatttcttattgaaggactgatactattgtctcttcctttttattcagatagcacacttcaaaaggttaagagatgttacaacgaagaaagtaaaaagcaaataccggtagataaaattttcgaattaggcaaactagagagtctggaacctacaaacatacaacaggtaattgaaagactaaaaaaaatgggtcccggtgtatatttccgctttcttaaactatctattacagacaatctatttaaagagttgactagcatttcacttcctgtactcactttgtctggccaacatgattttctgttctcatctcagtatctgatttcaaagacgatgtttttaaaaaactacagtcatatgaccatacctaacgcacattctttatttttagtaaaagaaaaaacagctttactcaaagaaattgcagtagattttattaaaagtaacaaaactcagccgtcttctttaagaaatgactctatgaaaatacttaaaaactgggaaagtgatacggctatagacatacaaaaagacttccatgcccacacaccctctcttaaagtagatttcttatactctttttccgtttatgtaaatggccagcttattacagagggctggaataagcgctttgctcaagaaattttactatatcttatttttcgtcattctatcagcagagaacagttatgcgaagcgctgtggcctgacatacctttaagcaatgccaaaaagaatttacgcgtctacttgtctcatttaaaaaagttattgaacgcagaaaaggaagagccagttttacttgttaacaggcagctcatttctttaaacgcagatgtctcaagcgatggattagacttactaactgacctccagtggattaccgaacagtctgacccggcgttgaaattcaaggaagctgaacagcgactgcaccaattagttcctcattatttaacaacaatttatgacgattggttccttgatatccgagtaaaaatagagattattcttcttgacttattaatctggatgaaagagtggctttgtgagaatggaaaaatttcaaaagccgtatttttactcattaaatttattgatttagtagaagaaaaggaattcatttatgatgaaattgtcgattgctatatcaagctcgataacactgaaaaatcagagtactggctcgatcaaaaaatgcggtatttatttgaataaaaaggatgtgaatacatgaattcgtactgtgagatggtgtttaatcaaataaacgttaatatccattctctaaccgcaatcattgatgaggttacagaagaagagcttgcttatcgtcccctccctcacaagcggtctattcaagagctgctgcagcacttatgtctcatttgtactgcagactatcatatttccttaggctgctcagcagataaaatgaatgacttctatctgcagcatccagcttatacaaagcttgaactcaaagcagctttagtagagggcttcaatcagctaaaagcagtttactcttcttttgacgaacgaaagctattttcactgcagacatcctattggggatgcacgtatacacattttgagtggctgcttgaaattcagtctcatttataccatcaccgtgcagaactgtacacgcttctaacctgttaccgcagaaacggattggatgtagtgctttttgagtgatataatcagaaacagaaaaagtagtgaagctatagcttcactactttttcttactctctatattaaataacctttatttttgttttaattgtataatatgtatctgctattagtcctactgcaagtccgctaatcattccgtacggtaatacacccggtacattttgataaaaagtaccaattaacattgcagctaggatgccgaaaagtacgcctatcacaatatgcgaaccaaacttcacctgttttgcggtatacattcttcctcctcctcactttttttccattatatcacaacagcatcgtttatttaatgataactgagcgaggaatgcgaatgtaataaaactgtaaccttatataactattttaatactactcttttagcgaataaaatgtcatatgaggcttttcttcttggtaatacgctaaacggtcttggagcgtaccggtatgaaattcaaatttatgaccgtcaggatccgtaaaataaatagattttttgtctctctcgtcacgatttcttccaggtaagatggttacattatgctgttttaacagctctcttgcttcgtcaaagttttcgatagaaatagaaaacgctaaatgagtatacgaatactgaatttctgatctaggaatatttttttcttcgtttaacgccagccacaatccactcagacgaaagtaagcggtggattttcctttcactaaaagttctgctcctagcactttctgataaaatgtgatggattgttctaaatttgacacagaaaagcacatatgattaattccttgaatcagcttttaccctcgctttctagaaaaaaatacttctctctattacataactttccttttagcatctattttactgaaaaaagatactttttgccatgtaaagagctactccccaaatcatacatgcagaagccttattgacccaaatcattattttcccatttgaatccatttttcctactgcttttcctgcaaaagctaaggataaaaaccatatccatgaaacgcatatcgtaaccagcgtaaaaacccacttttcttttccgctgtacagtagagaatttgttccgattacgcccataatatccatcagcgcgtgaggatttagcagagatacagaagcagcaaataaaatttgtgcttttaccgtcatcccttcctttaatgacgtttttgaaggttcgctcttccacgtcacaaagcccatatacgctaaaaaaagaagacctattccaaaaataagcgtttgaaaaaatgaaaaagcagcggctactgctgaaactcccagcactgctactagaattaaaatcgtatcacaaacagaagccgttaccactacgggaagcgcctgtttgatcgttcgttgatttgctccttgattaaaaacaaacacattttgtacccctaaaggtaaaatcaaaccgaatgctaacaataaagcatgcataaccactgtaaacatgttgctctctcctttctctttcatcatacaattgacctcccctgttgtctccatccaagttttgatttataataccaaccaaattataaaaaggtggtctcacatgaactggactccagatccggctgataaaaagccaatgcacaaacaaattcaagagtatatgaaagagaaaatcataaatggggagtggcctattggaactaaaattccttcgcagcgccatttagctgctagcttttctgtaaatagaagtacggtggtgacagcaactgaaaacttaattgctgaaggactgctcagcggaaacaaaggtggtggcaccaaggtcattaacaatacgtggagcttactagcatcaggttctcacatgaactggaattcgtatgtagaagcaggaatataccaaccaaattctccaactatccgccatattaacgaagctgaatttcaaccgggcattattcgtttaggaactggagagttagcacctgacctgcttccttcccatcagctttcggaactatttagcggaattaatcatagaagcgtacacttgggctacgagcacccaagaggaaatgatgaactccgacaagagttagtgaagcatgtaaaaaaacgaggaattgaaacttctccttcatctattttaattgtatccggttcacttcaagccctgcagttaatttcaatcggcctgctgcctccaggtgccaatatattagctgaaaagccttcttatctttattctctgccgttatttcagtccgcacaaatgaaaataacgggcgtttcgttagacggagaaggaatgcatttagcttcattaaaagaccagcacgaaaaagaaaaaggcacagctttatatacaataccgaactttcataaccccaccaacgtgacgatgagtgaacaaaggcgccaagagctgcttcgccagtgtgaaagaatgcatttgcctattattgaagatgatgcttacggagagctttggttccattcaccgcctccactttcattaaaagctcgagataaaaatggaatggttctttatttaggaacgttctctaaaacattcagtccaggatttcgaattggatggattgtagggcctgaacatgtaattgagcgattagccgaccttaaaatgcaagttgactacggagccagttccttatctcaatgggccgctgctgaagctcttaaaaccggactctatgacaagcatgtggccagcgtacgctataaattaaaagaaaaatctcagcaaacactggctattctagagaagtatttgaagaatctcgctgtgtggaatgctccgagcggaggtttttatttttggcttacgctgcataagcctgtttcgatgcggaagttatttaagcactgtctcgacgaaggagttcttttaaatccaggcgcattgtatgaccatgagacatcacagcatatcagaatatccttttcttatgcgacgcttgcagaatttgaatacggcataaaaatagtcgcaaaaagccttaagaatctttacaagtgattcttaaggctttcttgtgttaacggcagctttataaaaaaagtgagcttattatgctgacgatccgctcgtatctctccttgatgcagctgaataatttgttttgcaatagccagtcctaaacctgaaccattcgcgtccgttcttgattcatcacctcgataaaatcgatcaaacaacttttccacctcaattttttcactgatgttaatgctgttcctaaaggaaataactatgtaaccctcgtaaatctcctgattcacctctaatacggaaggctttttgctgtatttcttgacgttttcgagcaagttttgaaatactcttaccattttttccacatcaataaatgcattccattcacaagcaaagttagtctgaacgtcaatgccttctcttgttaaaattggctcgtattctcctattacctgttgaagcaaacgtttcatatcgacctcatttcgttgaagctgaagatcaggactcgttaattttgtatagtcaaacaattcttctattaaatcagttaaataatttgcttttgaatcaacgatatataaatagctatctaatgtttcattatctatattttctctttttttgattaaattgagatatcccacaatagacgttaatggcgtacgcaaatcgtgagacacactggatattaactcattttttacttgttcgatttctcgttcccgatcaaactttgtacgaagctgcgcagacattttattaatattttgacttaattcagccagttcatcttttcctcgtacatggatggttgcgcctaaatttccatttgagatcttttgaacttgttcagagatttccttaagataacgaatatgggaacgaataagtactaaaaaaacaaaaacaaagaccacaagggcgataaagaaaagtccaaacgccaataaattatatgcagggacattcattttctcttcttgtatatacctgttcaaaataagcctagcaattaaaacaaaaattaaattggtagccaaaaaacttataatgacagcaaaaagaagctttacacttattcttctcatatcctgtatcctacgccccatattgttttaatataaatgggctttttcggatcgtcctcaattttttcacgaatctttgtgatatggaccattacagtattatccgatttaaacgcatcttcttgccatacggcttcatatattttccctatactcatcaccgtccccttatggcgtgccagcagctctaaaatatcaaactcttttggtgttaagcgaatctcttgattgcgcacaaagacgaggcgggtactgcggttaatttccaaatcgccgatttgaataatttcacgctcagtacgttcgttgtatttttaataacgtctaatttgtgatttaactcgtgcgatgagctcgagaggattaaatggttttgttaagtaatcatctgcgcctgctgttaaaccagaaatcttgtccatatcttctgacttagccgacagcataatgatgggcatatttttttcttcacgtattttaaaagcagcatcaattccattcatctgcggcatcataatatctaatataattaaatctacttcttgttcctctaaaagcgctaatccagatacagcattagaaactttcagcgtttcaaacccttcattttctaagtaaatagcaattagattaagaatttgctcatcgtcatcaataattaaaattctgtctttcatttacaaactccttatatctcattcttttcgcatgtgaaaatgtatgcgggaggaacgtttctccactctttttccgcttcaatctgcgggaaaaacgtgcggatcaactcttttttaaaattcgtatactgaaacgtaataaatttcccttcatcagctaatacacttcgcgtgttttgcaaaatacagcccgacacttcagacgtcaaagaagcaaaaggaagacctgataatatgtaatctacttttggaatatcatactgtatcaagtacttttgaacattttcagcggatccgtgtatcacatacacatttttttcatctcttacttgtttctttactttttcgtaaaaatgccggttgtattcgataagaagcaaagttgtacgagcgcttcgtcttcttattaattcacgggtaaaaactcctgttcccggcccgtactctactatacaggctgcatgttcaaaatcaatcccttttactatttttttcgctaagtgcgtagagcttggcaaaagtgctcctaccgttcgcggctggtgaaaatattgatacataaaagctaaattcattttctattccttctttctactctttctttctagaatagaaaaaaagagtagaaagaaacgttaagtaaattccttaagaattcttaagaaaacaaaaaggaggatgggacataacggaattaacccaatctaaagacgagcaaattggattaataaactcatatggattgctcttgacaccgctgttgatttccgtgcaagacttcgctttctgcggggtctcacctattccgcttttccctcaggagtcttcatctttccctccaatcaacagctaaaagcggtgaaaccaacgtccataataacagtaaaaaatccgaatggtcagtcaataatatcgattgatcattcgaatttacctttaactaaaatatttttgtccaacctcgtttactcgtttaaaagataatttatcgtaaataacatccgctatttaaatcaaaggtggctcccgtataatgttttgcttgagggctcagtaaaaaaagaaccgtatctgccacgtcttgaggcgtaacaaagcttggaatcagctgatgcgcgatgtattcatttttgcgccactctggaatttttttcatcatatcggtatttaccattgtaggtgctacggcattcacccggatataaggagaaaaattcatcgcacagctcttggttaatcctagtattgctgctttagacattccatatatagcatcggagcttccttccattcctgacaccgacgatatattaataatcgctccttctatctcctttttcattaacaattcgccaaagtacttggagaaataaacatatcctttaatattaatatccatcacaaaatctatttcgttttcttcataatccaataaatttttccctaaatacacgcccgcattattaactaacccatacaaacttttatcttttatttgataaaaaagatcttttacatcctttccttttttaacatctactacatacgtttcaatatggccctttgtatcttcagctagctgtctcaaagcttcatcattaatatcacaagcaataactgaatagcccttcgacatacactcttttacaatttctttaccaattccagaacctgcacccgtaacgattatccatttttctttcatctcgacacctcttatttacttctgttagacatacttgttatgtaaatattcaaacatttattataccattattttctatatagacatccctttcttgcgctcttttttagcttatctaacaaagcgcgtatagttttttataggagtgataacgataagacagtacattatttcaaacaagaaagagatgataagacgtggcaaaaaaagtactttatattacagctcatcctcatgatgagtctcaatcattcagtatggcaactggaaaagcatttatcgatgcttacaaggagcataattcaagtgacgaagttgtacatattgacctttataaagaaaatatccctcatatcgatgcggatgtatttagcggctggggcaaacttcagtctggttcggaactctcttctcatgaacaggaaaaggtcaatcgccttgcagaattgagcgaacagtttgtagcagcggacaaatatgtttttgtaacgcctatgtggaacttttcgtttccgccggttatgaaagcctatttagactctgtagccgtagcgggtaagtcatttaaatacacggcagaaggtcctatagggctattaacggataaaaaagcgcttcatattcaagcacgcggaggcatttattctgaaggtcctgcagctgatatggaaatggggcatcgttatattgggattatgatgaatttcttcggagtaccttcgttagacggcatttttgtggaagggcataacgcaatgccagataaagcccaagaaattaaagaaaaaggaatagcagaagcaaaaaaacttgcccaaaccttttaatataaagagcctgtaacaaaaatattttaattgaaggaagatccgaacgaggactcgagactcttaatggagcatcaactttgttcggatttttctgttggtaaggtgaacgtagctttcgtgcatggtggctgcttccagcagttaattggagggcaaggcgaagagtcctgcgggaaaagcggaacagatgagaccccacaggcgcgtaagcgacgaggaggctcatcggccgcccgcggaaagcgaagccttgcactgaaattaactgcgatgtaacaagccattcatactagatcatttatcccgtttgttcgtctttcgatggaagtgatttcgttatgtctaagtctcttttctacgcaaaaaaactttctctttccctttcgatccacctgtccatttctctatcacttttttctacaagtctgttaacgagaatatcatgccaaatataattttcaagtaaattaatgttgactgcgttatttgtatagtacgccatttctttatgaccataaatcatttcactgctgtcaacagatataataaaccagttttgattcccaatgttttcggtatagcttgtatgacggtgccggtcaaattcctccatcgcttcatcttgttcaaacacaattccttttagtgtaatactctcccttagctgtaataaaaaaggcttcaactcattataaatatcgggccaaagcgagatgacaattttattttttgcttttaacaatagcgactcacaaaaagcaagaatggctctttctcctttcatcgtcataacccggctttcttctacagactctgcagcttcaagacgtttaagcgtttcgctaacgtcttcatacgtttcgttccattttttttgcagcgaatgcaaaaaagcatcgacgggcagcgacgtgtactgggtgccatcattactctcttcttttaacaccatgcctttttcctctagtgtttgtaaaatatcgtatacacgcgctcttggcacacctgaatgtttactaatgctataagcagtggaagatccttttttgacaagcgtcacgtatacttttgattcatactgattaaatccaagcgactgcagctgctgaataatattttccataaaggaaacctccctgttttttaagttatttgaaattttcatcatttacatatttacaactgctttttatatagttactatttaagtagtcactatatattatgacatgaggaaggtgctttatggaagaattaagtttacagattgttcttttgcttttactatttggttttttagccgcattcattgactctgtagttggcggaggcggtttaatttcaacgcctgcccttttatttttaggtctgcctcccgctgctgccttagctacaaataaattagccggaacgatgggcgtattaacgagtaccattcgatttgtcaaatccggaaaagtcgattttcgcgtcgtaggtaaatggtttccttttgtatttattggttctttaggaggttcaatcaccgttcattttctatcctctgcttttttgaaaccggttattttaattctccttgttttggtcgctatttatacgattttcaaaaaaaactggggtaccacgtctacgtataagccactgtctattaagaaacttattttctttaccgtacttatttttattattggcttttacgatggatttttaggagcaggcacaggttcatttattttatttgcttttttatttatgggatttgatttcctgcagtcagcaggcagcgcaaaatttttaaatttcggcagtaatttaggtgctttacttgtatttttatattttgattctgttgtattttcttacggattaattatggggtttgcgatgatcttgggttcttttgtaggatcaaatgtcgctctatcaaaaggcgtgacgtacgtccgaacgctttttattcttgtcactttaagccttattagcaaaaacatattcgattatgtgaatcagtacaaatagattaatggtttctttagaaccataacattgaacctttatatctattaaatcaataaaactacctcttactattttcttatttttgggtaaatatgtaaaaacactaaaattgttgtatactggtccatgttgttttacataatttagaaatattatacagaggtgaacattttgtttaagaaattcaggtttttatggtttgttttgctgatctttgcacttatttttgtcaaaaatacgttcttttcttcttcagagaacgctgctgagactctagcaacgtcagatgttccacaagccgcagctactttcaaagagggaaacaatcagcaggctggagtcattattcaaaaatatcgcaaacagctagatgcagcgcagaaaaaaagcgacgaaaaagctactaaagaaatataagaaaaaattcatgaagacggcaggcaagcggcactaaactttttaccgcgcaataaatttcaaagagctttttctcagccttctaaaaaatcggccgatgatatttataactttctaattgcccaagtggggtttggaggatatgattctctttatcaagaagcaatagccgcaaaaagagaagcagcttcttctactgatgaattaaatatgagtggcattcaagctaaaaccgctgcacttacatacggcacactagcacaaagagagcaactgcttgttacaagtcttgcctatgacttaagcagcataggcgtcattttttccgatacagctaaagatattgataaaaaagctactcatatgctagaagttagaaaagaaggaataaatgccgcgatgcaaaaatagttttgcgaagtgaaaagcagcaggtaaaaactgctgtttttttattctaacgttcaggtatttcactattttaatagccgatcatttaataacgatggttatagctttcatataatgatataaaaatggaggtaatttctatgaaagaagcgattgtttatcaatacgatgcgttcagcacgcgccctaataaaggaaaccctgcaggaattgtgtttaacggagatgatttttcagctgaagaaatgcagagaattgcttatcaagcacagtttaacgaaactgcttttatcatggactcttcgcgtgctgatttacgaattcgatactttacgcccggacaagaagcagatttgtgcggtcatgcaaccgtcgcttctctttatgctttacatagtgaaaacaaatttcaaaagactacatttacagtggaaacaaatgctggaattttgccgatgactgtacagaatagaaatggacaacctgttatcaccatgagtcaagcttctccgcagtttcatccgttttcaggttcaaaagaaaaactggcaaaagctcttaatcttcatattgatgaccttgatcaaagacttcctattgtatatggaagtacagggaactggacgcttattgtacctttaaaaaatttggctgcctgtaaaaagatgaagcctaatcaagaagatttccctcatattttaacagatatgccaaaagcatctattcatcccttttgttttgaaacgattcactcagaagccgatatgcacggaagacatttctcttcaccattttcaggtacggtagaagacgctgtaactggaacagcatcaggcgtaatgggcgcctattatgcaagatatgtggaccagcaagataacgaccgctggcaatttgtgattgagcaaggacaggaaatagatagagatggcttcgttcatgtagaaattacaaaaaaagagaatacgtatggtgtggtaatcgcaggagaagctgtctatgtaaccaagcaaatcgtttctctttcctaataaaaacgtgtccgcctatttggcgaacacgtttttttgtttagtaaataatagcctgtacgctcattattgtaacggttaaaataagaatcacgttccctataattaaccacggctttgcgcttcctcttctacctttaatagccgtgattagtccagcaatgggcaataaagccataacgatgacccaaattttacgaagaatgctggaatccaaataaaaaccaaactgcatcatcgcaaataacacgactgtgataaggaagaaaagtgtaggcacagctaaatgaatgcctcttggtctcattgagtagtacacaacatcactttctttctatgtaaaatcttacgtaaaataacgttatcatttacaaagagttttgacaactttttgaaggattttgtcaacaaattttaataatctagaagaaattacttcttactcagctgacctaagactgccggcagtgcagaaataacgtcgcttgctaacatatccatcattgtatgcccctgatcgagcagcacatccgctgcttttccgtgaacatataccgcattactgattgcttcttgaagagaatcatgctgcataataaaagcgaggatgatccctgttaacgtgtcacccgttccgccttttgcaagtcccgcgtttccagtggtatttacgtattgttttccgtccggtgttgtaacaatcgtatttggaccttttaatacaaggtacacaccattttctactgcgtattgcctagatattgaaaagcgatttgcttctacttcggcgatagttgtgtccacgagccttgccatttctcccggatgaggtgttaaaatcgttgcatgttctctttcttttacttccgtttctaaatggggaagatgaaaaagaccatcggcgtccaccacaacagaaaccggctggtgaagcacttgttcgacgactttcttcgtttccttcgttctcccaagccctggtccgactgcaattgcatcatacttcccttcttctaaaggaatctcgcctgcaaaaaagccatctttgcttggacatggtttatacatcacttccaacatgtgagcagctgcaatcgcatgaatatcgctcggaagcgcaagcgttaaaagccctgctccgcttgtgagcgctgcttttgacgttaacatcggcgctccgggtgtttggagtgaacctcctattacgattccttttccgtgtgtacctttattggacgaagcgtttcgaatgggaaaagcttgtttaatatgctgagttgaccatacctccctaagagatgaacttttttcaattgctagcggcgggatgccaatatctactacaatcaattcaccgtaactttctttactcgggtatgtaaatgccgtgattttcggctgctgaagcgtaatcgtagcatctgcacgtaccgtaagctcttgcttctgttccattactccacttgggacatcgatgctgtatatgtaagccttagagtcgtttattttttttataatatcatcgtaaggagatttgatgctgccttttactcctatccctagtagacagtcaataatcaccgtatacttttttacagagaagttatcttccgccgattgccacgtgaacccagcattttcatagataatcatggcttttttagccgcaccttttattttttcccgtgcaggaactacccagacgtcaacttcatagccttttgacttcaaagcacgggcaataacaaagccgtctcctccattgtttcccgttcctataagcagccctatgttttcatgttttttgattcgctcactcagcgcgtttgcagcagcctgcccggcattttccataagggactcttcactcatcccaattgtattcatcatataatcatctacttgatacatctcttgattcgttacaattctcattatgctgctccttactgaaacggaaatggttcatctgtatttaccgttccttttattttcgttatagttaattgttctcctttcacccaatcttcaaacgagaaaatgagaggctttgcttttcgtccaatccccacaataacttgcagcgtctccggtacatatgctactgtatgaagcgttccagcagaattccggtaatcttctttaaaaataccgtattcatcttcattaaataaagaaaaagcttcaagaggcgatagttttttttcaatatgatctcgaatatgatcgagcctttcctttgactctaccaaatgatgacgattttcttcgattagctgattaaaatggttcgtacaccccatcatcgtccctctttgtacatgaacgcctcgtccagatgcttcgactactgctccctgtccgctgcggtcataaatggaataattaaacgcatgacgatgcggtgctctttctaaaatagcaacagcctcttctgtcgtttcacatgtttctaaaataaaccgagcgagcgtacagcaaataaatccgtttgtttgacggcggcgattaacaaaatgatagccaattgccagtcctttttcattcattccatccattcgcccaatcattctcgttccaaatccgacgcttgcatatccttcatttggctgaaaaagcaataatcgaccttcgtacgttttaggatgataatcgtagtttctcacatacacgccgtgctgcataagagccgaacatcccgttttcttccactcttgctgatacccgctgtactcatgaataacgtcttcaagaggccaatctaagccttctgctaagcccactagctcatcccacagtccgggagcaaataagtcgtaataatgacgagcttcttttgctatcgtttgatagcttcgtaatgaacgttttcttcttttttgatgattttcaaacagctttgttcctttatggaatttcccttgcatttcaccaagctctcggtaagagcctcgtccttgaatgacttctacctgtatttctttcacttccatcactccaattttccagtacctttattgtgcagcaagcgctctattctttgcaactttcttctctcatagaactctcttcctttgaatacagttataaagaaacaggtcgaaagattgaaaagcattatcataagaggtgatcatattgctaaaggaagttcagctagagattcagcgaagaatcgcctatctgcgcccaacacaaaaaaatgacgggtcatttcgctactgttttgaaacaggcgttatgcctgattcgtttttaattatgcttcttcgcacctttgatttagataaagaagtgttgattaaacaattaaccgaacggattgtttcccttcaaaatgaagatggtctgtggacgttgtttgatgatgaagaacataacttatccgccactattcaagcttatacagctcttttatattcaggctattaccaaaaaaacgaccggatcttgcgaaaagcagaaagatatattatagattcgggaggcatttcgcgcgctcattttctcacaagatggatgctttctgttaacggcttatacgagtggccaaagctattttacctcccgctttctcttttgctcgtgcctacctatgtaccgcttaacttttatgaattaagcacctatgccagaattcacttcgttccgatgatggtagcaggaaacaaaaaattttcacttacttctaggcatacaccttctctttctcatttagatgtaagagaacagaaacaggaatctgagggaactactcaagaatcacgcgcttctatttttttagtcgaccatttaaaacagctggcttctttaccttcttacatccacaagcttggttatcaagcagcggagcgttacatgctagaaagaattgagaaagatggaacactctacagctacgccacctctactttttttatgatttacggtcttttggctcttggctataaaaaagattcatttgtgatcgaaaaagccattgacgggatttgttcactacttagtacatgcagcggccacgtgcacgtagaaaactccacgtcaaccgtttgggacaccgcgctgctctcttacgctctacaagaagcaggtgtaccgcagcaagatcccatgattaaaggcacaactcgctacttaaagaaaagacagcatacaaagcttggagattggcagtttcataacccaaatacagcacctggaggctgggggttttccgatattaatacgaataaccctgacttagacgatacgtctgctgctatcagagctctttctagaagagcgcaaaccgatacagattatttggagtcttggcaaagaggcattaactggctgctgtccatgcaaaataaagacgggggttttgctgcatttgaaaaaaataccgactctattttatttacttatcttccgcttgaaaatgcaaaagatgcagcgacggatccggctactgccgatttaaccggtcgagtgcttgagtgcctcggaaactttgctggtatgaataaatcccacccttcaattaaagccgcagtaaaatggctgtttgatcatcaattggataacgggagctggtacggccggtggggagtttgctatatttacggaacgtgggccgctattacaggactccgtgctgtaggggtttctgcttctgatccgcgtatcatcaaagctatcaactggctcaaaagcattcaacaagaagacggtggattcggagaatcatgctatagcgcttctttaaaaaaatatgtgccactatcgtttagcaccccttctcaaacggcttgggctctcgatgctttaatgacaatatgtccgctaaaagatcgagccgttgaaaaaggaattaaatttttactgaatccaaatcttacagagcagcaaactcattaccccacgggaattggtcttcctggacaattttatattcagtaccacagctacaatgatatttttcctcttcttgcacttgcccactacgcaaaaaaacattctttgtaaagaggctgggacaaaagtggtttagctgaaggaagatccgaacgatgaatcgagattcttgcttgagaatccaactcgttcggattttttcatttgtagggtgaacgtaggcttcatgtatgtagagcagttaatggaaagccaagactaagactcctgcgggaaaagcggaatagatgagtccccgcaggagcgctcgcggcgaggaatctcatcggccgcctgcggaaagccaagtcttgcacggaaatcaaccgcggtataaccagcactccatactagcgcattgataccatttgtttgtattaagattcgatggacatagttatgtctgaatttctttttatacataaaagcaggttttttaggaaacaagtggaatacctttttaaatgttaggaaagaaaggatgcatcaaatgaataatgtttcaccacttttaaaaggaaaaaatgtgatactaagaaaaccaaaagacagcgatgtaaatgactatctagcatgcaaacaaacaaaagaacttattcgcatgtacggaggcgatacccgaaacttaaaacctcttacattacaagatgccaagcggcacgtcgattacataaagtctcaaaagctgaattggtgtattgaatatgagcagcgatttgttggataggcccggctgaccgttaacgagtacgaccggcgcgcacggtatgcaattggtttatttgattcttccgtttggaatcaagggctcggcactgaagttacaaaattggtacttgcgtacgcatttgaacaccttcacttgcacagagtcgatttacgagtgcttgagtacaaccatagagccattgcttgttatgaaaaatgcggttttgtaaaagaaggaatagagcgtgaaggcgcttttattgaagaagtatttcagacagatattatcatgagtatactcgaacaagaatattatcagctgtagaaaagagaatcagctgtcatcatcttacttctttaaaagttcgtatagcccaagccttttgtgaataaagtaacataacgatataaccaaaggagccaacgatgacagcttatgattcctcttcctttgtatttgtaaccattgataaacatgacattgctgcttttttactaattgatattatttgcagcaccactatttatgtagcatgtaaacattatctccacaatgagcttgcttccattgcaagcagcgctctttttcccatggtatataagaaggtttctcgacgctagctcagctttttaccggttcttttaatgacagccaagtgcgttccttctgctgctgaatctctacggcgtgattaaaaaatttagaaagatgcggctcagtgagctgttctttcgtttttccagaggaaaacacttctccttggcgcatacaaagcgtatgggtaaagcaaggcaaaatttcttctacatggtgagtaacataaataagcgtaggcgcttttggctgctctgccatttttgcaatcagctgaagaagctgttctcgggccattatatctagacctgtacatggctcatcaagtattaaaagctttggtgaagccataagagctcgggcaattagcactcgctggcgctctccttgagaaagtgttccgtacgcctgattttgtaaatcttcgcaatttagcagctgcattaattctatggcttggttcatatctttttgctccacttgttcatataaaccaatagatgcaaatttgccgcttaaaatcatttctaaaaccgtatcgtcatctcgaaaccgctgctgaagcgaagaacttacccatccaatttcttttctgagctcagacagatttgtttctccaaatttccttgaaagaacttctactttaccttttgtaggccagatatatccgttgattatatttaaaagcgtcgtttttccggaaccatttaacccaagtaaacaccaatgttcccctttttccactaaccacgacacattttttaaaatttctttttctgctcgttttaccgaaacgttcttaattttgatcatgctaccactcctatactctcatttttcatcatatatactataaaagaataatgatttgtcccatttgttaacttgcttttcttttttcatgccaattctttcagccactttaatcgatgggtaattgtcaggatctatcaatgatataattttctgaaatttaagcgtatgaagtccataatctaagcaagcttttgctgcttcactcgcatagcctttcccccagcggctgcgtaaaaataaataaccaagttctggatctacctttccgtctactttttgaagaaccatgccgcactgccctagaaactctcctttctgtttatcctcagcgatccacatgctaatgccgtacgtttgataatgctgcttcatccattgaatccagcggcgtgtgtcttgttcgcttttagtagaagaataatacttcattgcttcagcatcctcaaagattttcagtaaatttcctgcatcgctttcagccatggctcgcagcgtcattcgttctgtctcaataatcgtatgaatcctctcctttcttacattccaacatctactatctttattatccgctactattttcttttcgtaaagttttcctttttttatttaaatgaaccagaaaaaacgcaccaaaaaaggctgctacacacagccctttaatctggatcacacgttttcccgtaccgtaatacgttatatatagcacgtccatcacttgcagatgtctctgtatattgaattggcagcagtgagaaaataacataatagactgaaaaataaacaaattgataacaaaatatatcttcaggcagaatattagccataattaatccattcattataaaaatagtaagcaaattaaacagtacaccacctgcatataccactgcatgagaaatgcggctgtcattcttaagattttcatatttacaaaacgagtctaaaaaatagactgacttaattttaaacttccccattttaagaatcgtttttcctcgaccaatagtaaaatcgaccttccctccgaaaataattgccatgacggaatgccccagctgatgaataaatgatacaagtggcaatacaagacagaatgaccacacaaactttggaagatcatttaacccaaacacgtttatccctcctttttgtttcttctctctacttttcctccccgttttcacttaaaactatatttaaattcttttttaaaaatcatacgaaataactagtatcctaggtaggtcttatattctaaataaaattcatgtatgtaccttatgaaaaatacattttccgaaaaacagttggggtaacgttttcctgttctttaaaccgcttgataaaatagcttggatgttcataccctacttgtcttgctatatcttgtacagagatttggttgtttttaagcagcagtttctttgctttttgaatccgcacgcgcgttacgtattcaaatggccggatgccaagagattgttgaaaaagcaaacacgtatactgctccgttacgttgagctgctgcgccagtacttgtagcgttaacggctgatgataatattcctcgatataacgaaggactgggtttagctgagtaatttgctgcaggcgacttttactttctatatatatgctgtcttggcgaagttttaaaatgacgctatatagtagttcagagcactgcatggtgctagaggtatgattttcttctaatcgattcattagttcttgaagcatcctgtaaagactttcggcatttgtaaggacgatttttcccgaattaataaattgaagagaaagcatgatatcatcaatcacacttccgttaaaagaaacccagcatacttgccattcgcttgtaacggggtagtattcgtgcggaacgtgcggcgccagaaacatcccttcattttcttttataatataaacctcgtcatttacccgaagctcgcctctaccttttatacattgaatccattgataatcaggaaactctccctgacgtttaatatgcgtttgatgcctccagcttccagcgcttgtaacatagaatggcagtttcatatcttcatctgaaagagccggaaagtacatacggtccacattatttccccctttttatgtgaatatagttatattatcacgaaaataattagattgataaggtttttagaaaacgttatcattttcatataaactaataacctagtactttagaaatgagggatcgacatgttaaaaaccggcaagaaatttaattatacagcacctgcaaacggataccctgaatggaataacaaccctgaaatttttcaattgaaccgttcaaaagcacacgctttactcatgccttatcaaacagtcgaagaggccttgaaaaatgatagaaaatcttctgtttactatcaaagcttaaatggcagctggtattttcattttgctaaaaatgcagatggccgcgtcaaaaattttttcgctcctgagttttcatatgagaaatgggactctatttcagttccttcacactggcagctgcaaggatatgactatcctcaatatacaaacgtgacatacccttgggttgaaaacgaagagctcgaacctccttttgcaccgactaaatataatcctgtaggtcagtacgcacgtacttttacacctaaatcagaatggaaagatcagccggtgtacgtcagcttccaaggcgtcgaatctgctttttacgtatggattaacggtgagtttgttggatacagcgaagacagctttactccagctgaatttgatataacttcttaccttcaagaaggtgaaaatacgatagcagtagaagtatatcgctggagtgatgcaagctggcttgaagaccaagatttttggcgaatgagcggcatcttccgagatgtgtatctctattctactccaccggttcacatctatgactttagcgttcgttcgtcgcttgataacaactaccaagatggtgaacttatcgtttcagctgatattttaaattactttgagcacgatactcaaggtctaacatttgaagccatgctgtatgacgcgaatggccaagaagtactacaagctccgctgcaaacaaatttaagtgtgagcgatcaacgtacagtctccttgcatacacatattaaaagccctgcaaaatggagcgcagaaagtcctaatttgtatacgcttgtactcagcttaaagaattctgctggttctattatcgaaacagaaagctgtaaagtcggcttccgtacgtttgaactaaagaacggtctcatgacaatcaacggcaaacgtattgtacttcgaggagtgaatcgccacgaatttgattcagtaaaaggccgggcaggcatcacgcgcgaagacatgcttcacgacattttactgatgaaacagcataatattaacgccgtgcgtacatcccattatcctaacgattcagtatggtatgaactatgtgatgaatacggactgtacgttattgatgaaaccaatttagaaacgcacggaacgtggacttatttacaagaaggtgagcaaaaagctgttccaggaagcaagccagaatggaaagaaaacgtattagatcgctgtcgttccatgtacgaacgtgacaaaaaccacccttctatcattatttggtcgcttggaaacgaatcatttggcggagaaaactttcagcatatgtataccttttttaaagaaaaagattctacacgacttgttcattacgaaggaatcttccatcatcgtgactatgatgcttctgatatagaaagcacgatgtacgttaagccagcagatgtagagcgctatgcactaatgaatccgaaaaaaccttacattttgtgcgaatacagccatgcgatgggtaattcttgcggaaatctgtataaatactgggatctgtttgatcaatatccaatcttgcaaggaggttttatatgggactggaaagatcaagctcttcaaacaacagctgaagacggtacttcttacttagcttacggcggagattttggggatacgcctaacgatggcaacttctgcggaaacggcttaatctttgctgatgggacagctagcccaaaaattgcagaagtaaaaaaatgctatcagcccgtaaagtggacagcagtcgacgctgcaaaaggaaagtttgccgttcaaaacaaacacttgtttacaaacttgaacgcctatgattttgtttggactgttgaaaaaaacggtgaactcgttgaaaagcatgcgtctcttttaaatgtagctcctgatggtacagaagaactgacgctttcttatcctctttatgagcaagaaaatgaagctgatgaatttgttttaactctttctctcagattgtccaaagatacagcttgggcttcagctggatatgaagtggcatacgaacagtttgtactgcctgccaaaaccactgtaccttcagtaaaagctgctcattctgctttaaccgttgaccaaaatgaacaaacgcttacggttacaggaactaacttcacggctatttttgataagcgaaaaggacagtttatttcttacaactatgagcacaccgagctgcttgcgtcgggtttccgtccgaatttttggcgtgcagtaaccgataatgacctcgggaataaactgcatgaaagatgtcaaatgtggcgtcaagcaagcttagagcagcatgtgcaaaaaataagtgttcagccgcaaattgactttgttatcatttcggttgaactagctttagacaactctcttgcttcttgctatgtaacgtatacgctatataacgatggtgaaatgaagattgaacaatctttagcactttctgagacaatgcctgaaattcctgaaatcggcatgctgtttacgatgaatgcagcttttgattctttaacgtggtacggaagaggacctcatgaaaattattgggaccgtaaaactggcgctaagctggcccttcataaaggcagtgtaaaagagcaagttacaccgtatttacgccctcaagaatgcggaaataaaacggacgttcgatgggccactattacaaacgatcaaggacgcggctttttgataaaaggtttgccaacagtcgagctgaatgctttaccttactcgccttttgaattggaggcttacgatcatttttacaaattaccgtcaagcgattcagtaacagtgcgggttaactacaagcaaatgggcgttggcggagacgacagctggggagctaaaacacatcctgattacacactatatgctaaccgctcgtatacaaacacgtttatgttaaaacctctataaaagtaaaaaggactttcatttgaaagtcctttttacttttgatgtcacctctggctttcgctgagaaagtaaaaataccgtagcgataataagaatcgtacctaaccactccgtccatccaaaggtcacatgaagccatagaacagagagcgccgctgctgataaaggctctgctgacgcaagaacaatggcttcagaagcgctaatatgcttcaagctttccaaatagcaataaaatgcaatgagcgttccgaagatgattacaaataacaccgcacacagcgacaatagcgaccactcacctgctatatgccacggcgggtgaataaatgaaaaacttacgccgcctatcaccattccccagcctactacttcaattgagctccatttcgcaagaaggcgtttaggctgaagcgtataaaaagcagacgtcacagctgccccaatcccccaaaacagcgcccatcctgtaatagacagctcgttaaaatttccgcttgttgcaagaaaaaatgtccccgctataacgagcgcaacagaaatcatttctactttcaccggccactttcttgcttgcacggctaaatagccaataataaatattggcgacgtatattgaagcactgtagctgtagcagcgtttcctgcttcaatagctgcaaaatatgtatactgcacgccgagcataccgattacaccaaacaaaagcagcgaagtcctctcttcttttgttttccaaattgcaaaaatattgcgctgcttagaggctattgccaaaagcaataatccggatactaacatacgaacgacgaccagccattctgcgttaaaacttttatgctgaaataaatattgagccaccgtgccagatactccccacattgtggcaccaatgattacaagcagcagcccccatgctcttttagatgacgtttgaactccttccacttgccattccttctctcttatatatatatatatttaacttacctcgctcttctttaacggtcaatagcaaaaaaagtcgaagcaatatgcttcgacttttttaaatgcttttatgaagtaatttcttgagtaaaggaaatagcacatcgggaagttcttcgatgtttggtactaaaatactatatttcccgtacatattttgaatggttttcttttgtccttcatcaatttccccattggataaaaagacgttgatgacttcaattccgtgcttgcgtgcttctaataccgcttcgtgcgtatctacaataccattttgttcatatcccatagcggctggttcaccgtctgaaaacacaagtaaaaacttctgctgttcagaacgctgaagcaagcggcgtgtcatatggcgaatggcaaatccatcacggttgtcttcttcaggctcaagctgcataatttcaggaccgcttttacgctttaacgatgcttgaaagtccataaccgtctgcaggtagttaggctggctcgtttcggtggcatcatttgtatcttcccaaaaccctacaatttgatgaggcaccataacagactttaacgcttcatgaaatagcgtaatcccaagcttcgtttcatccattttgtcgtacattgatgcggaacaatcaactaaaagagaaaagacagcatcaatttgcgcagaatcttcatcttttttataaaacaatcgaggattgtcatctgtccatagttttagaagctttttatttaatcggccaaagtgcagctcgcttctaggaagggtttttttatgttcaagcgttttttcaatcatttgctttaatttcttttgatacgatgcaataatttttttattctcatcatactgaacaacatgatcgtcgttcggaagtttagaatctataaaaacagcataggcatgcttattttctttgccatactcataatccgcttccccgtctttttccggatgcgtttgctccatggcttcgatttgagaataatcgttccgcgatgttttttgagaagacccttgcaccatgcccattgcttgatctccatcgtcgccttcacgaacaccatcgcctagcatgtctgttttcgagccttgatccatatcaaactgtagaaaactttgcgtcgctttgcttgtctcacgatgccacatttccattttctcttcgtgaatgtcttcatctccgtctttttcatgctctaaaatatcatcgttcactaatgaatctttgcgttttaaatcttcaaatgttaacccttcttctaactgatcatactgaagttcagccaagaagaaataagtattaagcatatctttttcaataatatcatcaaaaacatctacaagttcaagacagatgcgcgatacatcttttgttgttttagcttcatatacatttgttagctgtctgcgaataaaaggcatcgctaaattaatcgattcactcattgaaggaatttcttcaaatggattttcggccgtcaatagcacgtagatgccgttaaaaagtgcatccgtatacacgctttttgttaaatttgcgctcatttgtgtagcaaaatattttctgtaaagctgccttctgacagcgaaggcttttttcgttccaggacgttcgcgtttgcatacttcttctaaacgaatatcttcaaacagcataaacagctgcttagctaagctaggtaccgaggttttatttattttctttaaatatgcattaatttctttgaagtttgattgcttatagcttccaatacttcttaaaaacacatcactttttaagccgtacactttgtcttcttctggacggttatcccaaaagtgactgagataaataatgccatgtacaggatcataataagaagaaacacgatactctacttcaatttcatcattttttgttaatgttttcgttaaatctgccagctccatatagagaaaggaatctacatttttgtcgttaaatttaataaatcgcatagcgccactccttactcaaataatgtttcagcaatattttgaatggcggctttttccctttcatcttctagcttttcaataataccgcgtttaatcgcgcgaagaggcggcatataaagagctaaatcacacgtatcgataagcgcacgaatagacgcagcttcttctgatacatggccgctttgaacttgagtaattaaatctgcagagagcgtgacaaatttatcaattaatttttcgtcttttaactgagactgagacatcagaacttgctttaagctgcctccttgaatatatggcacttcaataacaacaaaacgattttttaacgcttcgtttaatggaacagtaccaacatacccctcattaatagccgctactacgccgaacgtttgctgaccgcgtactacatctccagtgaatgggttcgtaatcattttccggtaatcaagaaccccgtttaaaataggaagcgtttcaggtttagccatgttaatttcatcaatatatagtaaatggccttttttcattgcctgaataacaggtccttccacaaactcaatacctgtttttccttcttgttcagcaattgttttaaaaccaagcagcgcttctgcatctaagtcaaccgagcagttaacgctatgcatcggctgagaaaataaatgcgacagcgtttcagccagctttgttttccctgaacctgttggcccttttaagagtacgtttttccctagtgacaaggcaataatggcatcttctaaaatatctgcttcttctgctgtatagccgccttttccaattaatagctgatcagcatctgacaaattttcatatttacgattcgctaaaagcgaaagaacctcttgtggtaatgataattgtgatagttgaattgacataacaaaaatcctttctttctgcatactttctatagtttactaaaaaacattcttcttctcaaagaattgctttacctacgctcttttctaagatttctgatagaaagattgcagtctttaaacatatattcagtaaaaaaaagtaggttattcacctacttttttacgattttatagtttttatgattaacgactgttttcatggattcgccggtttcagcatctttcccaaaatctacgataaccgaattgtctcgcactaccataacaattcctttaaatcctttatagtcgcctttttttggctgaatcgtatcgccaactttagctgctttgactttaggtgcttgttcttctgtaccttgtgtattttctacgtccatcatgaccccaccttttccaatttaccgtgttttttataagtgaaaacacaatttaatttactttttgttgaaaatacttagtttattttcccacaaacatccttggttaaacaccatgtgtttgtccatttttattttgcaaacaaacgctgtattttttattatgtatgtagctgttttttgtaagagcacatccttgttctatcataacattttctgtttccttcgaacaccaattaccctttagttttttaaaaaaatgacaaattacacggaattatgtcgaatttcatatggttttctttttaatatgataagctatatatcatattttaagcatcttttatctattacatacgatttttgataaaaaaacgaaacttttatccacaaattgcgttgattaaatgaaagggggagaaaatggcacaacagcataactttgaacacatttataaacagcacatgcatgatttgctgcgctatcttctctctcttactcgcagaaaagaatcagcggaagatttaatgcaggagaccttttaccgggcacttttacacttagaaacatataaaggcgaggaagtgaagccttggctgttcaaaattgcttatcatgcctttattgactggtatcgaaaagaaaaaaaacgccctactgtccaaatagaagaatggcactttactcctcagccaagtgctgaagaacaagtgatgattcaaagtgaaatcgacggctggctttctgatgtatctgctttgcctccggctaagcagaatattgtactactacgagattatcacggcttcacatatgaagagattgcagaaatgactggctatactctgtcaaaagtgaaaatggacttgtatcgtggtcgtcaacaactgaaaaaaagaaaggaagaggacggatgagctgtcaagatatgaagcatcaatgggaaaaatataaaaacggcactttgacagacaaagaagcagaaacacttgaagaacatacggaaaattgtgaagcatgctcagctcatttggagcacttgctaaccgaagatgaaccgttatcgccaacttcatcagctacttcactaagtgacgatacgatgttggataataaaaaagttaaaaagtccatttatatcgccaaatggaagcagcgcctttcaaatgtgacaactgtcattagttctgtcgttctgctatggataatcggcagctttttatctattgtatattatcatcaatcaaaaaccgaatacataaacagcgtgaatcaagcggctatcgaatctgcttttccgaacgttcatatacgtgaaaccacttctgatacacagtcctttttccgcatgcagtcgcaaatggaagcttataagcaaatcggacgtgaagagcaggccattgggacgtttacatttcatcagctgtttgataaaacaagcggtgtagaaaaagaattttccggcggcaaatacgaccttaacctttcttttgtctatcctgatgccaaaaaactaaagctacatgcaaaagagtataaggaatggacaaacgaaacatggaaagcgttagaaaatctaccaaaaggaacggtaagcgaagtggctatttcttttgatgatacgtattcgctaaaagaagttcagcaaaaaatgaacgccatcgacagccgtgatttttctacctcttggtacgcgcttaatacaggacacgaacaaaaaacaagcacaaaagatgagccattaattgacttaacgtcaacatttggctttccagagtttttagacttaccttacgatcacaaaggaaatcaaactcactctactagcaagtcgaacgttttaaacatgatgaaactattagccgataatgaagaaacggtccaaaaagttcgtcagctagaccattccgatctgttgctaaagcagcgatattcttatgtgaaaaaacatggcgtcggtgtgtacggcgtggtgattacagggcctacaaaaaaacttctgaaattaaaaaatgatccgtcgatcacatatgcgtcacttggagatgtagagctatggaattggttcaaccgcccttcatccggtacgctaatgaatcagtaacaagcacttgaaagcaagtgcttgttttttatttcttcgttaattcttcaaacctttttaccgcttcgcttttatcaaatgaactaaaccatcgatagtcttggtcatctaaaatgcgatagtgctgactaatcatattttgctgcagacgaaaagagccttctttctgaatttctttccaccatactcttcctccgagcgttttatcttttggagaagatacgccgttatgagcaatgatttctactacttctaaaggaacgtctcctaaaaccgattgaaggatttcactgtcaccaaacaaaccgcatactgcaacagtggtcgtccaccctgcttccgtgcgccctttttcaatttgaaccaatgttttttttgaaataccaatgacttcagccattctgtcttgtgaatagtttctttctaaacgaattaatcgtattttatccgatactgatttagtcacttcttgtttattcattttcacagccctttctttctatacacgcacatttctttagtgtaatattacacctaattaaagaagagtttcaagcgtttcccttcgtcacaagacggggaaatatactgaaagggtttttgtacactaaaacaattaaaaggagttgagaatatgtatatcattgtatgggctatgcttgtactatacgccttgctgctagctccgggagcaagcgccgctaatgatttgctgtttaaaaaccttatcacaggaaatttccaacaggtagatccgctcgtggttatggtattctcttttttaggacttttcccagtattgtttatggtaatgatctgtaaaaagatacatacaaactgcctggatggccattttctcttctatcatttgcgctcggagctttttctcttttgttctattatcattggaaaggacaaaaagttcgaacacgttcgcgtatttcttcacgtttcattgctatcatttcttctcgtctatggattggactatgcttagcgctcacgtttgcaggttacgtatacggactatccgtaggttcaataaaagcttatagagatgcttttatgcagtcacagcttgttagcgtgatgaccgctgatttttttgttttgacgtggctttcttactccgttatggcaaaagaaaggatagcatcccggccttaccttcttttatgtttcattccagttgcgggcccttttcttattttgttactgcttccccgccaagatgttagagaagaaaaactttaaataaaagtcttgcgttccattcattattccgttataatcatttcttgtacgatgaaagttgattaattagaaaacatttatatatcggcatcttatttacatttgttatacatacctgcgctgtgcgtatactcatgttgtcttaaacctttgagtgttaaaagggagctcaaaatttagctgcagatagcacgcccttcctgggacgctaaacccggctatgagggcacccacctagtagatctgggtatttaagacacttagggttacggcagtgcgggcttattttttagttagctgtagctagctttttttatttttcattttactagtttacataattattttattgttaacttatattttttttagacatgtatgttttatttatcttcgattgaggaacataaaaagtaataaaggagatggataaaatgaatgaacaaaaaattgctaaaaaagtaaacgaagtattagaaggaaatcgtgtaggaacattagctacagttgtaaacaacaaaccccactctcgctatatgacattctttagcgatgaagatggtatcgctctttacacaccaacaaatatcaatacacataaggcagaagaaatcgaagccaatccgaacgtgcacgtactattgggctacagcggcgaaggatatggggatcaatacttagaattatctggtacagctgttcttcgtactggtgatcaattaaaaggtcgtatatggaacgatcacatgaaagaatggtttgacggtcccaatgaccctgagtatgttgttcttgaaattacgccgaacgaaattcgcttcatgaacgaaggcgaagaaactcctcaaactgttcaactataataaaaaagcgcacagtgtgcgctttttttatttttctaccgcttctttcaattgagctgctttttcttttggagacgctgctaagctaatcgcggtaataatagaaacgccatctgcacctgcctctactacttgtttggcattttcaggcgtgatgccaccgattcctacaattggaaagtcaatattctggtttcgcacttcttcaattaattttgtaccttgcactgcttttgcgtctttttttgtagaagtaggaaaaacaggtcccattcctacataatccgctccgtcttttatcgcttgctgcagctcttgtacattatgaacagagacgcccacaattccttttcctatcttctctcgaacaatatgagctttttcatcttcttgtccaatatgaacgccatctgcttgtaagcggatcgctaagtcaagatcatcattcacaacaaaaggaacgctgtgctgctgacaaatttgctgaagttccttcgccagctgatatttcgcttctcctgttaaggcaccctcgcctttttcacggaattgaaacacggtaacgccaccttcaattgcttctttcaacacttctttcggatcttttttacagttattgctgcccattataaaataaacttgcagcagctttttgatttcttcgtttgtcattttccggctccttttaacgttgatgtactcttgcatatgattcaatatcctgccctgataaaagatgaagctggtttaacagctcaatttgaaagcttcccggcccttcttcaccttttttcgctgcggcgatctcacctgccactccgtaaaaacttaaagcagcaacgcttgcctcgacatattctttttctacagcagcgaaagctcctataattgatgtcagcagacatccagtacccgtcactttcgtaaataacgggtgaccgttgtctactgtatacgttgtgtttccatctgtgattacatcttgtttacccgtgataacaatcactgtatctaatttgttcgctgctttctcagcaagttcaaggacgtccccttgcccttctaatgaatcaacgcctttgatgagccatgactcgcctactacattcgcaacttcagcagcgttaccacgaataactgcaatatttaattcttctacaagctgacgtgctacttctgtacgaaacggtgtcgctccggctcctacaggatcgaaaataaccggcacgccattttcatttgctgattttcctgctattctcatcgcttctacttcttgagccgtcagtgtacccatatttaaaacaagcgctccggcgattcgtgccatgtcagccacttcttccttcgcataagccataacaggtgaagctcctagtgcaagcagtccatttgcagtaaaattggttaccacaacattcgtaatattatgaacaagcggacttgtatctcttactttttctaattgagctgaaattttactaatatccatattctctcactcttttcatttagttttaacactgcaaaaaaaagacaaaaaagcaccttgcatgcgcaaagtgctttggtatgtactcacattccctgcgctggcattatccaacaggttcaaatggtcaacaggcgtccctgtactctcagcctgccccgcgcaagctcccatactattcttgttacgtttaaagtttactattaaccttttttatttgcaaccatttcactgttttgccgataaaataaagcttctctataggctgagtggcgttgtgaaccttacacatttcctaaaagaataatcaaaacacctctagtaagctactagaggtcttctattccctaagaattctatcattttttccttatggttatttctcttgaaccgcttgatttctcacagctgtttttctgtccttccctgctcttaaagataaaagaaaacaaagcagcagtacaagtgcagctgatacgtacgggtaattaatgtttatatcaaagagaaagcctgccacaacgggtccaataatattcccaagacttgtataagcagaatttagtccggctacatacccttggtcgtcttgtgccatcatcgacatttgcgtgctgattgccggacgtaaaatatctgttgctaaaaagacgatgaatgtcacaacaataataagccagtatgtgtgcacaaatagcgtaagtaaaataaaaagccccgtcatcatcaagcaaaacgaaatcactcttttttcaccaaacttatttaaaatccagccaaaaatcgtaacctgcactacagcccccgcaatagagccaaacgtaataacaaacgcaatatcttttggcgtaaagctaaatttatgatcaacaaatagtgaaaaaatcgtttcataattggataatccaaatgatgtcacaaaaacaataattaaacttaaaaaataaggttctttataggaattcataagctgcagtagcagcccctcttcttttggattctcattgtttgaaacagcatgattttgtacaggacgagactctggcaaaacaaaaagcgtaatcacagcagccaagcctcctgctactgcggccatataaaatggtacacgcatgccatattcagctaaaaagccgccaataccgggtccaataataaatcctgttgtaatcgccgccgtcacatagcccattcctttagcacgttctttagcagacgtcacgtccgctgtataggccataacagcaggcataataagcgcggccccgaccccgcctaacattctcgatacaaataataaaagaggtgtactcactgaaccaaagaaccattcagacaaggcaaaaacaatcattcccgctacaataattttctttctccctaacgaatctgataaccgccccgctaaaggtgaaaacagaaattgagttagtgaaaacaccgctactaaaagccccatcacgctgccgttgatatgaagctctgtcatatatgttggcataattggaataacaagaccgattcctgtaaaaataataaaaatatttagcatgagcagcaaaatcgccgctcgatttcttaacaataatgacatataaacctcctgattacaaaaatactgaacgttcggtctataaaaatacaaaataatgagggattactcattaccgcaataagcatccccgattatttaagaagaccttgctataattccgtttaaaaatacatcgatcgctgaatggtaaagctgcagggcattttccgtgttcgtttttcgagacatgcggctcattccaacaaacagcccttctaaaactactgcaagctgttctgcatttttaggagaaaactctccttcatcaatgcctttttgcaaaagttcccggttaaactccacgtgtcgtttcaccatctcatcaattcgctcttcgatgtcgctgcccttttcctcgttgttaaaaaactcatcggcggctttcgtaagaggatgattcaaatcatctaaaatgatttgctccgcaattccaaaaagcttatctcttgttgttttgtaaagagactctctttctttccagtttcgttcccactcaagatcccattcgtctattaaatagagaaaaagcccttctttgcttttaaaatgataataaatattccctttactgcttcccgtagcttctacaatttcctcaatagatgtagctttatagcctttttgagaaaacaatgctttagcggcatctgccacttttctttttgtttgttcactttgaagcttttttttattcaagctatttccaccgccccgcacatttattatttatactgaacattcgttttgtattatctgacacctatactacataggaaaaacctttttgtctagtgagaaaacctagtttatacctttttatatgaattaggacaaaacaaaaaacaaagaggttgagacatacaccataaccatgaaaaaatccgaacgagtttgattctccatcaagaatctcgattcctcgttcagattttccttcaactaaaatacttttgtcccatcctcttttaatcattcaatttctttgtcataaatacactgtatggatcttttttgtaggtagaaaacggttcgcactcgtaaaatccaaaactggcgtatagctttctagccggtttaaaagcagacgcggatcctgtttctaagcttaagcgtcggtaccctcgtttttgtgcttcatttattatgtactgcagcagctctttagcaattcctttccgcaaatgggcggtagctgttcgcatcgatttaatttctccgtggtgctcatctaactcttttatagccccgcaccctgctagctggctgtcttcccacacgctccaaaacgtaatatcacgttgttttaagctttcaatatttagagcatgaatactttcagggggtgaatgtaagttcattccttgaaggtgagaacttactagttcaataacttcattgttcgttaagtggtctcttgttattttaatcattttctcttccttcctgctactaaggggtgctcaactacaaaccgacttatgaataaattcactgccgacctttaaaaatccttttatacactcccttctttttctccagttattaaaaccgactttgccaagcagatgtttcatacattgttaaacggaggtgaaattcattgaagaaggttttattttgtcttgtccctcttttgtttttattatccgcctgctttagtgatcctgttcaagatgatttaatcgactataacaatcaagatttaaaaaaagccgctcagcttgaaaaagaagcgattgacgcatacgattctgtcacaggcgctaactacacaagtgacgcggtgatgtatgatacgatgacgagtgaagtcattcctacttatcgtaaatttgttgacgaactggaaaacattgatgtagaaaccgacgatcttcgaaaggttcatgaaggctatataaaggctgccaatacccagtataacgcttttattaaaattgtcagcgctttagaaaagcaggaccgcaaccttattgctgaggcaaacgctatgcttgatgaagcacgaaaaggcatacgcgattacaatgcagctattaaaaagctggctaaagaacatgatgtaaaaattgaggaaccacaaacactgcgagaaaacagcctatagttttgatgcgaaaagaaggtctctaaaaatagtaagagaccttctttcgtatgccgtttcaatttctccacgttcattcgataaatgaagaagagtattaggaaatattgcttaacgatgcataataagaagcaataatttcttcatcagaatgcggaatttcgttgccttttacaagctgagcgccgttaatacagccgcttgtaagtaaaataatatcattcggctttcctaaagaaagcgactttaatactccttctattcgagtaggggcgcggtgaatattagttgcgcttggatttgaaaaacccgtcattacttgatctacaattacgttcggatcatgatgacctggatgatcaaccgttacgacaatttcatcagcttttccttcaatgacacacgccattttaggcattttattaaaatctcgaatgccgattcctgcaatcatgacaattagctggttatactccatcttttttacttcttctactaaacgcgtaagggcaacaggcgtatgggcatagtctaaaatcactttttggttattgggaccttctatcacttgaaagcgcccttctggactttccaattgaggaagcacgctaataatatcctcaatgtggtattcaaagtgaagagctgtaccaatggctgctagcacgttagcaatgttgtaatcgccatatacaggcactgctactttgtatgactgtcctttatacagtaaatcaaagaaagagcccccttctttgacagtaatgttttttgcttgcagagttgcctccacattatttaatatgctatacgtgactttaggtccttcaaatagcctgcttaagtctttacccatgtcctgatcatctatattaataacggcatgttttgcctgctgaaataatttcatcttgcattttttatagtgctcaaacgttttatgatactctaaatgctcttccgataagtttgtatgaatggctacatcaaaataaatattttctactcgctgctgatcaatcgcaattgaagatacttccatcactgccgcttcatcgcctcttgtatacaaatcataaaaaactttatgcaagtctaccgattcaggtgttgtaggcgtactttttttataaactaacttcttctttgatgaccaaatgccggtcgttccaatcgatcctgtcggcaattttaaaagagttaaaagcgaccttacgtaagctgctacggttgttttaccatttgtacctgtaacgccaattgtctcaattttttcatccgtataatcaaaatacattttagaaaaagacgccattactttacgaacgtcgtcaacagctaaaaacgtacagtgagaatactgagtgctcaagagacgcagctcctcaatgcttgtcccaaagactgctacggctcctctagctatagcttctttaatatattgatgtccatcttcattttcaccttttatactaaaaaatactgatccgtcgtgaacctgctttgaatgatatgttagatggttgatcgtttgagatgcaggcccaaaaatatgtttaattgataagttcattaatgtattaaagtggatgttcatagctattcctcacagtgtataaattttaattttaatatgttctaaaatcccttaaatactcttggaaggatattatttctttatttccatttataaagaactttctacaattcaatctttttattttgctttcgtgtgtagaatgaaaataaagaaaaggcggatcactattttttaaaactaaaagcatgtaaactatggatgaactgtgtatatcataacagcagtaaaagcgaagtattgtagtaaaacattccccctacacgtccaaaacgaaaccattctttaaaataaaataatttcatagagtgagttgaatcatgataaatacttgaatgtgggataagaaagattactgtattaatcagtccctccctttgcaaaataataaagaaaacatcataataaaaggtgcgcataacagcgtgaatgactctgttttgaaaggatggactacagcaaatgacgcgttctcttttagcgattgaaccacttcctcttttattttatcaacagcctacacttgaattagctcagtcgctgttaggatgccttcttgttcacgaaacggcagaaggaactgcatctgggtttattgtagaaacagaggcttataaagggcctttcgaccgagcagctcatagttttaataaccggcgcacaaaaagaacggaggtaatgttcggtcctcctggtcatgcctatacgcatacaatgcatacacattgtttactcaatgttgtaagcagcgacatcgattgtccagaaggcgtcctcattcgagctattgagccttttagcggaaaaaatttcatgaaaaatagacgtagagggatggaaaacgaaacaaattggacaaacggtcctgggaaactaacaaaagcactaggggtttcaatggatttgtacggtcatgatttaaccagccctcctctttatattgctcgtggcttcactccttcagagatttccgccggacctcgcgttggcattgataattctggtgaggcgaaggattacccttggcgcttttgggttaccaatcacccgtttgtatcgaaattcaggtgaacaaaaggcgaattgatttattaacgaaaataaaagaagcacctctttttagagatgcttctttttgcttacgcccaccacatttgtgagggagtttcttcaattaatacactttgtaagtttgtaaccgcgcgtttaaatccttcttcaatcgacatgattggatcttcgtgctcaatgctgactacataatcgtatccgtatgtgcgaagtgcactcatcatatcagaccactcttttacatcatgtccgcaccctacggatctaaacgtccatgcacgcgtttggacttctccgtatggctgcatatccgtcaggccatacatgttaatattatcctggtccaagtacgtatcctttgcatggaaatgatgaatcgcattttcttttgctaaaattttaatagctcctaccggatcaattccttgccaccataaatgacttggatcaaggttagcaccaatcgctggacttgttttttcgcgaagctttaggatcgtatacggagtatgaactaaaaatccgccgtgaagttctaaaccaatttttacattatgctcctccgctagttctccaatctctttccaataaggaacaagcttattttcccattgccaattcaatacgtctccatactcgttaggccaaggagtaacaggccagtttgggtacttggcttcttcgtgatctcctgctgttccagagaaacagttaaccactggaacatctactaatgatgctagttgaatggtcttgcgaagcgtttcgtcagattcttttgcaaaacttgcctcaggtgaaataggattgccgtggcagctaaatgcgctgattgtaagtccgcggtcttttatctgcttcatataggcttctcttttttcttcatcttcaagcagctcatctagcggacaatggctgtttcccggatagccgcccgttccgatttcaacagcataaagacctgctgcttttactttatctaacatctcttcaaaagaaagatccgcaaataagaccgtgaatactccaagtttcattttaatttccccctgtgcgatatatttcgtcaataatagctgagacttgaagcgcttcttgtggctttaccactaattcagcatttcgtttacacgcttcaacgaaatttttagcctgacttaggctgtaatcatcttctccatctatccaaggtgacgtactgttcatgagcataccgtttttagacgtgtatagttcaaacggaaacacgcttaaaccgccctctacccctgatatgcttacgtgctcttcatcatcttcgatattagctgcccaagaagtttctaaaagaagcgacgctccattttcaaatttaatataggccgttacatgatcatccacgctgaatgtttcatgatcaaatgctccccattgatttaattggttaggcgttttactcaggtcattatatgtacttcccagcacttcagtatgctttgggtttcccatcagccaaagcgttaaatcaagcaaatggcagccgtaatcaattaagctgcctcctccttgaagatctttgttcgtaaataccccccaaccgggaacctttcggcgacgcattgctctgacacgtgcaactaatgggcgccctacctctgtcatcatttttttcgcagcctgcgcttctttcatgaatcggtaatgatacgcaatcgctaactgcttacctgattctctagcagcagcaagcatttcttcaccttgctctttagacatcgccattggcttttcacataggacgtgaacgcctgcttttaacgcttctactgcaaactcggcgtgaaatttatttggtgtacaaatacatacagcatccacttctttaaacatatctttgtaatcaacaaatacgtgagggatattatgctcattggctacctctgtggctctttcactattaatatcgctaagcccccaaatcacacattcatcacccagttgtttgaatgctgggatatgcctgcttacagcaatcccccctgctccgattatgccaattctcacgtttttcacctcttacacgcgcgtaatttgtttcgtttgacttgattttaaagctgctaaaataacagcaagtgattttaatccttcttcaccaggaacaggagattctttatcttctgcaactgcatctacaaattgttcaatgacgtgagaattactttgtccgccttcatcgttcgactggattttccctaattcatagttcaccacttcacccgttgcatattgtgcaactaatgaatacgtcggatcgtcctctaaacgaagaatccctttctctccgtaaacaatcgtggagttatcttcttttccattgtaagcccagcttgccgcaagcgtcccgataatcccgctttccgtttttaatacgcacacagcattgtcgtctacatttgcaaagtcttttgcattgctttctacaaatgcacccacttctacaatttcttcattcaatatgtagcgtagcatatcggttttatgaacgcctaaatcccccatagccccaataaacgcttcgtcttttttgaagaaccagctgtcttttccgtccacgctccaaccttcagggccaccatggccaaaagccgtacggaaactataaattttaccgatttcccctttttcaataagttcacgagctttttgatgagaagctacaaagcgctgattatgtccgatcattagttttttaccgtttatttttgctgcttcaatcattgctttcgcttcttcttctgatgttgccatcggcttttcacataggacatgaactccgctgtttaacgccgcaaccgaaataggcgcatgaagataattgggcgtacatacgctcactgcttccactgtactgcttgctaaaagttcttcatagtttgtgtaagcttttacaccgtactgctgtgctacgctgtttgcacgttctgtgtttatatcgcaaacggctactaattctacttgttcattcatcttatattctggtaagtgacggtgttgcgcaatgcttccgcacccaataacgccaatttttacttttgccatctttcctatcccctttgcttaagcattattaattagtttttaacagcgattgattcaagcggttgcgcattgccgtaaacaggacgttttctctctgctggcttcgcccatttaatagcattcataatgacacgctgaatgtctttgttatggtatgttggatatgtttcatgtccaggtctgaaataaaatacttttccgtttccgcgtttgtacgtgcagccgcttctgaaaatttctccgccttcaaaccagctcgtgaaaatcagttcatcaggtgctggaatatcaaagtgctctccatacatttcttcgcgctcaagctcgataaattcaccaataccttccacaatcggatgacttggttctactacccacaagcgctctttttcatctgcttcacgccattttaagtcgcagcttgtgcccattaacgttttaaaaattttagaaaagtgacctgagtgtaagacaataagccccataccgtctagcacgcgctgctttactttctcaacgatgtcatcttttacttcgtcatgtgctaaatgaccccaccatactaaaacatccgtttgatttaatacttcttcagtcaacccgtgttctacttcgtctaatgttgcggtgtgtgtacgaaaccctccttcttctaaaaaagaagcgatggcaccgtgaatgccttcagggtaaatttctcttacaaccggatttttctgttcatgacgattttcattccatactgtaacattaatcattttcatatcccctttttttgtgaatgctaacatatatccccttttttataaatactaaactttggttaaccggttaacttactctgattcacccgcgcctagcagtcgaatctcgaataataagttcaaccgataatttcacatgctgcagcgtgctgaaacggtgttcaattgcttgaataacagacgtcgcggcgacgactcctttgttaaatacatcttgacgaattgttgttagacttggagatgcatagctactaaacgttatgtcatcaaaccctacgattgagtagtcctgcggaatttttttccccttttcttgcagtgctttcataattccaagcgccagcgtatcagaggatgcaaaaaccgcccgaatatccttatgatcttgcagcagcttgttccctaaattgtaaccgttatcaaacgaactttcgttcacttcaaaaacaaacgtctttgatggtgtaatgcccgcttcttttaatgctttctcgtagcctatatacctctttttatccactggactattgacgaggtgatgagcaacaaaggcaatttctttgtgacccaaattcactaaatgtgttgtagctagatatcctccatactcatcgtctacagaaatatgatgataatcacgttcgtacctttcgtatgtatctactagcacaatcggattcgataacgctttcattttctcatacaatcgatgcgggaaggctcctaaaaacagaagaccatcaatatttctcgttcgaatccattttaggcaatcagctgggctactcgctccagatatgactagatcataaccatgcttacggattacatattcaattccactaatcatttcgctgtaataatggttatctttaaatatagtagaaagtgaatcatctgtaagcgggaacataacgccaatcatatttgacttttgtttcgaaagactaacggcggttaaatttggttcgtagtttaattcttttaccgctgttaaaattcgctcttttgtttcatcggatactttgttaattccgtttaagacgtaagatactgaagctgcagacacccctgcatgctttgctacatcacgaatcgttatcttttctcccataaaatctctccagttaaacggttaactatttactcgttcattataattcactcctttactatcagtcaacgtatttttcaaattatctgttaactattataatatcttcctagattggtatgttttaagcagtgacaagatgtattgacacctgttaatctttgaaacgtacatataaagttcggtgcacagcacgcaccgatccgtgataaaaggggcgttcaaaaggatttcaggaggtacttactttatgtttaagaaactagcaattattggaacactagcagttcctatgttcggcatgagtcacggggcaaatgccgctgaaacaacccatcgcgtaaaagccggagagactctttacaagattggcgctgaatacggcgttacggttaaacagttgaaagaagcgaatcacaaatctaccgactctattaatgcaaatgaaacattaacaatccctaactctattagcgaaagtgataaagaattgttagctcgccttgtacaagctgaagcaaaaggcgaaccttacgctggcaaagtggctgtagcaacagttgtcttaaaccgcgtggatagcgattctttcccaaactctattcatgatgtcatttatcaaggtacacagtttacacctgtacaaaacggtgaaattaataaagcagcggatgctgaagcaaaaaaagctgtaaatgaagcactagcttttagaggtcaaggaaaagggtcgttattcttctttaatccagataaaacaagcgaccaatggcttcgtcaaaaacaggttacgattacgattggaaatcacgtttttgcaaaataaacaaaaaaagcactcagatgagtgctttttttaatatgcaacaagtaagcttaatagaacagctataataataataggcaatacgtatttaactagaaagaaccatgcgttgaataatttagcgccttttgtacttcctgaaataaactcttcatacacggcttcttttttcattttaaatgtcacaaaaatcgcaatggctaaacttccaagaggcagcattaagttgctcacaaaaaagtcagctacgtcaaatatacttctgccaaaaagtgagacatgttttagtacaccaaacgaaagcgctgatgggatacctactacaaacacaagaatccctgataaagaagcgtagcgagttcgttttgtctgatcgtctttggttaaagcagctacgataatttccagcagtgagaaagcagacgtaagcgtagcaaatagaaataaaagtaaaaacagtgctaaaaagacggtaccaaacggcattttctcaaatactgttggcaagaccacaaacaaaagtccaggtccttcagttggctttaatccaaatgaaaaaacggctggaaaaatagccaagcccgccagcagggaaacaaacaagttcaaaatagcaatggtgccagctgaacgcgtcaagcttacttttttccctaaataagagctatatgtcaccatgcaggataatcccacgcaaagcgagaaaaacgactgaccgagcgcatagagaacagatgaccctgtaatggctgaaaaatccggttttaaaaagaactttactccgtccattgctccgtctaatgttaaagaacgcaccacgataatgataaaacagataaataacagcggcatcatgtatttattagcacgctctattcctttttgtacgccctttgaaataacaaacactgtaattaataaaaacagcgcctgtgcacctaatactacataaggttggctaatgacggcattgaacaacgggccgtactcttttccgtttagcataccggttacgctcataatcgtatataaaatcacccagccgccaacgacgctgtaaaaggaaagcaaaacgacacagcttagtactcccagcctgccaatccatacccaagcggattttggagcaattgccttataagcactaattgcttcttttcccgtatgtcttccaatgataaattctgccaacagaagcggcaatccaataaaaatcgtaaataaaataaacaacgcaaaaaacgctccaccgccactggttcccgttacgtatggaaacttccatatcgctcctagaccaattgctgccccagcagatgctaaaataaaaccgaggcgtgaagaccactgatttcctttactcatataatgttactctctcctcttctaaactcaaaactcacctgattagtactgtaccataaatgcagaagaaaatcattcccgttttacttttttctataaaacgatatctatatagaatagaaaaaatgaagaagcagctgcttcttcattttaaggttggtgtttctattcaaaatttattctctgtacgatgattcatctccacggtaggcttcttgatttgaaatttcttcaatatgcatatgcccttctctctctaaacgaaggaccgtacgctctgcatcctcataactctcgcacgtcacttgtttatactccatatcatctttatctgtgtaagcaactaaatatgtttccattttaactcctcctatataacctgtatgtaacgtatgttgcctttttcgtttatttctaaacatataggctccaaacataaagcctagcatactataatagcggaacttcaatttaaaaaagttgaatttttcattatgcaccgatgcaacatggaggttacacttatgacatttattttatcattcgtaccaattgttgttccttttggtattttaattagcttaattgcttttacagctgcttttttacaatcaaaagagcatcataaaaagctctagcttacaaaagctagagcttctttttaaaaacgtctatagcgtttaatcagtcccacaataatggcaattgctaataaaacaaccgaaatgatgacagtaatgacaattggctgatttccactttgcttcactgcaatggcaatataagcccaaataaaaacaagcggataaacagcgtctcgtttttttaatgtaaacataatgcccagcgcagctcctaccagcagcataataatcgtccatgctaactcgtttaggccaagcaagtgctgtattccatttgcttgaaatacgacaaacacattgacaatagtcgcaacagaaatccatccaagataaagcgaaatcggcagacgcataaaccatgtcgtcatccgagaatgctgaataatggaatatacaatcattaatgtgcctaaaataaagagcataactaaaagggataacttatagtaatcgttttggaaaataaagatccacgcactatttaacaaacagtttagaaaaaaccaaatgccgatacgtacatatatttccttttgatcttctcttgcaaaaaattggcgtataacccaaatggttaataacaaataaataacgccccagatagcaaaggcataacccgctggtgtaaacaacgtaggaacttgcgcagaagcctctgccgttgttttgcctcctattggaatggcatttgctaaataattcacaagcagtgtaatagccaagcatactgtatttaatacagcatacaaacgaaatttcgccattttgttctctcctttcttctatttatatgggaatgtttcggagacgaaaacggctcttcccttcattaatacctcttcttccctaaaaatatgcgtttttaaacaaaaatgattaaaaatagctttaagaagcttcctctttaagaaataaaaacggttagggcacattttcctataacgctttctatttttcagaatatatggtaagttaaacatagattaataggaagtccactaggggtgcccaccggctgagacaagttttcttgatccctttgaacctgatctggctcataccagcgtaggaaagtggcaatgttcagttttttactgtcctttgccactccgtttataaacggagtgttttttatttcctttatgtgcttgtttgtgacttcctcataattaaaggaggattttgatgtcattttcatctcaattaagacaagaagcaaactatatttacgaagccatttttaaccatccttttattaaaggaattgctgaaggaaacgtgccaaaagaagcgcttattcattacgtttctcaagattacgaatacttaacagcatttgttcgcatttacggcgctgctttaacgaaatgccgcacgcgtaccgaaatggaagcctttaatgccggcatttctacggtattacatagtgaagtacaccctcacaataatttttgtgaagtagcaggcgtacgttatgaagaccttcacactgaggcgctttcaccgacggccagtcactacattaaccatatgacaagtgttgcgcatacaggcagcttagcggaaattattgcagtacttcttccatgtccatggacgtacgttgaaattggccagcgcattacagaacaagtaaatccatctccttctcatcctttttatgaatggattcagttttataataatgaagaaatgaatggcacaacacaatggttttgtaacaagcttgatgaactcgccgaacaagcgactgaagaagaacgtaaccgtatgaaagatcacttcatcaaaagctgtgaactcgagtatttattttgggaaatggcatatacccaagaaaaatggccgctttctcagctttccctttcaaaataacgaaaaagcctcctatcaggaggctcttttatttcaataattttttgatcattttcaagttttgtttttccgaaggatagcggaatgacaaatcaaacttggttgtttgagacagcatgcttttaaaatgagtaaatgtctgaaagctgtcttttccatgatattgacccgtgccgctttctcccactccgccaaacggcaaatatggcgtagcgatatgcataagcgtatcgtttatacagcctcctccaaatgaaagacgctccgttatgatgttttgcacatcttcactttctgtaaataagtaaagagctaacggcttagctttttcttgaactttatgaatgacttcgtctagtgtttcatattcaatcataggaagaataggcccaaagatttcttcttgcatgacctctgatgtccagcttacttcacttaacaccgtaggttctattgttagcgtgtttttattgtacccgcctccaactatagcatttccgtcttttaaaaactcaactagccgagtaaaatggcgctcactgacaatacggccgtagcggtcgctttcaagcggattactaccgtaaaattgagaaatcgcttcggaaagtttctctaccagctgcgcttttacttttttatggacgagcaaataatcaggagcaacgcacgtttgccctgcattcattcctttgccaaacataattcgttttgctgcaagatctagatttgcatcttcatgtacaatgcacggacttttcccgcctagctcaagcgtgactggaataagctgcttccctgcttcttgcataataattttccctacatttacacttcccgtaaagaaaatataatcaagcggctgttttaaaagcaggcttgttgtgtctacagcgccttcaatcaccgtcacaaatgctggatcaaaagcctcagctagtaattcttgtataacgcgagatacgctaggcgttaattcagaaggttttataatcgccgtgtttccagcggcaatcgctcctactaaaggagacagtgctaattgaaatggatagttccacggagcaataattaacgcgactccatacggttcaggaacaattttccctttagatcccaggtgtgttaaagcggtttttacttttttaggcttcatccattttgctaaatgtttaagcgtaaatcgaatttcctctagtaaaatcccaatttccgacgtgtaggcctctacttcagatttatttaaatcttgttttaaagcatccataattctctgctcgttttgtttgactgcgtctcttagcttattcagggcttgaatacggctgttgatactctttgtcttttgcgcatggaaatactgcttttgtgtagagacaatatgttcaatgaccgtttcatctgtgatatagaatcgctcgtggttcatctcattcatctccctacaaacattcggcttcaactgtagcaagcaatctttttaatagctcaactgcctcacttaaagctagtgaataatatctctgcgtccctttttgctcaatttgcacaagcttttgatcgcgtaaaatttttaaatgatgagaaattgccggtcgtgatagagtagactcgtttgcaatttcattaacggttaaaggctctttttcggcgagcagcaaaataatatcttgtcttgctgaatcacttagagcctgaaaaataggaatgctggcacgaaataactcgactgctttttcactcatatagattctcctttatttaatttcttgtgttcttcggacaacggatgtaagccactttcttggcacgaagcgcgggatgaacgtagcaagacgaaactgtactcctggtacgataaccgtctgccctttcataaattttttatagccaactttcgttactgtttctacatccattgcaccgctttgaaaaagcttggagttgcttagctgggctcggtcgctaaaaccagttttagttggacccgggcatagagcacttaccgttacattggtacctcttaattcattttcaagagcctctgtgaaagataacacgtacgctttcgttgcgtaatataccgtcataagtggacctggcataaatgcagcaacagatgcaatgtttaaaattttcccgcgatttcttttgaccatatccggtaaaaataattttgttaaatgagttaatgctcgaatatttaaatcaatcatgtttaactcttcctctaaagctgtttcaataaatttgccgtatagtccaaaaccagcattgttcactaaataatcaacgtgcatttttttatttttaagttcttcatataatgactgtatctcttcttctcttgataaatccttaacaaccgttactacgtcaatattataagtagattttaaattctctccaatagctgttagtttatcagcgcttctggcaactaaaattacaggacgcccatcctttgcgaattgataagctaactctttacctattcctcccgacgcaccggtgatgagcgcataatgctgtgacatagtgttcactccttatgtttatatgttcaagaacttaaacatttaaacttatcttataggattcattttttcccgtcaactgttttctatactctccttttcttttgtgttttccattttttccatgtgcgcatttctgtacatttttttacaaaatatgcgttttctttacatagaaggctaatgtcgtctagttttgacaacctttgtcacctagcaggaaaacaagtgaagatatggtgaatacaacatacaacaaataatccattacatagttggataaaaatagataagggaggaaatgaaaaatgatggagacatatacaattaaaaaagtaagtgatcaattagaggtagaaaagaaaacgctaaaacaatgggaaaaattattgggcagctatttaacaattgaacgagtagatggggcccgtgtctatacagaggaacaaattgaattatttaatgatattaaacagctgtttgatgaacaatgtacgttagatgaagtcaaagaatacgttcagctgctgataaaggaacaagaagaacaggagcatttagtgatggaatcagaggcagcggtttcaaaagaagaagaaccggcacagctgaaaactgctaaaaaagaaaacgtcattgattttcaagaacattccaataaacaaatgaagcaagaaaagaaaaaaactgttgaaaagcaggaaagcatttcagaaaataagcaagagaagacccctcctatacctgaagcacgattagctactgaagaagaaaagcaggctatttctgcttctattgaagagccaaaaccaaacgaccttgttgtgaatgaaaaagaactgcttcaaggggaattagtagaagctgttcgccgctatgaagatgtgtttgaggtacttgatacatttaaagctgatttgttaaaagaaatgcgagaaggtatgcgaaatgaagttcgcgaagaaattgtcggagaagtaaaaagagagcttgaaaaaagtgctacccaaactgtagaaatggtggagtcggtcggggcatacatctctgagtcttcagaacgcagcgcaagagatgtagaaaatatgtctaaaaaaattatccgttctaacgaaaaatcgtttgatgaagtcacttctttgattgaagattattcaacaatcgctgaagagaaaaccgaggatatgcgcctgttcatgaaagatgtcatggagaatgcggatgaatcctctaaagaaatgcagtatttattagaccgattctcaagcaactccaccgttgcgatgaatcaagtaaaatttatggttgaaaaattaaacaattcttcaactaatacaacagaagagcttcgtgatttaattgattcaatgaatgaggaacgagtctattatttaaaagaaatggagaaagaacgtaagcttcatcgtcaaagcgtagctgaacgcgaagagatgtttagtgattttgtccaaacctttagacaaaccgccgctgctgatatgaagcgaaaacggaagtggtggaagctgtttctctcctgaaaacaccggccctatggtaatggggccggtgtttttaatggtatgaacgatagtagtttgtatgtaagcaatgttaaggtaacgtatggcggtgagacgttatactttgaaacacatgatagccgcttaccgatacgcctatagttcctgctcccggaaacactgtatctccgcataaccacagtccttgtaagccagatcgatgcgaaacactgttaaacaaggcatgctctaacgtttgcggaaatcctcccactccgccgtttggacgagaagtaaatctttcccacgctttaggagcccctgaaatttgatgctctgctttttcaatgctaggaataattgttttaatgcctgctatcatttttttctcaagaacttgtttttgaagatcataggtttctttggtactccactcgctaagctcaatgtgagtagatgctgtaattgtacgcttgccttcaggcgcacgaaaacgatcgtcaggatgagagactgagataaataaatgatttccttccgtcatttctcctcgttcggattgaagtacttgctgaaacaactctaccttttgcggcagatctctttcatcaatcgcaaaatacatcgaaaacgttccccactgcggaagctcacttttttcttttgcgcgcttatgaacatgttggtaatcttcatcatgcagcaaagactttaagctttgaacaggggcgttgcatacaacgtctgatgcacggtaacggttacctctatgatcatgcactatcgacccgtcattatcacgctctatctttactactttccttcctagagtcgtttttcctccgttgactttaatcgatttttgcagcgcttctgcgactttgtataagccgccattcacataaaaagctccttcgtgataaatatccaacgctaaacatccaataagcattgaacagctctcactcgttgtctgcatgctgtctattaattgaccatcaacaaaatgaagaaagtccgcttcgtctagcaagctgtgtttttttagtaaataactaaacgattgataaaaataaggcaacagcttcacagaaccaaaattcaacgaacttaccagcctgctccactcaccgactgtcagaggaggaaggaccggcagagactgcataagcttgcgaatttcttttgcaattctaaaaacattctcataaaagctcctaatattttttgctttatgaggaaattgtttttgaagataggaaatatgctgataccggtcttgataataaatcagtgtacgatgaggaagatgaactttcatgattttctcaagagaaaccttttcaatttctaggccaaggtacatgccgattcgctcatgtatccctccgtgctcaaatcccattccaagcgtcgctccaacaggaaacgtatacaaatggcgctgaaatttccctgcacagcctccccattctcgagaagcttctaaaaccgtgacttcatagtcatgtttagctaaaagcgctcccgctgttaacccacctattcctccgcctattacgacaacttgcttatgcatgttttcaccttctttagctcttttttctattgtgcaaaaaaaagaagctcaccgcaatttagaagcggctcgttactgaaataaaaaagccgtgaatgatttcacagctttttggcttattttgtaatcactccacaaacaatccgatctcctgagtttcctgaaggatccgttgtgtaatcgtcgactttatcatgtatcactaatgccgctccatccatatccaaaagagaattcggctttccttcttgcaacgtgacaagagaagcaaaaatttctgtgtctactttgccatttggagcaacttctagattcggcaaatcacctgcatgcgggccttttgtatttttaaagccgtgttcacgtttaaaaggattaaaatgggcacccgctgttttaaaatccggcacctcacattttcctatttcatgaatatgaaatccatgtcttcccggtgaaagaccttgagcagttaatttaatgtgcacgccgttctttgcttctgacagggtagcctctcctacttttttgcccgttgtattcgttaaatccactttaacaggttctaccgatacttcgcttgtttctttcgcttcctctgttttcaagtggttttcatgagcgttattttgctcttttaccatgctgcatgctcctaacaataacagaacaaagactacgcatccgttcattatcaacttttgcatccgtgattcctcctttttcttatttatcaccatcctttcactattttcctttttttagacatcaaaaataagattgagacatacgttcaccttaccaatgaaaaaatccgaacgagttggattcttaatgaagaacctcgattcatcgttcggatttcccttcaactaaaatactttactttaacgtcttacttttgtttaaagttgtattctttttccgttccgtttgaaaaacgaacttctaattcaaacgactgaaaatctttttttagaccaaacgcatcgattacttccttttttacatcttcatcgggcgtgcgctgatcaaaatttaactttttaaattttgaagataatttattaaaagctttgtctccgttcaagtgctcatcgttaatattatcatccactttggcttctatctcatcattttcattttcatagtcagcttcataatcattgttgagccccttatagtctacttctaaatcaaattttgaaaagttaaaagatgtgttttcgctttgattatcatagctcatcggcgttccgccattcgtcacgccttgtttattttgagcttcttttgccggtgctgcatcatcattgtggcatgctgaaagtacgctaatacctataagggaaaagaatatgaaaaagggtcgtttcttcactgtatttcctcctttgacttcactcttccttccctttatgtccacaaatttgatttttatacgccttcactagaaaaccccactctctaaaaagaaagcggggtttttcgtcttgtttattttacattcgaataagaaatactgtacatgctgttaaaatacgtattgtaaagagcttgaacagcacggtctaaagcatctgctttcacaccaaacatcatgctcacctcagaagaaccttggttgatcatttcaagattcacttcagcacgagcaaaagcttctgtagcttttgcagcaattcctactgtgctattcattccttctcctactaccataaccatagcaagatcacgttcaataaagatttcatccacttcaagttctttttcaattcgagcaaatacacgcttttccacatctggcgtaagctgatgctcgcgcatgatgacagagatattatcaattcctgaaggggtatgttcgtatgaaataccttcatcctctaaaatttcaagcaatcttctgccaaaaccaatttcacggtttaataagtatttgctcacgtggatgttgcaaaaacctttatccccagcgattccaactaccggcgtatcgccgtgaggacgctcagctacaatgaatgtaccctttgcttcaggattatttgtattctttacacatacaggaatgcctagtttataaaccggctctagcgcttcatcatggaagacagaaaaacctgcataggatagttcacgcatttctctgtatgttacttctttcatttcatgaggcttttccacaagtcttggatctacgctataaatagcatctacgtcggtaaagttttcatacaaatcagcttttactcccgctgctacaattgagcctgtgatatctgacccaccgcgcgagaacgtaaccatgttcccttcttcagagtagccaaagaatcctggaatcaccaaaatgcccgaacgctctcttagctgcggtaatttttcataagacagtggaagcactcttgctcttccgggttcatcagaaacaaaaatacctgcttcttttggatttacataatgagcttcaaaacctaaatggtttaaataagcagccattacctttgcgttattatcttctccacttgcttttaggcagtctaataagcgaaatggatcgtttttatgtaaatcaataagtgattgtaaattcgtaataatgtcagtaataatcgtttctggcatagacaagtccacaacgatttcacgatagcgatcaattacttgcccaaactcatcgacgtaatcttctccaagctgtattttggcagaaagtgcgattagcaaatctgtcatttttgtatcagctccgtatcgcttgcccggagctgatacaaccaccagctttctctctttatcagacgttacaatatgcgcaacctgtttaaatttctctgcgcttgcaactgaactcccgccaaacttcgcaaccttcatgtttgagacacttccttactttgtttttaatattcgattattgtaccatactttatcaagtagaaaagcttatctatctaacttttctaaaaattaaaggaatactaccgtaattgtactctcataaagaacaaatgtctaccacaaaaatacaaaaagactgattttacatcatgtaaaatcagtctttatttgttattctgcttttggcttttttaatacacctacaaggaccgctgtcacaattgcaccaattaaaattgctagtgcatataaaagaggatttccttgtacaattccgataacgaatacgccgccgtgtggtgctggtaaaccgatgtggaacatcattgttaaagcacctgctactgcagcaccgataaccgatgcgggaataacacggcctgggtcagctgctgcgaatggaatcgcaccttctgtaataaatgaaagacccattacataacacgttttacctgtttcacgctcttggcgagtaaatttgtttttgaacaaagttgtcgcaatagccatacctaatggtggaaccataccgcctgccataatcgctgcgtgtggtgcatagtttccagcatcaatcattgcaataccaaatgtaaaggctgctttattaataggaccacccatatcaatcgccatcataccgcctaagataatacctaataatactaagttacctgtaccaaatccacttaaccagtgcgttaatcctttgttaattgcactaactggctcatttacaacataaagcataatcaatcctgagataaaaatcccaaatagcggataaagaagaactggcttaattccatcaagcgcttgcggtaaaccgctgaataatttctttaatcccactactacataacccgctaagaaaccagcgattaaaccgcctaagaaaccgcctccgccagaagctgctagaagacctgccaccatacctggagctaaaccaggacgatcagcaatactcattgcaatgaaccctgctagtactggtactagtaagaagaatgcattatctccgccaatagtttttaatgccgctgcaaatgcattatatgttggatctttcggctctgctgagtgaatgccaaacataaatgaaatagcaattaagatcccgccccctacaacaaacggaagcattgcggatacaccactcattaggtgcttgtaaaaccctgtacgctctgatcctttactttctccgccttctttgctgccaccgccgccgctgtatacaggagcgtctccttttaacgcacggttgattaattcttcaggcttgcgaattccttcagctactggaacttgaatgacttttttccctgcaaaacgttccatttctacttgcttgtctgctgcaacgataatagcggtagcgttttcaatttcttccttcgtcaacgcgtttttaaccccgctggaaccgtttgtttcaactttgagcgtgacattcatgtctttcgcttttgcttttaagctgtccgctgccatatatgtgtgggcaattcccgttggacaagccgttacagcaagcactaattgatctgaagctgtatctacttcctcttccggcgcttcattttcagtttccttatcatcaattgctttaatgacttcatcgattgatgatgctgttagcaacgtttttcggaacgattcgtccattaataacgtagacaaacgagatagtgtttctaagtgagcattattcgctccttcactcgctgcaatcatgaagaataagtgtgcaggctgtccgtctaatgattcataatcgataccttctgttgagcgtccaaatgcaatggccggtgtttttaccgagcttgttttcgcatgcggaatggcaatgccttctccaattccggttgtactttgagattcacgatttaaaattgcttctttatagccagctcggtcgcttaagcgaccagcttcgtctaattttccaactaattcatcaataacatcagcttttgacgtgctttttaaatcaagaatgattgtatctttttttaataattcagtaattctcactctcgtttccccctactctacctttgtgattgacacttgttcacgaagcgtctttacatcttctgctgtacataattcaagtgagaatgctgtggcacttcctgaagctactcctgtttgaaaagcttctaataaatccccttgttttacataagaagcaataaatccagctacaagtgaatctccagctccaacagaattttttaccgttcctttagggactgtggcactatagacaccgctttcgttaataagaagtgctccatcacctgccatagacacaacgacgttttgcgctccttgttccacgagcttcttaccgtatactagcgcatcttctgcactgtttacttctgcatcaaacaattctgcaagttcatgatgattcggtttgataaaaaacggcttgtgggacacgacgtctagcaaagtttttccacttgcatctactacaacttttactccgttcgctgctgctagttcagttaacgtttcatacacagaacttggaagcgttttcggtatactccccgctaatacgaagatatcgccttcagtcatttgctttacttgagtcaataaagactgaagcgcttcgtctgtaatagcaggtccttgaccgttaatttctgtttctttttctgtttttaactttacgttaatacgggtatctccctcaactcttgtaaaagctgtttcgatattctccgcttttaagtagtcttcgatataggttcctgtaaagccggctacaaaaccgagggctttattatcaacacctaatcgctttaaaacgcgagagacgttaatgccttttcctcctggaaacttggcttcattcgttgtgcggttaagcccgccttcttcgaatgctgaaacatgtactacgtaatcaacggatgggttcaacgtacatgtataaatcatgatttcacaacctttatgtctgttttgtttgcatactgtataagtacatcgctaggtacgtcatttgttataatttttgcttcatgtaaatcggctattttcgcaaagcttgtttcaaaaaatttagtggaatctgataaaatataagattctctagacagcttcattgccgtttgcttgatcaatgcttcttctggatcaggagttgtatatccatattgatgatgaatcccattcgctcccataaagcacttatcaaaacgatattgctcaagacttaaaagagctccattgccaattaaagcgcccgttttatgtttaacagatcccccaattaaatagagggtgatgccttgttctagcatcaggtttaaatgcattaaaccatttgtcacgacaactacatctttttgctttaaaaaaggaatcatttcatacgttgtagttcctgcatctaaaaaaatacagtcaccttcatttataatggaagccgcatactctgcaatgtttcgtttatcttgaacatttttagcagatttttcgataacgctcagttcgattcgtttactgcgaataagcgaagcgccaccgtgaacacgtttgagcatttgctcttcttctagttgacttaagtctcttctaatggtggattccgaagcgcctgtaacttcgataaactcttgcacttttacaagttctttctcttttaaaagttttaagattagttgatgtctctccggcgttaacatgttctagctcctttttcaaaaaagcgttttcatttatttcatgtacttactttatcacggtttacattcaaaatcaatcataaaaaatcaaaaacattcatttttttaattacaaaataaagttttttgaacgaacaattagatttgcatttggtttaataatagttagtataaaaggaaatatgctggtaattcaataatttgtctacttttctcattatatgtaaaggttttcttctactcaattagctatgactgtttttgactacttcttgaccgattgaatttttctgactgaatcagccatagcttgtcctgatttcataaaagcctacacaccaaaaaagttgtccacctttttggacaactcgaagtgacccatcatttaaataaaaacagaagcatatataatatggaagcaagggcagaagaaatagctaaacttgagataaaacgaacgagtctttttttaatgaactgcgttaattcgatttctcttacttgagttttttcattttgcatacaataatcccttctttaattaaaatttcctagtagctagaagttactactcgcagaatatgcttttatgtattgtatgcatgcgttaaaaaaaagatacaaaacgaacaaaaaagctactcttagctagagtagctttcatctttccatacatctgcttcaattactgcatccgctcgaatcgaatatgtataacaagggcctgtaaccatcagcgtattcgactgcagcgagactttatcaatcgtcactcgttcatacctttgaatatgtcctgcttcatagacgtgaagcgttactggatgatgctccgagtaactgttcataatgacattttcaatatgctcaatcttttcttttttcaaccctaaaggctgcttatgcgcatcgggactgtacattttcttcattttctctaaatgctcgggcattactaacttcgcatactgttttaattcatcttgatacacgttcattctcccccttgactcttgcttctattttaccgaacgaacattctcattgcaaaactttttaatcaaaataaaagcaaacaattcattttttcacactccataaaaactgtcaaaagattttatgttaatagcagaaactgattaaaaaaaaaataataacatcccatctttaattcggtctctagagttggtataatacattgtcatgactgtgttttcggagtttttgatgattggaggtaacgttcatgactaataaaataaaagaaattatcctcattattctagggagcctcattttcgcactggccattaattactttgctattccaaatgaattagcagaaggcggcgtaaccggtgtaacaatgattacctattatgtattaggctggtctccgggtatcacaaactttatattaaacgggttgctggtactgatcgggtacaaattgcttcataaacgtgtgattgcttacacaattatatgtatcattttcacgtctctattcctacatataaccgaaggactgggaaatcctcttgacgatacgctactaggggctatttttgctggtattttagctggcgtaggactcggacttgtgtttagaggcggcggaacttccggaggctctgcagttattgcccgcttagctaatcaatatctagactggaatattagcaaaacgatgctggcaattgatttattagttgtagcaagcgcttattttgtcatcggtggagaaaagacgatgtatacggttatttctctttacatcggaacgaaggtgcttgattatatcattgaaggactcaaccctcgcaaagcaatcactattatttcacaccgttcagctgaagtagccgcacaagtcaataaaaagatgcagcgcggcgtcactgtcttttctgctcatggaagctatacaaaagaagcaaaagacgtattgtacgtagttgtgaacaaacaagaactgctagaattaaagcgcattattcataaagtcgatgaacaagcttttgtggtcgtacacgacgtgcgcgacgtctttggagtaggttttaccattccaaaagccagttgaaaacccgctgtaaaaaagcgggttttttctattatatatgcttgcgctgaaaatacagtaaacctgctgctacaaaaagcagaaagctgcttataacaaccactaagaaattctgtgtagtcagcatcaacccccatgatgcttttccggttacacctaacattccatacattggctgagtccatgggtaccaggggccaaatcgttcagaattagcaacgaataaattcggtagtgttaaaatgacgttgactgttaaagatgctccaaaactagaaagtgccattgacacagctagcataaacgctagaattggcaacactgcaacccagccgcctagcatatttccagctatcatttttagtggaatagcatttggatagtctttcaacatgctaactcctaataaaacaacaaatacaagcacttgaagaattcccatgaaagctgctgctgtaatcaattttgctccgtatactgatgttcttgtcacaggaagagataataattgcttccaccctcccgcttcgtgttcataccgacagatgaacgatgttactaacccgccaattaacggataaaacagtaagccgtgaacattggcaatcaaagcatctgccattaaccatttcatcctcccgcttggcattgcctgatcacctacaaaaaggatagcagcgataagaatgggactaacaaaaaggtaagtccaggcttttgttttaaacaatttaaaccattctatcttgcataatggccacaacatttaggccacatcctttttgataaagtgaagagcacctgcagcatataaaaaaacgccgataattacacctgttatcatatacgtattccgataatcggaaaacactagcattggccattgccagaaaaaccagctcggcaattctctcataccactcattgtcacactcatcacaatacctagtgcaagagaacggctttgatttttaaaaagcatagatagccatatttgaatagctacaaacggaatagccgaaaagaacggataaaaggtataaacaaaaagagttttccaagaaggaggcagaccaaatcctaaccaccaccctagcccaaatataccgattaatagaacagcagaagcgataagtagcataaacataactactacaaattttgctgtataaacactcagtctgctcacaggtaagctcagcagctgcttccatgagcttctatgatattcaatatgcgctacatttgaagcaagaatcgttcctcccagtaaaaaagctattggaagcgtgatgtttagttcatgcaaaagaccttcccacacattcggattttgctgaattaaatattcatatcgaacgctataatcaactagcgttaagccaattacacccgctggacctaaaaatagtaaaaaccagagccattttctttttaactttatacactcagcctgcagtatttttgtgaacatatccattctcctcgctcgtcagctttaaaaagatatcttctaatgatttcgatttttcttcaactcggtagattgagacattttcttgcacaagctgataaacaagatgtgccacttgctcatgatcaatataatctaaaagaagactgtgtttatcgatagtaggtacaaagccgcttgctaataggatcgttttggccttctctatctctcccgttgtaaatgccacttgatgcttagcctttttgcgaagtgattcaatcgatccattaaatagcatctttccttttgtaataatacctacttgagtcgctaaatggtcaatttcatagagtaaatgacttgaaatcaatacggtaactccattttttcctggcatttctttaattaatgaacgaatttcttgaattcctgcaggatccagtccgttggttggttcgtctaagattaataaacgaggatttccgaggagtgcagaagcaataccaagccgctgtttcatcccaagagaaaagcctttgactggacgatttgcttcttttgttaattttacaatattcagtacttcatccactctgtttttagatacacctagtattttgcgaagtacctctagattttctcttgcagttaaatgcgcataataggaagggctctctacaagtgaacctatcttttttaaggtctgaatatgctgcctgtgattttttattctttctccaaacagctcgatttccccgctcgttggcttcattagcccgagcagcattcgaatcgttgtcgtcttccctgctccattaggtcctaaaaacccgtatatttctccttctttaatggataaattcacttcatttacagcttctgctcctttaaataattttatcagctgagtcgttttaacaatttccacttttatcacctctcctttactataaacagccaaagttaagggagaggaaaagaaaggttaaaattcgtttaaaaaagcgagtgaattaatcactcgctttgtacacaatttgaatatccgttccatgttttgtagaatgaattgaccacgttaaccccatttctttaatcatcgcatccacaatcgctagacctacaccattttgcttcgtatggctattctttttaaagcctgaccctttatcagaaatggtaagagaagataaaccatgctcttgaacaagtcgaaagccaataaagttaccttctttggcatgacgaatgacattttgacataaattatctattattctttctaaccactgaacatctccgcgccaatatatggactgagaaggcagttgaatatccacttccatatgctcttcttcaaatagtggataccactgtgcaatgctttttctaagaaatcgagccatatcaacttcctcttcccgatatggatattttccatttaacagcagcgtataggaaaataaattatctattaaatcactaacaaattctactttcgtatcaattaactcaagagattgttgaacgttcaaggccatttcttcgtttttcagctgataaatatgagttcgaacagtcgtgagcggtgttcgtaagtcatgcgatagactcataattaagtcttgccgcagctgttcttcttgctgctctcggttccggctttcatgaagctgtttaaccatttgattaaacgattgttctagctgaccaatttcatccgtggactcagatacaacaggcaagggaattccttgctcgtctttgttgttcatagcagcttgtaacgctcgcagcctttttcgaattcgaagaaaaaagaatagagaaagtacaataaaagaaagcacaatgataaaaacaaatcctaaataaatattatagtaggctgggtctagcctttgaataggaggctcaacggctttttctggcacttcaatgaccataaaaccttgctttttatctgttccaataaaggtaataaccgtatacggatcgtttccgtatcgtttttttataaattcagccgtataagaagcggaccatttcttcgggagtgattcactgtaaggaaggggaagctgcgtttgtccagcttcgtttacccagaacattgaagcttcagggtatttttcttttaataattttaacttttgattaattgttttctcatttgctccttctagcttttgggcttcttcattccacatttgttcgtagtagctttttcctttatactcttcatttaataatccttgaatatgcataaaaggaacggtgatcagccatgagcctgcaaaaaatgataccggtataattagtacagctgcaatcataattaagatatacttcgtgacaagagactgtgtaacgttcattgcttcaccctgtagccaatccctcgtattgtttcaataatttcaggcttagctgcatttttctccaatttttctcgcaaatagcgaatatgtaccattaatgttttatctccttctatataacgctctttccataccccttcataaatttgttcttttgttaaaatttgatttaaatgctgaagaaaataagtaaaaatataaaattgcttacctgttaaactaatttcttcacttgtctctctgttcatcacgcgatagtctctcatcgaaatatgcaaatgttttaaaataagctcttctttctttcttgaaaatcttcttaacaatacttcaagccttgcaagcagctcttctggatgaaagggctttgtgacatagtcatcggcaaactctagccccatgatcttatcttctaaagctgtacgagccgaaagcattaaaattgggacatcaggtgctagttttttaagcttttttcccactgtaaatccatctaatccaggaagcattacatctaaaatgacaatatccgcttgttcaataaactgactggcgatatctcctgattgtaaccaagtaacttcatagttttgctttttaagctcattttgaatcattaatccaatttcttcattgtcttcaatgtataaaacgtaattcatatgcacacccctttacttctttttccattttatcgaattcttcttagcagtaaaagacaaaaaagctaaaaggcgatgccttttagcttttttctttacacgtccatttgattaacagaccgcagtgcgttaatcctcctccaaacccatagagaataagaaggtcattatcctgtacttttcctgtcattattccttcgtttaaagcaagcggaatagaagctgaagatgtatttccgcagtattgcacactcgttaaggttttatccattgaaacacctgttttagcacaaatagcttcaatcattcgaaggtttgcactgtgcggaataaaccaatttacatcagaaagggaaatggaagtattctttaataatgcttctactccttttggaatcgttcggacagcaaagcgatatacttcacgcccgttttgaactaaatttccactgaaattaatttcttttccggaaagagtgttagataaattagaacggtataaatttacgcctccgcttccatccgttccgtaatgagagcctaagaaactcggattatgctcatcgtactctacaagcatggctcccgctccgtcaccaaacagcacacatgtggcccggtccgtataatctgtaattttcgacatgacttcagcaccaataactaaaatctttttatgcaatcccgacgtcactaagccgttcgccacatgaaggccatatgtaaacccggcgcatgctgcacttaaatcaaatgcagcagcttgctcaatatgaaagtaatcttgaatctgacatgctacgctaggaaaaaagtgatccggcgttgttgtcgaaacaataattgcatctacatcttctatttttacatcatatcggttgagcaaattttttacggcttgaatagcaagcgtggacgtgtattcgccttcccctgcaattcgtcgttctttcattcccgtacgctgtacaatccattcgtcacttgtatcaaccatttcttttaaatggtcgttcgttaatttttgctttggtgtatatatccccattcccgtgattctagcttttgattgtatcatttctccacctcaaatcagttgatacttaattataacatctacctttaatatctggtactaatttattaatagataaaaagcgcaaaggcatacccttcacgctttttattaaatagaataatcttctggaataaatacctttagctgcttaggctttacatacacctgatctccgacttgaaggctgaggactttatagtgctctttgctcaattcagcttctaaaaattcttctgcatcttctctttttaattcaatttgcacgataggccctatcacatgaatatggctaacggttgcagaaacagcatctgcgcttgtttttaacttttcaaggtgaatatcatgaggtcgtacatatccaacagctgcttcttcatttcttccgctaaattctggaacagccatttcaaagcttccttgttttagtcttcctttatgaatgcggcccttgaataaattgacgttccctaaaaaatcgtatacaaatggactgttaggataatcatatacttcctcaggacttccaatctgctcaattttcccgttgttcatcacgacaatacgatcggccacatctaaagcttcttcttgatcatgcgtaacgaaaatactcgtaatatgaaaattattatgcaatttacgcagccatctgcgcaaatccttgcgcacttttgcatccagagcgccaaaaggttcatctagtagcagtactttcggttctactgctaacgctcgagcaagcgctactcgctggcgctgtccgcccgataattgagagggatagcgatttgcaagcggctctagtttaacaagctgcagcagctcggttactttcttggtaatggctgttttagaaggccttgtttttttatgtcgtacttttaaaccatacgcaatgttatcaaacacagtcatatgcctgaacaaagcatagtgttgaaaaacaaaccctacattccgctcttttggatttacgtgcgtaatttcctttccatcaaataaaatagctccttgatcaagatgttcaagaccggcaatgatacgaagcaaagatgtttttccagaaccggacggaccgagtaaagctactaattcacccgtttgaatatcaatgttaatagaatccagcgctttaaaatcaccaaagttctttgatacgtgcttaatatggatactcatctcataagctccttcctatttaaatatgtttggctttccactcaataatgttttttacagttaatgtaaaaatagctaaaactgacattaaagatgctaccgcaaacgctgctgcaaattgatattcattgtagagaatttcaatatgaagaggcatcgtatttgtcattcctcgaatgtgcccagacacaacggaaacagctccaaactccccaatcgcccgcgcattacataaaataatgccatataataagccccatttaatattaggtaacgtcactagaaaaaaagttttgaaaccgctggctcctaacgttaacgacgcttcttcttcggctgacccttgagcttgcatgagtggaatcaattctttggcaacaaacggaagcgttacaaaaagagtagctaatataataccgggaatagcaaagacaattttaatatcttgattaaacaaccattctccgaataacccttgtgcaccaaataataaaataaaaaccaatccagcaataacaggcgaaacagcaaacggcaaatcaataagcgtaattaaaatattctttcctttaaaatcaaactttgtaattaaccatgcagctactacgccgaaaacggcatttaaaggaacggtaataagcaccacaattagcgttagtttaatagcagccaaagcatccggattcgtaattgcagcgagatacgtttccaaccctttttgaaaagctgtcataaaaatggtgatgagcgggagcactaagaatagagctaaaaaagccagtgcaataaatgtaagcagccactggacgactttgggctcttttaaactagaatgattaagtttaacagtcgtttttgcatgctgcattggaacatgtcctgccaatgtcatccctccttaactatgtacaaatttacgatttgtccaccattgaataatattaataagtaataacagaaaaaatgatacaatgagcatgactgatgcaatagcagtagcgcccgcataattgtactgctcgagttttgtcataataataagcggcgtaatttcagttttcatcggcatatttccagcaataaaaacaactgacccgtattctccaagcgctcttgcgaatgaaagagaaaaacctgttaaaatagcaggcaccagctctggaaaaataacttttttgaacgtttgcattcggctggctcctaaactagcagatgcttcttcgatctctgcattgaagttttgcaatactggctgcaccattcggacaacaaacggcagaccaataaacgtcagagcgataataattccgataggcgtaaatgcgattttaaacgtaaataattgaccaatccatcctttcgggacgtaaagagtggtcaaggcaatgccggcaacagccgttggtaaagcaaacggcaaatctacaagtccatcaataaacctctttccaggaaaatgatatctcactaatacccatgcaataatggttccaaaaataacattaataatgcctgctgcaaatgctgctccaaaacttaatttatatgatgctactactctagcgtctgtaacagttttaataaagtcgctccatcccatagatgccgtatttaaaaaaatcatagctaacggaaaaagcacaaggatacttgcataaaacatcgtaaaacctaaagaaagcccaaatccaggtaagatgcttttctttttcttctgtcgttgtaacacgctcacgtcttacacctctctccgttttcaagatacatgtacacagaagatacgaattaccattcgtatcttcctcatttactttttttaatgcatcatattactttggctgatagatctgatcgaatgttcctccatcgttaaaatgagtttcttgagcttttttccagccgccaaaatctttaatggtgactaggttaagagaaggaaattgatctttgtgtttctctaataccttttcatttcgaggacgatagtagttttccgctgcgatttcctgacctttttctgtatatagatatttcaagtatgcttttgctacctttgttgtgcctttcttttcagctactttatctactacagcaacaggcggttctgctaaaatactcaatgacggtgttacaatttcaaatttatcttttcctagctcatttaacgataagtaagcttcattttcccatgcaattaacacgtctccaatgccccgttctacaaacgtagttgtcgctccgcgtgcgcctgagtctaatacttcgacatttccataaagtttactcatgaagtcttcaatctttttgttatctccgttatatttattcttcgcgtatgcccaagctgctaaataattccatcgtgcacctccagaagtttttggattgggtgtaataacggatgtaccttttttcgttaaatcatcccaatctttaattccctttggatttcctttacgaactaaaaaaacaattgttgatgtgtatggtgtagaattatgagccaattctttttcccagtctttgtttaataattggcgagtttgagcgatttcatcaatatcataagcaagcgccagcgttactacatccgcttccaaaccgtcaataactgcccggccttgcttaccagagccaccgtgtgattgcttgatagtaacgtcttgccctgttttatctttccaataagatgcaaagctcttattgaactcctgataaagctcacgtgtaggatcatatgaaacgtttaaaagctctactggtttttttgaatcgtttttactcgcagaactatctttccctgctgtttcagtagatttcccattgccgcaacctgctagcacgacgagcagtgctgttagcaccattaaaaactgaactgcttttttcttcatgttttactcccctttttataaaaaaatacaaaaaggccgctatctctttgaaaagagaagcagccttcagttagtctgatcagcgtatatgctcttaaattattcttattaaatttattcgtaagaataaaaagaagatactttctgaaaagacaatttattcttgtttttataataaacacactttacctattagtcaactaggtttttaatcttttttacacttattttagttctttttatgtgttttccttacttactgcgtgcctgatactctttttctaagtcagagagcgtgagttcaaaaagatgatggttttcttttttgtaaaccccttttttcaataattcttcaatgaggtattgttttctttgccgcaccgctgctcgtaataaattttccatcttttctcctcctattatattaatttaagaataaaaaaagacttctaacacaggtcagaagccttcggtaatccggtcagcacaggaatgaaactgtcagattttcataattttaaaaagtataaagctgcttctttagcagctttatacttctcatcgtcatactcgtacaacctataactcaatttcaattcgaaaaattctaaatttttgaccggaaagaaaatcaatttttcttcgaatacgcacgttttctatatttaatacagtacttgcttgccccgccgtcaagcattcgctagctaggctggcccttcagtttctctaaatacgtatttaaataggcttatttgtggcttgctactttgcttttagctaaaaagcggtttttttccgtgctgtccacttgagtaatttgtccgtcgtgaagagtaattagtacagatccatagttgatttcagttagtaatttaacaatataatctaatttttcttgtgtaattgaggccattttatcattctcctattcatagataaatttatattttagttgcagttgaataaacagagcgaacaacatctataagtacttgtataatgtgcagaagataaatacatggtaatcctccccatatgttcagttgaagattgagattttaatgaccacaaccaatgtacagaaaaggcccacactagtagcgaacaagtatgagccttcggttgaccgatcagcttctttagcatcccaattttttcaaaagatttatactatctatattatttacactttacctatatgtcaagtagggattaaaaaaataaatagatattattaaatttttttatatctttgacctaataaaaaagactcatctgcatgaacttacacagacgagtcttttttagccctatttttttggataggcagggttaccgtaaaaatgcttccttgttcttttttgctttcaacacgtatttcgccctcatgcagccgaacaattttttttgtaatggctagaccgaggccgcttccttttaacgttctcgatttatctactttataaaagctttcaaaaatatatttttgatcttcttcggcaataccaattccattatcctttattttcacgtctatttcttcgttttttagagaaatggatattttcacaaatccattttcaggcgtatatttaatagcatttgttactaaatttagccaaacttgctccaacaaatctttatctgcttccatttgaacattggataaattaaggtcaatttctatgttcttttttgtccactgaggttctaaagccatgaccacatgcctgatttgttcatctaatcggtattgctgcagcattagcgtttgatgttcagagtctagagaagcaagctttagcaaattggaactaagctgagaaagtcttgtactttctttttcaataatcgttaaatattgtatctttttatcttcactgacgatatcatctttaagtgccgctgaaaaaccacgaatagaggtcagcggtgattgaatctcatgcgaaacgctagcaatgaactcttgcctcatcgtttctattttgtttaattctttagtcatttgattaaaatttttagttaacagaccgatttcatcattcgctgcgtgctcgacttgcacattgtattcgccttgtccgacaactttcatcgctgtactgagacgcttaatcggtttaataataatcgttgaaacatatgcaaataatacaatacctactaataaaattgtaataagctggatattttgaacatcttgaataactgaaaattgccgctgtggatgtgactgaataaatagagcatacgaccgtccattttctttaaaaggaagacccactacgtttggctgtggacgatcacctttttccttgtttaaattagaataacgcttcccgtctaatacttgatctacttcttgcggtgtaattggaataggcggtcctggctgtcctaatactttttcttcatgctgatcatcaataataataaacgaaaaatgaatgaatgatgaattagataaaaaccttgcagctttgtcggagtcttctgctccgtacaaatcgataaaatcttctcccatcttcaccatatcctgacctaatcgcatttcgagcttctgcttgctaagaaatgtcgtgacgacaacggtaatcacaacgctcaataaaattgtaatgatgaacgacagaaccagctttacataaattgatttcacgttaacacccttctgctctatagcctagtccgcgaattgttttaatttccataccgacgtttttcatatgattaagcctctctcgcagacgttttatgtgaacgtctaccgtgcgctcatcgccttcataatcatatccccaaattaattgaataagctgatcacgagtaaaaatctttcctggagaactaactaacgtaaacagtaattcaaactcttttaacggcagctgttcgcttgtttctcctgcactcatctctaatttggtacggtctagttttatattccccatatagattacattgttagcttctactcggtacctgcgtaaaagagcctttacacgagcaaccatttcctgaggatcaaaaggtttcacgacatagtcgtctgttccaatatcaaatccttttagcttatcatgcgattcgcctctagctgttaccattaaaaccggtatatcaaaatactccttaatttcctttgttagttcccatccgtctttaaatggcatcatgatatcaacgaccgctagatcaattcgaaactcttccattttcgcccacgcttcttcaccatctgctgcttttataattttaaatccttgattttctaaatataatgatatcagctctcgaatatgttgatcatcatctgcaactaatatttgaatcatacatgtctctccctattcctaagtttgtccagcttttacgcacagtaagctctctgtttatagtaaacagagagccacataagatcatacaatgattttatacttcaaatatgaactgaatatgaacaaactgattaactcttattagctgaagttgtttgctcgttctttttctacaattccttccaaatacgataaaaacgtttgacgtaaatctttacgctttaacgccacttctaccattgctttcatatagcctatcttatctccaatgtcaaagcgctgtccttccagttcaagagcaaacagccgctctttttcacatactacacgcagtgcatctgttaattgtaattcatttcctacccctctttcaatcgtttttagataagaaaaaatagaagggtttaaaatgtagcggcccataacggcaatagttgacggagcttgttctattgatggtttttcgatcaagtcactcacttcatgaaggctaccggatttattttttggctgaatgattccgtatttcgatacctcttcaacatccactttttgaactccgataactgattgattagtcgtttcatacgcttggatcatctgtttgagcgcaggttcttcagaagtcataatatcatctccaagcagaacggcaaacggctcatctccaataaactgctcggcacaaagaatagcatgaccgagtcctaacggctctttttgacgaatatagtgaatgctggccattgatgagatcgtttgtacttcttttaacatgttaaacttgtgtttttcttcaagcatttgctctaactcaattgatttatcaaaatggtcttcaattgattttttgtttcgtcctgtaataaaaataatactttcaatgcctgatttcacagcttcttctacaatatattgtacagcaggcttatcgacaattggcagcatttctttcggctgcgcttttgtcgctggcaaaaatcgagttcctaaaccgcctactggaataactgctttttttatcgtcatatatgaatccctctttcttttttagtagtaaatacaaataatttagtaccaataaagttgataccgacacttgcgattgtaattaaaagtttactgattagcagcggtatatcccatttattatatagaacagtcaatagaaatgatgttagggataaagtgatcaaatttacgatcacgaataaaatcacttcacgcttactgcttttttcttttctctcaaacgtccatttgcgattcatgacataactgtttaaaatgcccgcactgtatgaaatccactgcgctagtatgtagttaacaccgattgttgttaaaagtgcgtatactacaaaatcaatcagtgtatttacaactcctactaacgcaaatttaataaaagatatccatttgttagtcacgaagtgatacttccttgcgtgtttcaagctgatacttttcacggacaatatagagtggacgattttttgtttcatcgtagatgcggccaatatattctccaatcatcccaagaataattaaaatgatgccgctaaagaatagctgaatgacaattaatgacgaccacccggtgatggtactgtctgtaaataacttcaaatacagcaccactaaaagataaataaaaccgataccagatagagttacaccagcatagctagctagctttaatggtttatatgaaaaagatgtaatgccatccattgaaagcttcagcatctttttcaaagggtatttcgactccccggccaaacgctcgtctcgctcatattctactgctatttgcttaaagccaacccagcttactaatccgcgaacaaagcgatttttttcttgaatgctattcatttgattgcacactttgcgatctagcaaacggaaatcccctgtatcaagcggaatatcaatatcggtcatcgcacgtaagaagcgataaaacatagcagccgtttgttttttaaagtatgtttctccttttcgctttgtacgcttagcgtatacaacgtcaaacccttgcttccatttttcaatcatctctaaaatcaattcgggcggatcttgcaaatcagcatcaatcacaacgaccgcctctcctcttgcataatccataccagctgtaatagcaatttgatgaccaaagttacgggcaaaatctaataaaacaaccgctaggtcttgctcactgtactctttaatgatttctgctgttcgatctctactgccgtcgttcacgaaaagaagctcgtaagcttctttcgttgaacgcatcacttctgtgagacggcggtaggtttcatgaatcacttcttcttcgttgtagacaggaacaacaatagaatatttaacaattgaactcatgttcatgccctccttatttaagcgttattttgtatagtgttccgtttccagatggcccttgctgagcacttgatgaagtagactgccatttggaagaaggaatctccttactattttctttaatccacgtgataacgtcagattgacctcccttgcccattccagacaagtagaaatatttcacttcaccttttttaatcatggcttttaatttacttaccgttaaaattggatctgaaccgctaaatccacccattgccattactggcttgcccgttttgataatgtaaggcgcagctgaagttgaatccgttgtggcaaataaatatttttcacctgtattattttttgttaaatagtttagtagcttttggtttacttctgcgttcatccctccactttttcgttttaaagatgatgatttgcttgaagagctatttggcatttgactattattggataaaccgcctggcatttgcatttgaccactgtttgaagaaccgcttggcggctgcatttgaccattattggacgaaccgcccggcatttgcatttgattgttcgatgatgaattgccgctagagcttcctggaggctgcatgccgttaaagccagactgtttgctatttgtagctgtgcttggaggtcctcccataccgcttgaagaatcaggacctgctgctggaagcatgctatttccaccataaataattggtgtcatggcccagtacgccggcattgcaagtaagacaaccatcgctgcggctcctaggtaattcgtcaacaaatttttacgctgtttacgaacagctaaaacaagagctaaaatgacgcccagtgctcctccccctgcaattgacgctacgccgattgagctgacataaggagacataatatatacttgaagtgctgctgttgttaaaataccacctggcagcagccatgatttccagccattacgctgtttgtacatgctccataaagctactgctcccgctccggcaaatgcagcgattggaggtgccagcataattaaataatactgatggaaaaatcctgcgatactaaaaaagacagctactggtagcagccacgctaaccaaaataaactttctttttgttttgtcgtgtaaggccctttaaattttactccagcaaatagacccacgattgaaaagattacaaatggtaataaccagctgatttgatctgataaccctttttggaatagtcggaatggaccaggattccccgtgttgaacattccgttttgattccctccgcctgaagcctgcatcttttgagaagagctgctctttctttgatttgagctttgtgaagaatcagcacttggattactattttgttttgtttcactgcttgctgtttgctgctgagtttgagcaggctgtttatgactgcttcccgtcacgcttgtatttccagttaaacgattaataccgttatatccgaaagcaagctctagaactgaatttgtttgactgcttcccatataaggtcgcttatcagcagaagtagaatctaccacaactgcccatgagacagaaacggcgagcattagtgcagtcgctgttgttaaaaaagcaattttctttttccaagtgattttggttgccactacatagaaaacataaaatgctggtaaaaccatgtatgcttgaagcattttcatattaaatgcaacaccaatcatcgcaaaagctgctaacacccagccaaatttagccgtacgcacagcacgaaataacatccatgttgctactagtaatgtaaatacaagcatactatcgatattatttgttcggcttaccgccggtacaatgggcgttagagccatggcaagagcagcaaatctcccagcccatacgccaaacgtacgttttacgagtacgtatagtaaaaggactgaaccgatgccagctaatgcttgcggtagaatgacgctccatccgtgaaacccaaatattttggcgctaattgtctgaatccaaaacacaagcggcggcttatcaatcgttacatagcctcctggatcaaaagatgcgtaaaagaaattatgaaaactttgaagcatacttttgacagctgccgtgtaataagcgttggcgtattcatctgtccaaattttaaataagttcaaaaatgctgcaattaaaacaatgggaactaaaaataagtctattctttttttatttgaagttcgttcttctttcacttcactgttcatgtgtttcatttcactccttcgtaatttctgactttagtctaacaagcatatgtgaactgattatgaacagtgaaaataattttttatttttaaaaaacccatttgacctcttacgctcatcaatgaaatattttacaattaaagaatcaagcacatgaaatagaaagcatattcttggaatgctgcagcttctatgaaacattattattaacacttcatccacttcttgctgagaaaggagacaactttatgattcaagtaaaagatatatacggaaatttacccacactagaaacagaaagactccgcttgcggaaagttactaaaaaagatgtgcgtgacatgtttgaatatgcctcaaatgaaaaggtaagcagatatgtaaattgggaaaagcaccgaaagcttcaagatacaaaagagtttgtttccttcgttttaaagcagtacagcaaccaaaccatttctccttgggctatagaaatcaaagccttgaaaaaatgtattggcaccattgactttgtcacttggaaccctactcatcgtattgcggaaattggctatgcgatttctgaaacttattggaataagggatttgttacggaagcagctgaaaaagtaattgcgtttggatttgaagaaatggatttagtccgcgttcaggcgaggtgctttgttgaaaatgctgcatctgagaaagtaatgaaaaaaatcggtatgtcttatgaaggaacgattcgaaaagccatgtttattaaaggagctcatcaagacttaaagttatattcaatcttgcgagaagaatatacacgcaacgcgtagaaaatgtataaaatactttccataacataggctaacttcaacactaactcttccttttgaggtgaacaatgttggagcaagcaattcagcatttagacttatctgcacatggtttgtggtttccgattaccgttagtttatgtttatttattcttgcccttgttttatttaaacgacagctaacttggcgagatttttatatcacgttttgcgtagttggatttgtcggatggctttgtgatgttatcattacgcgtgtttttaacgtgattgatttgggagatccaaaagttacaggacttggagatattctaagctatacatttattccaccttccctttctgttttatttttgacttacttaacagctaaaaataaatgtgttttatcacttctcttttgcgctggttcactactcatagaatacggaatgattaaaagtggctatatgcatttaaacggctggttttttatctattcaatagtggtatacttcctcgtttatgcttttgtgctaccatggcatatggcatttattaagtaaaaaagcagatgttgatcaacatccgcttttttactatgcgcttactttctatctgctgaaatccatatttcataccgacgtttagaagaatgaatatctccattgcatgttcatagccggtcattttatgcgccgtgatgacacatgcgcgcggctatgttcttcaggacgtctaaacccaatttttaaaagggctgcttctaaatttgcttctgtttttatttggttaaaatcaattcccagtttcacgaccgtttgggcaatttcaggtcgtatccctgttataatagcttccactcctactaatttgagagatcgatgaattttgaaaagattgtctgctaccattgtatcaataatcacgacacctgaaatatccaaaataagataggataattgaaggcttgtccctttttccaagcaagtttccataataacttgcgagcgatgagtatcaatttctccaataatcgacataatagcgataccttttgtaacaggtacgagcggaactgacagttcttctagtgacgtgtaagctaaattcatcatatatcgattatgttcatcataaatttgaccaaaaacacatgttaccgtatctaaaagcggatcaattcgttcactgacatgcagcatggtaattgcagcaaactgatgctcctctagttctcttgtaaatacatcccaaataacgctgcgatagattgggaggataccgagtgctttttctaaaggaatatttttttctactgcatactttcccgtgtcaagcgcccattctttaacaagtttaagtatagcctcttgttcttcaaatagcgctcttccaaagtactccataattgacactcgccatttcaaaattttcttttcttttaattcctctatacttagcgtatgtgtagaatctaaacgttcggctaatttttctgacaagctatatttatgttcaagaatcttttttcctatatacacgagctcctctttcataaaatatgttcagctcctcttttctgctatttttactgcgtatatacccttgactaagcctacttacccatccgacaattgactagccttcctaaaaataacaaaaaagcggttattttatgaattttctttcttttcattatagtaccagagtaagagccgcacaactgaaagtttgctgcgaataaaattcgtaatttgacatagaaaacaatcctgtttgaactcaaacaggattgttttctatatttacttatcccactttacacttggaatagccagacaacaatcggcccaaaaaccgagcccagtacagcgcttaacgtcattgatactgagctcatcgataccgttagttcaccgtattcaaatgctttagaagttcctagcgcatgagaagcgctgcctagtgcaattccttttcctaaagaacttttaatacgaatccactttaaaagtaaaggtccaagaattactcccgaaaagcctgcaatcataacaaataccacagtcatcgatggaacccctcctagtcccgtggcaatttgaattgcaacgggagtggtaatagacttaggaacaatagataaaatcaggcttcggtcaatgccgaatacttcagcgaacacaagtccgctaatcatgcctgcaaataatcctacaaacactcctccaataataggaatgctgtatttcactagcatctcacgctgtttatacagtggatacgctaatgcaacaaccgctggccccagaagtgaattaatccacttgcctccaatcatatactcgtcataggaaatatgaaaagcaagcaaaagaagaataacaaatacggttgtagttaaaactggaataagaattgggtaggagaaccgtacgtatactttcgccatgactagatacagagcaactgtagctatgattataaagagcgcgataaagaattcttgcactgttgtttctcctttcgtttgttcgctttcttttctaaaagttggctagcagcccccgcggcagccatcgtaatgattgtactaagcacaataattaaaaacaaaatcgctccgctgcttgaaagaagcgaaggataattcatcactcctgccatagctggtatgaataataaaggtaaaaaagataacaagaagcttgctccgtcttcaatcactttgatgggaacaattttgcacgttaagcaaatgagcattaaaattaagcctataatactgcctggaataggcaggtgaagtatgtggtgaacagcttcaccaatcatagaaaaagcataaagaatcgcgatttgtaaaatgattcgtatcactttcattataagtcactgtcctatagataaagaacagctgtcctcctctctttattttgtcatgttgtctaacatttaactatataaacaccctttactttacctacttttacttgtactatacaactatatatacatttgtattatacaagtatatatttctttgtcaatgaatgattttgtaaggagagattataatgcaagaaaaaaattcaattgaattgattgaatatgaacttactacctttattagacgagccgtctatcttgataattctgaaaataaaataggaaatctagaaagatcagcttatttattattgcggcaattagatgaatttggaccagctcgtgtaaaagagctagcagaagcatttaaactcgacatttcaactctgtctagacaagctgctgctttagaaaacaaaaagcttatttcccgctcttctgatccttcggatggacgcgtcagcctatttgacatcacaccacgtggaaaacgcatgctgcaaactgataaacaaatgcgccttgaacgctatcatagtatgttaaaaaaatggtcaagtgaagaaaaggagctgtttggcaaactactaatgcggatgaatgacgcatttatcgattaaatagaaattcataaaaattaggctgctgctgcaaggtgtttgtccctgtctattttctcttttttgcatttaatgtaaagagactattgaaaaggatgtatgattatgtctgttccgaacaaacggaaagccacgccctgcctctttcccggttataaatggtgtggtcccggatgcagtggtcctggatgtcctgtaaatgatgtagactgctgctgtaaataccatgatttatgctatgaagattatggatcatgccgctcatgtgatgagcaatttcttgactgtctttgctccaaagcaaatccgtacagtttaaaaggaagacaagcatacgccatgtatacctatatgcggctgaagttagctttaaaacaatatgactaagcataaaagaggagaattgaaaaattcacctctttcttatgccattttatctgtatgaatccaaaaacgttgaacaacagctccgtcctcttctatataatcctcgtcttgtataccaccgtttgccagaatagttcgacgagaagcggtgttccaatcatcacacacaactaatgcccgttgaactcccagctttttaatttcttgaagagataacttcagtagcagcttcgcatatcctttttgtctttcgcttggccgaataccataacctatatgtcctccgctgtttcgaagtatttcacttagctcatggcggatattaactacgcctattactttttcgtgatgcattagccagtaggtggaatcgggtacatatcctttttttaatccgatccctttttctgcatctagcaactcttgaaccattttttcaaagtaagcaggatctttagcaattacccacggaatcattttttctccgcttgctttccattcattataaaagctcatataagcctttttataagctgcatctggtttcattaaaacggcagtttccacgtaccttcctcctttttgtttattatgtttatactactaattttaccccgtaaataaaaggggataatttacatcatgtgacaaatgtgtttattcacttatttataagatatgtaacaaaaagcactcaatggtatatccattgagtgctttttgttctactgcctgttgtttaaataaattccttaaaaaacctcgtcacttttgcaagggcgtataggaaggttcgcttcataacaggttcttctttcttttgggtgtcaggagatttaatccatcgcttatggttggcaataaggatacttttatccattttgttttccatcgccatcgtcaacttttttgcaaattcttgactatcgataatgaccattgattcattattcaaaaatgtagaacgagaatctaaattaaaagagcctacggcgctgagtctttgatcataaatcacagactttgcatggatcgaataaggtccttggtattcgtaaagctttacacctgtcttcataatcgtatcacgcatacttatatacccggaaaaagccaacacattgggcgtagatgtaactgaatttgtgagtagcgtccattgaacagctggattctttttcattgctatatactttctcatcgcattggttggcaccacataaggactttgaataagaacagagcggttagctccttctgccaggttaataaacgttttccacataaaaggtcttttattaaagcgttcaattggattatgaataaaagaaacacggtttgtaggaacagtggaagcattccaattaatcttaggcgtcgcaaacgtttctcctacttgcttagctttatcatattgctgcagcagcaaagctttcatcctctttccctgatcgacctggtactgtgtgagatgataaaaggcttttttagtgtaaggatgagcccataattcatttatataattttgcatttgagtgatgacgctatcttgtttatgtttgctgtttgtaatgaagacatcacgatcatagacgaagtctggaggaggctttttagccaaatacttgtcccctatattccgtccccctattatgcctagctgtccgtctacaatcattattttgtcatgcatacgattttgccacgcccaaggtttgaacaattgaaacggttcataatacttcacttcaatattaggatgtgatgctaatgcgtagagcacgcctcttcggtttccccgcaagccgttagctatcccgtctaaaagaacgcgagtatggacgcctcgatcagctgctttaaaaagagcggccataattaaatcagttgactctcctttgcctattgagtaatatgcaatatcaatcgatttctcagcttcttgaatcatttgaatacgaactcttcctgcctggtaaccatcttcaagaagtctcactcggtccggagactcactgtgaccaaaaaagctagccggtttaattgaggtcgtttcctctccagtttttaaaggtacataaaagagaaccaccgcggttataaccacgtacagaatatataaagataaaataataagtaatcctttgaatgctatttttatcatcgcaactccagctttttgtctttttctgttatcgttcacaaataaggatcattacatgcaagaaactgcttcttagattgctttgcgctttgtctttttgacacatttattttttctgattcactatttgtatagtatgctagtacatatcatagaaaaaaggatgatggtgatggaggaatattcttttcgttttcatattacagattcttaccctttgcaaaatgaaaacgataaaatagaagctgttgtacgcaccaaaatcaaacatgcggagcgaggatgcttgtatgaaggttatcttcgtgttcatataactaatatcggggtattttctgtagcaaaagatattgctgaagcaattagcgttcgttcgcttcgtcagcagttagcggccgaattaaaaagatacgtacggccgcaccgcaattttttataactttatccaaacatttggccaagtggactttcatctacaataatatcttgaatagcatagatagaaatgggaaagtaaggaattccgtatacgtaaggagccaggtgatacagctgatagaatagcacaagcgatttatcagcgatataaaaatcttgatctggtttaatgcctttatattctccaaggaccataatatcgcgctcttttatttgctctcctactatcttagacaaaacactcacgtaattactttcttttttaaataaatcttttagttgatacgtttgtccagtcagcatattaaaggttaacggaactactacggtcagcccgtgcgctccaccagaataagcaaaattgacaagcgttaagctgagcacatttcgctcgtttgtttttaactcataataaccggtttcttctgtattcggattttctccatatccctgctgacgaattaattcattcgtgcgctgcaaaattttactgttcacgctgtgctgaacagcttgattagtcaaatgtacaactggataataaacgtttaactttttcttcaccatttgttgagaatataccgttgcaggtaacgtaaccatcgcttcctcctctttctatacaggttgttacattctattcttgtagcgttcattccattactgaagcaaaaaaatcccgtgcatatacgcacaggatttttaactttttattattttacgttattaattgttttagcagcgtctaccgtattttttaataacattgtgatggtcatcggaccaactccgcctggtactggtgtgatataacctgcaacttctaaagccgcttcgtaatcaacatcaccaacgagtttaccattttccattgtgttacctacatcaattacaatggcacccggcttaatatcatctgctttgataagtctaggttgtcctacagctgacacaagaatatcagcttgttttgttaaagcagataaatcttttgtgcgagagtgagcaattgttaccgttgcactttcttgaagtaacagcatggatactggtttaccaacaatattgcttcgtccaattactaccgcatgtttacctgaaatttcttcacctgaacgtttaattaactcaacgataccgtgtggtgtacatggtaaatagcactcatcgccaataaccatattccctacgcttactgggtggaagccatctacatcttttttaggagatacagcatttaatactgccttttcatcaatatgttttggtaatggaagttgaataagaataccatgaacagatggatttccattcaagtgatggatttcgtttaaaagctcttcttccgtaatcgttacgtcacgtttgataatttcagatgcaacaccgatttcttcacaagcctttgcttttgcttttacatatgattgggacgcaggattttctcctactaaaatcacggttaaaccaggaacgataccttttgtttttaattgagctacctcttcttttaatgcggcgcgcagttcttgcgctacttcttttcctttaattactttcgctgtcatgatgttttttgctcctttcaactgtagccatttaataaatgtacgaattatagttattaatctaacacaaaagttcggttttgttcaatgtttttattatttttattttaaatagatgaaaataaataacaaataacgtatattccgttcttatcgtactataatattttgtattcaccaaagctgtttttattcaaacgttgcttttccaaattaaaaaccgcaccttcggcacggttttcgacgatttatttttttgttgatatgcttttctttgtagtcaacggcagcacgtcttcccctgtttttagatcctttacatgcatttccttgagaggcgcacttattttcttatttttcggaggttcttcaaaattctccacccaatcacatagcaattcaaatccttgatacacataaggcaggagaggctgaagctttctatctgggtcaatttgatgattccatactaagctatcaatgtggtttccattttcaattacatagtgacgatgaaggtgctgcttaccagaatcttttaccagttgttcataaggataagcatgaatatccggaaaaataagcgcatctaacgaccctgtaatgcttatcaacggaacggaaatatcacctgtattttcaatttcacgaactctttgctttacatcttggggtctttcttgataatcatacttttcaaaaatagaatctaacgaacgatctctaactccgttttcaaaaagcgtcaagtatttttgccatggaattcttccaggtgcttgactgtcaaactcatctctatatatattaagcgttaaaaaccaataatactggtcatgatatggccataaaaactcagatccttttggcaaccctgcctgatacaaacggtgcaaagcttctttttgcgattcacctaccgtgtacagtgcttcttcggcatgatttacaacaggtgttaaggaagtaatcaagttatcgtgatcagctcgccacataaccccttcccattcaacacccccattaaaaagctgaggctcttcattttttccatcgttttctaaagcataacgaacaacataacccccgttagaaatacctaacgcatacgtttttatatcaaaatattctgtcacttctttttgaagtttgtgacgataattttcaaacaaaaatctctgagctatttttgtcacttctcggtattgaatatgccattttctaatggagtcttcttctttgactagagcgttctttgctttagcaaatggatcatctcgcacttcttctccctgagttcctttatcagaagcagcaaacgcaaacccttttgccaacacatagtcgctgaatagtaaatccgttgatttctcatctcgggtagctgggactcccgacataactaactttccattccaatcatcaggaattcgaatgagaaatttaccaccgtcaacttcaccttctacttgaacgcccgttatttcttcaggctgatacatgtaataccatccatttttttcttcttttgttccccaatagataggggccagcccaatgttcccataggcagtcgctgcttgaaattgaagagggtttttagtcgttagccagtttccatacttaccgtcaaacgttgtgatattcaagtgataacctccattcacatttgcttttgaagacactcttggggactgtacacgcatcattttagttaaatattaccatccatttctcaaaaagtacatcaaaacgcctttcttacagaaagaaagtagacatttatcacaactgagcccatagcgccgtataatattgaaatttattcaaaaaaaggagtgtcaatgactatgagttcgtttaattcttcaaaactttctacgactcttattccccctgctacttcctcctatccggtttccggaagaaaatatactcttactcattctgatacaaccggtcagctttttttaagcatcggatgttcatataacaacaaggcaatagataaaaatatgcgtgatgaagtactggctgctcttcacgtaacagaccgacaagcagttattcaaggcgaagtttttgttagcggaggtgagttcagtcgcgagcaagcgcagcttcgttatcagattttccgtcgtgaactccctcttgctttagaagcaatgttttacggagaccaagcgttttttcaacattatcccgacttgctaaatacaccgatttacatttattttatatcgtcttatcaagaatttaggggatggtcctattatcaaactcctaaattttatttaaaacaaacatgcagcagctagcacgctagtgcataaactaatgggaaatgaacgaggaaggtgtgaatgtttcatgtacagtcaatgggtttacccctatatgccgcgttattaccatccagtggttcctactacgaatgaaaattatttagaaccttatagatacaatgaagacttattttcttatatcctgcatgaagaagaggaagttaggtctacacgcgatgtagacagagtgatgaaaattttaaaacgccagtatcagtccatctacagagatgctcaacgaggcgggatggatagcaaactaacagaatacttatttcgttccattgtaagatttgttgatgataactataacaattacagcggatctattaacgaacgcgtcgaaaaagccgcgcgacagctgaaaaaacgtgacccctggatatttgaactttttaacttatacagcgtttcccccgcttcacaagttcgaattaccaacacgattttaaccgtttcatttgaaaatttacgtagaggaaatgaagtgccaaatcctagataaacaaaaaaccgccacaattgtgacggttttttgttatggtaatacagttgctcccattagatggctatcaacttgtttagctacttcacgaccttcatgaatagcccatacgattaaactttgcccacgacgagcatcaccagcagcaaaaacaccttcaacatttgttttgtaatttccatacgctgcatctacgcgacgatttttcgtttcaacaccaaacgctgatagaaccggatgctctggaccttcaaacccaatcgcaataaagacaagctgagctggccatactttttctgttcctggaatttcggtaaagatgtactgtccattttcaccttttactttttccatttgaaccgtatgaagttcctttagattgccttgctcatctgccacgatttttttcgtttgaattgaatattcacgtggatcgtccccaaattttgcctgtgcttcttcataagcatattcaagattaaatacatgtggatattcaggccacatattatctgctgtacgctcagcaggaagctgaggatgtttaccaaactgaacaacgctgcggcatttttgacgaagagcagtagctacacagtcagctcccgtgtctccgcctccaataacaataacgtcttttccttcagcatcaataaattgaccatctttgaagttagagtctaaaaggctttttgttgaagttgttaagtagtccattgcaaagtgaactccttttgcttcacgaccttctaatactagatctctttgcttctgagctcctgtacacaaaattacagcatcatattgttcttttaactcttcagcagtaatgtcttttccaacttccgtattcgttacaaaatcaataccttcttgcgtcaataagcgaacacgtctttccactacttctttatctagcttcatattcgggattccatatgttaataaaccgccagcacgatctgctctttcatataccgttactgaatgacccgcttggttcagctgatctgcgcttgctaagcctgctggcccagagccaataacagcaacttttttgcctgttctcttctccggaatacgcggagtaatccacccattctcaaagcctttatcaataatagcgcgttcgatatttttaatcgaaaccgctggatctgaaatagcaagcgtacaggaaccttcacacggagcaggacaaactcgtcctgtaaactccgggaagttgttcgttttcattaaacgctctaaagcttctttccagcgtcctttataaactaaatcattccactctggaattaagttatagattggacatccagaagtaaaagcattaatatccattcccatgtggcaaaaaggtgtgccacaatccatacatcgtgccccttgacggcttagcgcttcatcagataaaggagcagcatactctttccaatcacctaaacgttttaacgggtcacgttccttccctttttcacgtttgatttccataaatcctgttggttttcccatcgtactctcccctttcttactgagctaccgcttcttgttgttttgccgatgttttcttttcttgttttgcattttcctcaaacgcactcatagctgcttcttcttccgttagtccagctgctttttgctcttcaatgcgattcatcatgcgtttataatcattcggaatcacttttacaaattttgaaagtgattgttcccaattttccaagacaaatgctgctttatgactgttcgtatatttcagatgatttgaaaccatctcttttacttcttctgcttcttcgccttttaagctctcaaacccaatcatgtctttattacaaaggtttttgaatgcttcttgatcatcagcaaatacgtaagcaataccgcctgacattcctgcaccaaagtttttacctacatcgcctaatacgacaacacgtccgccagtcatatattcacagccatgatcgccaattccttcaaccactacgttcacaccgctgttacgaactgcaaaacgttcccctgctagcccgctaacataggcttcaccgcttgttgcaccgtaaaatgcaacgttcccaacgataacattctcacctgacacagctgttgtttccttaggtggagcaacaatgattttacctcctgataaaccttttccgatataatcatttgcatctccagttagatacatagacattccttttggaacaaacgcaccaaaactttgtcctgcagagccagtgaatcgaagagtaatcgtatcttctggcagacctttctcaccgtaacgttttgtaacttcacttcccacaattgttccagctacacggttaatattagaaattggaagttctagctcgacttgatacttatgctcgattgcttgctgtaccgcaggcaaaatcttttgcatatccagagattcgtcaattttatgattttgaggtgttttaaaggtacgtacaccttcagcttgatataaaagagttgttaagtctaagtgctgagccttccagtgattttttgcacgttcgctaacgcttaatacgtctgtacgtccaaccatttcatccactgttttaaatccaagttcagccataatttcgcgcacttcttgtgcaacaaatttcatatagttaacgatgtggtccgcttctcccaggaactttttacgaagctctggattttgcgttgccactccaactgggcatgtatctaagtgacacgcacgcatcatgatacagcctaaaacaattaaaggcgccgtagcaaaaccaaactcttctgctcctagaagtgctgccatgactacatctttacccgtcattaatttcccgtctgtttcaagcactactttttcacgaaggccgtttaacataagcgtttgatgagcttctgctaagccaagttcccacggtagtccagtatgtttaatacttgtttttggagatgctcccgtacctccgtcgtaaccgctaatgacaataacatccgctactccttttgctactccggcagcaatcgttcctacacctgcttttgaaacgagcttgacgctgattcgtgcatcacggtttatattttttaagtcatgaataagctgcgctaaatcttcaatcgaataaatatcgtggtgtggaggaggtgaaattaagcctactcctggcgttgatccacgcacatctgccacccatggatatactttgtttcctggaagctgaccgccttctccaggttttgcaccttgtgccattttaatttgaagctcatccgcattcacaaggtagtgacttttcaccccaaaacgcccagaagcgatttgtttaatcgcactgcggcgattatctccattctcatccagagtgtagcggctaggatgctcgccaccttctccactgttgctgcgtgcccctaaacggttcatcgcaatcgctaatgtttcatgagcttcttgacttaaagatccaaacgacatagcacctgatttaaaacgttttacaatcgaatccacggattccacttcatcaatggagatagatgaacgcgattcattaaacgagaacaggttgcgcaagaaaccgatgcgttcttcattagccgattcagagaattttttaaataagctgtaatctcccttacggcaagcccactgcagcgtgtgaattgtttttggattaaacgcatgatgctcgcccgtgtgtctccactggaagtcacttcctgattctaatgtttgctcaattgtttcaacataagcattgtcatgacgcgtttttgcttcttttgcaataacatctaaaccgataccgccaagctgcgaggcagtacctgtaaaatattgctcgataacctctgcactgattccaactgcttcaaaaatttgtgcaccccgataactttgcaccgttgaaatacccattttagacattacttttacgacaccttcagtaacggcttttacatatttctcaacagcataatcatacgatacgttcaacgtacctgcgttaatttcattttgatatgttgcaaaagtaagatatggattaattgcgtctgcgccgtaaccaatcagcgctgcaaaatggtgcacttcacgcgcttctcccgtttccactacaatgctcgcctttgtacggtttccttttcgcactaggtgctggtgcagcccgctgaccgctaataaagctggaatagctacggattgagctcccgcttcacggtctgtcagaacaagaatgctagcacctgcgttaattgccgcttcagcttcagcaaatacgcgatcaagatctgcttttaaatcatttgtaaatacagcagatataacggcacttttgaaatccggatgaatggcagacttcagctgatcagtttgatcgtttgttaaaaccggcgtctcaagctgaattcgatgaatgttttctttggttggatgcagtaaattcccttctgcaccaagcaatgtcattgtcgatgtaaccaactgttcacgaatagcatcaatcggtggattcgttacttgagcaaatagctgcttaaagtaattgaacagcgattgaggacgatcagacaacacggctaatggagtatcgttccccattgaaccaagcggatcttttccttctgtaataactggaactaaatatttatgaatatcttcatacgtgtagccaaatgacttctggcgaatgaccaaatcatcgaagtattcagatttttcatcctgcacttctggcaatgtaaccagctgttcatctaaccactcttgataaggctcagtctgtgccatttcagatttaatttcttcgtctgaaataattcggccctcctctaaatcgattagaagcattttacctgggcttaaacgatctttatataatacattttcatcttcaacatcaatgacgcctacttctgatgaaagtatgatgtaatcatcttttgtaacataatagcgagctggacgtaaaccgttacggtctaaaatagcaccgatttgctttccatccgtaaacgagatagcagtcggaccatcccatggctccattaatgcgctatgatactcatagaaagcacgtttttcttttgacatgtgcggattctcagaccaaggctctggaataagcatcatcgctgcatgcgctggcttgcggccggccaatacaaagaactctagcgcattatctaacatggatgagtcgcttccttcagcatctaaaattggaagaaccttcggcaaatccttaccaaatgcgtccgaaacaaactgctgttcacgtgctctcatccagttttgattaccgcgaagcgtattgatttcaccgttatgaattaaataacggtttggatgtgctctttcccagcttgggaacgtgtttgtgctaaagcgagaatgcactaaagcaaacgctgaagtaaagtcttcatcttgtaggtcaagataaaaagcatcaacttgctcaggcgttaataaccctttgtacacaattgttctacttgaaagactcgtaaaataaaaacggttttgacgcgcctgcgcccaattttccgcttgcttacgaataacatatagcttgcgttcaaacgctaagtcatcttgaatactgtcatttgccccaataaatacttgtcgtacgcacggacagctttcttttgcaacttttccgatttttccgacatttacaggtacagttctccaacccagtaacgtttgtccctcttcttcaattaatttattaatatacgcttcgatttctcgacgctcgtcttcgttatttgagaaaaagatcattccaactccataacgacctttttctggcaagttcaattcaacgcatgtctttttaaagaacgcgtgtggaatttgtaccattaatccagctccatctcctgttagcggatcgcttccctgtccgcctcgatggtcaagctggcaaagcatatttagtccttttttaacgatatcatgtgacgctacgcctttcaattgagcgtatagtccgattccacatgcatcgtgctcaaattcaggacggtagagaccttgagcttttggcatttgattgtatgtcatcttcttctcccccgttcgttttctttatctttttaagatcacctgtttacattgtaagttttcaaatcaatataaacaatatataatttagatgaaactaatctaattttgatatatatagatggaggatgcctatggaactgcgtcaattacgctattttatggaagttgcaaaaagagaacacgtatctgaggcggcagaatatctgcatgtagctcaatcagcgatcagccgtcaaatcgcgaacctggagtctgagctaggtgttagtttattcaaacgcgaaggaagaaatgtcaagttaacagcaataggaaaagtctttcttgagcatacggagacggctatgaaagctattgactatgcgaaagaacaaattgatgaatacctggatcccgaaagaggaacgattaaaatcggatttccaacaagccttgccagtcaccttcttcctactattatatcagcctttaaagaagaacacccaaatgttgcttttcatcttagacaaggttcgtacaaatttttaattgaatcggtaaaaaaaagagatattaatatcgcttttttaggccctgtacctgtagaggaccagagtattgaagggcatattttattcacagaaaatcttctagcccttgttccttctcatcatccgctcgctgaacgggataacatccggctgcgggatttaagaaatgaagattttgtgctatttccaaagggattcattttacataaaatggcctttgacgcttgcaaacaagcaggattcatgcccaatatttcatctgaaggagaagatttagatgcgattaaaggtcttgtatccgcaggaatcggtgtcacgcttcttcctgaaagcacagtgtctgaaacgactcctcgttttacgactaaacttcctattcatacgccgcagcttcagcgtacagtcgggatgattattcctagaaatcgtgatttagcaccttctgataaaattttttataagtttgtcaaaaccttttttgaacggttggagcagtataaataagagaggccccctgcctctcttattctttgctttacacactatttctcagctgatcaattgtataaatagatcttcttcccctaaagctaacaggcattgacgcttaccggactctttcttatactgaagtaactgactaaaaagaaacaaggtgactgctatggattttaaaattaattttttatcattttacgtaatacaagtagaaggaaaagaagaacaagcctctaaacaatataagcattttcaaacgcttgatacggaagaatatgaagaaagttccattaaagattttttagacggtgaatttaaaaaaattgtaaaacgcaaagtagaacgacaccccaaagcagaacaagtgcctacaaagctcgggtattttatagttgaaccaggacacgctctcgactcaaaccctaattataatttatttcaccgcactcgttttgctacaaccaaagaagaatttgaagaaaacagcgagcagtttatcaatgcgtaccttgatactgcagccgttcgaggaggagcatttttagttgtatctgctgttccaagaaaatattttgatcatgcttttgtgtttattttaaaatgtgactttgaaccaaaagtggcttcaatttcagatgaatcaactcttattcgccacgtagagatggcgattactactaaaaacatgaaatctattcaatacccatacatgcctgaagaaggcatggtcgaagaaagcgaactcgtcatccaccaagcgtctcacgcccgttactttgaagacttcttaaaattcattgactataacgagccgatgcctgaaattatgaaaacacaagtgatggatatggtgcgtgaacatgtcagcgaaacgtttgaagcggaaagcgtagaactcgaacagtttgagtcagatatggaactatgggcaacaagtgaaaagcgtgagcttcaagaacgtttagatacgcatcaagtcatggaagctgctgctcatatcgtcgagcatacgcctgatgccgagcttaaaatgaagcttggcgaaacagagattaaaggactgttagctgatttcggggaaaatattcacttagcgaaagtgaacggacgctacgtggctttaattgaagcggaatcgattctgtttgaaagaggcgcgtctccgattgagtttcataagccgggtgatttgcacgggattattgagaaaatcagcagcaagaaatgggaagaataataaaagccagagagcacaatgcagctctctggcttttatttaactgaaaaagtagctctatttatccaccttaattctctactaattggctcacggaaacattttgttcattctccggctgacctagcggataaattcttaccgtgtcattttcttcgcttacatgttgaatataaacggccgtatcgttatacgtaacgttagccataacgggtgaatcagcaatttgttttgctcgctgcttgtccacgtttcttcccccctctatgctgatatacatataaggtttgcttaaagaatagatgctattcgccccctagagcagttctaccgttttttagcggtgcggtagccaaggtaaaaaacgaaagaagtataggtaataaatgcagctccggccaacaagagcattttgtgatgatgccaaagggccgcatatgttttgatgaagattccctttgtgagtaaaatatattgatacacaataaaagcaaccactaaagcaagaaacagcactcgaaacaaacgaatgaaatcaatgttagataaaactgaagcagcttttacccagggtgatgtaggaggctgcgcttttttggtgctccggctcttcgacttttgtttctttgcaggcggagcttttgattcttctattttaggtgctggtttttgtttcccttgagccatcggtcgctttccctctttcttaaataaagtgtctaaaaaagaagcttttctattttgcatattcaagaaaggaccggctatctccttttcgcttttaaaaatactttccttttttaaatacagaatgtctttaggtatgtgcctatagcatttttcttatcttcgcatacgttatatcgtgtttgatttgaaattactatttaaaaggagcgatgccctaatgaacccttattatttcaaccctggatacattcctcagcaagttgattactcagttcaacaatattatcccccttacgtaccacagcatgaagaatacgatgaaagacagcagcttcaaaatcttggaggatttgaacgaagaattcgtgcccttgagagacaaaatgaggagcaagtcagagaaattactcgtttaaatcgagttgtggagcgacatactgaccgtataaacagattaaatcagcgcttacgcaatgtagaaagaagacttaacattccatttacagcaagccaggacggtttttaaactcaccttaagcattcccgtttcttttgagcgagaatgcttttttacatgtcttccgtcgtttttgatagcacaaaggatatttgattaaactttacataaaataaaatttgactatgaaaaagaaaaggagaaaatcacatgaaatcccctgttgttatttgtcctaactgtcattctcaaaaagagcttgctaccgttttaactgctcagtccaatcaaaacgttatctatacatgctcagcttgcagctataagctgacaaacattaaaacaagcaaaggataatcagtatctctcacctcacttagtacctatactcaatacgttcttctgtccacatacaaaaattaacgtttacgtaaatgttattaattttgtatactaatagtattatgggaaagggagttgaagaagttgaagtttaaaatgaaggaacgcgggcagctgcatttgagtcccgaaggaaaacaattgattttagacttgtacgaatcaaatatgatggaatctgtaaatgaagctttggatgctgaaacaagaaactttcacagtggaaaagccgatgggatacaggctattctacttcttttaggagtacagctagaagaaaacacttcacaatcataaatgaatgccctataaaaaccgtaaaagcagacgcactcttctggtgaatgcgcctgctttttatgattcttcctgctcaaattttacaattgcagtcttagcacgatctctcagtgacagaaggtcagactctacttttaagatatttttctttttctgttcaatcagcttgagctgctcttctaccgtatgtaacacttgctctaacttttctttttgttgacttgttcctttcacttgcctataatccatcttttgtatttcaagagtatcacttaaagcaagaaattcctgtaattcttgaagtgaaaagcccatgacttctttggcattcgtaattttctttaaaaattctacatgttcttcggtgtacagacgaaatccaccttcacttcttggaggtgctggcatcagtccaatttgttcataataacgaattgtacgttttgttaaaccgctttgcttcgctacatcatctatttttagttcactcatttttaaatcccctttaatcaattaacaatgtcaacttttcatacttgttactattatacactaacgctagatatctcaaaacaaatctgaacagctgtgcacttatttaaaaataaataagcaatttctttacccttttttagagtaaaaaaattgcttatacagtatatgctgggttcttttctctaaaaccttatcataagtgccgtttttgttaatttacgatttagcatacaaattaataaatttgtttttgagagttcttatttctatccactaaatgtttattaacttgtatgtagccttctctttctgtactagccccgcctgcgctgagtacaccgatagccacgcatgctatccaacctaatttcattataacagaaagcgcttacataataaagtgttatgctttaatttctaaaaagttataaataaaatcagcaggtatttttccacctcctgctgatttgttaaatagaaccggcacgatacagctttatcaaacagtaaataagtcatcttaataagctactttataaatcaaaaaccgttcatatgggtttttacgatccaactctggcagcattacttcttcttttaaaatgaaagaagggtgtttttcgagatgatgaagataatcctccgaactataatataaaatcaaatcaatctcacgcttattctcttcccacgaaagcaaaatattgttcactacttggataaagatttgaactgaaaaaggattaaaaaaataaaagcagttgtctagtgggtgaaccttatattcctgagctaaacaacactgaaaatgaatatgatttttgcggcccttggcttttttcaaatagcgcctctgattatctatggcctgctcataaaagtgctcgttcatttctacccctacagcagtagcattgcacaggtagttcacgtaaaaatttagccttccttttccacacccgaagtcgacaattctatcgctgcttgttagctcatactgagtgaaaagtgtttctaatgcactataaggcgtgggttcataacgatggtaatgaaatgaattattaaatcccttttgttctcccgttgtttttatatttaataaagcgtcataatattgctcattcatggccaatctcctgtttatagttgttgaaaaagagaaggacagatgtccttctcttttttctcactctactttcacacgcatttctgatattttaagaccaatctcttcgattaactgcacagcttccgctcgtttttgatcatctaatgtgctgattccccgtacgtctacgctttttaaatatcgataagaggctttaagacgttctaatgtatcctcttggtcaaatgttttcatgattatctcctccagtatatgtagttactatatgtataccacaaacatgtccgtaataaatctaacctgtttaataaatactaaacgtatctgatttatctaagaggaaatgcacttctaatagctgatatatactcaaaaaattcctgggttttcgaatttttacgttcatttctcgtattagttgcaaaaaaagcttctctttgcgctttacttatctcaatttgcacacccatccgcctagctgttttattggttatatttctagggcttgtaccggaaaaagggtcttgatctgataaaatttctgcactaaaacctttggaaacaagcgcttcatgtaccttagaccttaacgctttgtcagcaccgccgattttagtgtgtttttcacttttatcattgtatccatgaaaagatactgcatagtcttctttcgatataatagttagcgcatgaggttcatcaaaatgagtggatgtgatatgaagatcggcattccctgctttctttaacccttcaaatatatagtacgagtattcgtttcctgctagcccaacagcaagttcggatgttccagtttcgatacctccgccgtgtatcgcgagcataataatgttagaaggtctgatttcaaattgaattttatagtcctggttgtatacttcataagaggcaagttcagagaagctagcatatttatctggcatcatatatcctccttgtgaataagacatagtaaacaaacttattagttctttctttaatgtaccacatcttttctttcatcacatactatgtgattgcaattaccaataaatatggtacgattaagttcgagtttcttgctcgttaaaagttcaccagatagtcaaaattttcatttttaagcattccatttttatcttataataaaggatgtacttatttttaattggtaattcgacatttttctttgttttttttaaaagttcaaggaatgttaacaaattttacgagcaaccttgatgtaattacgatttttttttgttaaaatagtttagttgattaataaagattaggtttattcatgcaagaataagctcaaaaaggagaattgctgtgaaaaataccgaagttatcacaaaggaatcacttcctatcaatcagtatttttcccgggaagtaatcagtgctattataaaaactgggattattaaatcgaactcactaggaatggttgctgggctttgtctcgcaattgctgttaatgacttaagctttgtgacacaaattcctatcattattttggctttaattgggacatcctttgtcgtaggaggagctggggcagttaataacttctatgaccgtgatattgatgcgatcatgaaacgtacgaaagacagaccgacggtaacaggagcggtcaaccccaaatttgctctatggttaggactggctttatttgttattggtgtaggtattttatttttagtttctaacatggccgccattatgggtattttaggatttttcttttatgtagtgccttatactatgcttacaaagcgtacaaccatttataataccgaagtcggaagtatttctggagctatgcctccaatcattggctgggccgctatttcaccagacttatttcatccggtagcaattggattgtttgtatttatgtttttatggcagcctcctcacttctacgctattgcgattagaagacttgaggaatataaagccgcaggtgtcccaatgcttcctgtagtaaaaggtatccgtcgttccaaagtccaaacgcttgtatacctagttattttgctagcggcatctttcttatttttgtcgtttagtaaaattatcgcatttacaatgttcggtttaacactagtgtggatgcttcttgggattgttggatttaaaaaattagaagatacaaaatgggctactttaatgtttgtgttctcattgaaccatcttacgataatttttgcccttatgattatactgtcattttttaaataataaacgttcaaaagcaggtagctatcagctacctgcttttatactagatacatcttttgctttaagcgaaattattcctccgtaccttgccgaaactgctccacctaacgcgttagcaaagattgtgtactgcttctgtgactcctcactttcaggtaatcctttttcgtgaacacaccataaaattcctgccataaatgcatcacccgctcccgtcgtgtctatcgcctgcacttcttttgcactcacatgaagcgtttgatttgcagtaacggctgctgcgccattttctccctgagtgacccatacgtacggaatatgatacgctctcagtttttctaggctttctgtcaggtctgctgaattcatcaaaaataggagctcatcttgagagattttcaaaatgtctgtttcggacaaaaacggtgtcaggatatttctacatgctgcttcattttcccatcttttcattcgaatatttggatcaaacgctacaagcaaacgatgtttttttgcgagcttcacagcttcttttgtagtttcctgagaaatcgggtgaaacaacgtacctgatccaaaataaaaaatcgctgcctgctcaaataaagcttcctgcagctcatgtttatacacttgctcatgaggtgtagaatctatgtaggaatgaaaataacgatctccttctttacttttatgtacatacacttcacaaacttttttagcctccgatattacacagccgctttgattcactccttcaattaaaaggttctttcttacaaaatcacttgtttcatcactgcctaacttgcagatataatatgcttttgctcctaacttctgaactccaactgctacattaacggttgtgcctcctaaaaaagggtcaaagctggtgttaaattcgtttttagcaatataatcaataaatgcctcaccgtatgaaataattccttttttcaagttaatcctcaccttctttcttctgtctcccaacgcatttgacacatacacacgcttttcctctgctttctaaaggaatttgtttaaacagctcaggagtaaaaattttctgcatgcaccaacacttttctatttctctgccttgtacagaagcacagttatttttttctccgcagataggacatctgctatcatcgcctgaaaatggcatgaatccccctcctttttttctatgcaattgtgtagattatctttattagtatacaagaggtggttaaattgtgctttttgctttttgatattttcgttttcaacttcttctattcttgatactatacatataaaggaaataacatattgcgaaaggagcctttatgacgacacatttatttcaccaaaaaccccttgctacatggatgcatgaatatcctttattaacacctttaatcaataaacaggaaatactttggataaatccttatataaaacctgctcaaggagccctttcttcactttctttacataccaaagatataaaagatgcaaaagaacgactttctcgcttttcttcttttcttcaaatagcttttccggagctgaaagcatcaaaaggaatcattgaatcacctcttcaagaaattgcatacatgaaagactatttaaatcaacaaatgaataacatgctgcaaggaaaattactgatgaaatgcgatcatgatcttcccatatcaggttctattaaagcaagaggcggcatttatgaagtattaaaatttgctgaaagtcttgctatcaaagaaggactgcttaccgaggaagacagctacgctcttctagctgaagaacgatgtaaaaagttattttcttcttattctattgcagtaggatctaccggtaatttaggtttaagcattggtattatgagcgctactctcggctttaacgtcaccgtccatatgtcagcggacgctaaaaaatggaaaaaagatctgcttcgttctaaaggtgtaaccgttattgaatatcagtctgactacggaaaagccgtggaagaaggacgaaagcaagccgaagcagaccccgcctgtcattttattgacgatgagcagtctagagatttatttcttggttattccgtcgctgctttacgtttgaaaaagcagctagccgagctgcggattcaagtagacgccgaacaccctttatttgtctatttaccttgcggagtaggcggaggtcctggcggtattacgtttggattaaaagcaatatacggtgatcacgttcactgtttttttgctgaacctactcactctccttgcatgctgcttggattaatgaccgagctgcatgatggcatttccgttacggatattggacttgataatgtaacagctgccgatggactagctgtagggaggccatctagctttgtaggcgaaacgataaaatcgcttattagcggaatttataccgtagaagatgatcagcttttccgatttatttatgagctagccaatcgtgaaaatatgtatatagaaccttcagcagcggctggtttaaaagggcctctccacctgatggaaagcgggtcttcctatatacaagcgcaagaactagaaaacgatatgtcaaaagctactcaccttgtatggtcaactggaggcagtatggtgccagttgaggtgatgaatagctattacgagcaagggaaaaatttaatgaatagataacgtcaaaaggcatgtagaacaatgatgttcttcatgcctttttagacgaagtagctttcagaaagataggatgccaaatctcaaatggaaagtatcccgacttatagctgccgcttgtacccatagttgcaatttttattttcctgtatccttttttccataaaaaggtgcctgcaaacacttcaatttcttctacttttttccttctaataatcgttgtttttcgtgttaaaaactgcgaccggatactgataaagacctcattcatcatcaagccgccttgacgatagcccaaccagtgaataagtacatatgcaaggcacagcacagcaataatccacacaaacattgatttccaaaagctgatgccaatccctgccgctgcaaataacaagagcggtactagtaatgggtaccatgcatattgaatagctgtatttcttggacactttatatattcatagtgcggcacatatacgttcattaatgctgaaatctctttttgttggataaacgggtgcaaatagaccttttcttttaaatcagaggttacgacatttaacgaaacggaagaccatccaaataagcgtcgaaccaacccttcctctatcgtaacagcctgtattttatgaaaaggaatcgtaagggatttcttatttaacagtccatatttaatatgtagataatgatcgtagcgttctactgtaaaaccgccaaatcgtatcacatataaaacgatagacagcaaataagcaagcgccacaattacagccactaatacaaataaaccaagcattgattgatgaattacttcttcgtaagctgtcttgacccagcggtttatatacgtatcaatatactgataaagaaaaccaagagcagcaaaaatatagccgaaattcccggaaaacgcagcagccaacgcaagctgttttaccgacactttcatcgctcgttcaggaattttttctcttacttccggctgacttcctgacagctttaacgtatctttaaggtagtgtgcttcttttagtgaaatgccggataaatcaatttcagcatccgtaccgctgctggccgtgtcgatacgaagccgggctaagcgaagaatcctaaaaacaaaaggctgatctaactgaatcgattgaatgcgatttcgttgaataaatcgtttttcttttttaaaaatccctttgtacagacgcacttccgtttccgttacttcatagcgaaattctctccaagtaaaaaaagcaaataaagcaactacgcctcccgctaatagcgtggcccaccagtatgtaaacaataagtgccgattgactataaatacaaacacaaaaggtagaatattgttttttatatgttcaataaatgcaattgcaatatataacggatgcagccgcttactcatcttcatcatctacctctgctagtctagcaatatactcccgcagtgcttcagcatctctttgtccgagtgcaggaatttcaacacttccagctgctgtgatgattttaacagatgccaagtcaaattttcgaaaaatcggccctgtcaacgtttcaacgtgctgcactttcacaagcggaattttcgtatgataccagatgaagagtcctctttgtacatcaatttgagtatctgttacttcatacgaatacacattcatatatacattcggagctataattgtatatataataaagctaacgactaatagtccaacggatatccacccaatgattgaccaccaatcaaaaaaatgaacgagtagaaaataacctgctgttgcaagaagccacaggctatgcgtaaaaatggattgccagcgcattgcttttttagcctcgacgggcaatttgccctttaaatgttcgaattccataaaaactcctttctctaccttttttactagttctattactatattacgctaaaaaaggaaaaaagtttcatagtttgctattttcttaatattttttgataaaaaacaagaccgcctaaacataggcagccttgttttatcgataaacgctgtctttctctccgtatacagcagcggctctttctactgcttcagataccgcttcatgtacagccagattaagaggatgaggaactaaatcacctggacgcgtcgaatttgcaatagcttcagctgcagcaacaagcatcgtgtgggtaatatcgcgcactcccgcatttaatactcctctgaaaatacctgggaagccaagtacattattcactgatcttccgtcagtggcgtaaatagctcctgcttcaagggcatcttcaggctcgatttctggctttggattggaaagcgctaggatgatttgcccttttcggatccattctttttttattaagccaggtacacccgttgtcgcaatgacaatatcacagctctccataagctcttctaacgaatccgctacttttccgccgtagttaactaagcgctcattcgcctcgggagacttatcagctcctatcacttgttcgacaccgtaagccatgaacattctgcatgtagcgataccggcagctcctaagccgatttgtcctactttagcttcttttaaattcacacccgtgctgcggcaagctgagatagctgctgctagtgtcaccaccgctgttccgtgctgatcatcatgcataactggaatatcgagctcttcttttaaacgtgcttcaatttcaaagcagtgaggtgaccctatatcttctagtaaaataccgccaaatcccggtgaaatatttttaaccgtttgaatgatttctcccggctcatttacattcaacaaaatagggatagcgtttacattggcaagttgatcaaataatgctgcttttccttccataacgggcattcctgcaactggaccaatatttcctaatcctagtatagcggtaccatctgttacaatcgcaaccgtgtttccaatgctcgtataaatcttcgctttgtcgggctgctcttgaatagcacggcaaacgtttgctacaccaggggtatatactcttcttaaatcagcaattgactcaattttcattttgcttttcatttgaattttgccgccttcatgcgcatgaagaacttcatctgatactgtatgtaaagtaataccttctaaactgcgaaccgcttcaagcaattcttcaagctgatcttcactttctacttgaaccgtaatgcttctcatcgtgtagttatgtcctactttgacagtttcaacttcgccaatatctcctccaacatttccaatggctgttgctactcttcctaagtttcccggtacagtcggtgtttgtaccattaacgtgcgtattaaattgttcatcatttccccatatcccccttgtcttaatcccgcaagtacgtatgcttactaaatgaagcgtttaaaacggtcaaattttctatgagttcatgttatctacttatcttacaagtagatctatacgtactgtcttttccattaaaagaaaaacaatagataacgctttcaaacagacgtttcgctttgattataagcaaagtttttagaataatcaagcgatgacattgtgaaaattcataaatcattaagaaggaatttgttcttcacaaacagaaaagacttatatagagaagaaataaaggagtgaatcaattgaaatcaatttgtgtgtttgcaggatcaagcgctggaataaaaatggaatatagagaagcggcggtatcgctaggacgttacatggccaaagaaaactaccggctgatttacggaggctcacgaatgggactaatgggagaagtggcaaatgaaatgcttgaacatggaggcgaagttatcggcattatgccccgcggtttatttagcggtgaaattgttcataccgcgctaacagaactcatcgaagtagagagcatgcatgagcgaaaggcaactatgcacgagctagctgatgcttatattgcgcttcctggaggttttgggacatttgaagagttgtttgaagctctttgctgggctcaaattggtatacataaaaaaccagtggggttattaaatgtgaacggctactacaacccgcttatgcaaatggttcagcatgccgtagatgagggattttctaccgattctgctatccgtctcatcaacatttctgatactcctgaacagcttatctcttcaatggacacctacacgtctccttcagaagaccaaaaatggaacactgaacgctaaaaagcgagcgcataatttgcgctcactttttaagctttattaaaagtaatctcatatttttttacgccaaaaacaaaagggctgcctattggctttaaagactgattttgaactttcgaaaattctcctttttctagtaacttagtaaaagcaattttcccttccattcttgcaagcggcgcccctaagcaaaaatggatgccaaacccaaagctcacgtgaggatttgttttaccatgcacgacaaaagtattggaacgttcaaacttagctgaatctctgtttgcacttgctgcccagctaattacctgctgtccttttttaatcttacactctcccagttctatatcttgagcagctatgcgtccaatcgcttgaataggaggatagcgaagagtttcttccaccaggttcggaactagcgatatgtcttgacgaacttcattttgcacgtctacgtcttctgtcatataccgaactccgttcgtaattaagtttgttgtggtctcattacctgctactagcaataaaatacaaaaccccagtacttcctcttctgttaaatgctcgccgtcaatttctgcttctaaaagaagcgaaatgagatcttcttgtttattttgctgacgctcagcaataatttctttaaaatacccttgtaaaaaaatcacgccttcattacgcttttgcatcattttcgcaaaaacttcatctgaattattttcagcaccgctcactaaatcatcagagtactttttaaacagcgctcggtcttgtataggtactcctagcagctctgctattacaataatcgggagtggtccagcaaagtcttctactatatcaaactgttttttactgctcacttcatttaataaataaactgcaatctcttcaatatgaccctccaagtgctgaatagctcttggcgtaaacgctttgtttactaagtttcgtaactttgtatgttttggagggtccatcattaaaatactttcttggcgctcttccattgctcgtttggacgaaaaaagcgatggatttttaaaaatatactttactgtttcataatcaaatacatcccagcagtttcggctttcatcgtaacgaataggtgcctcttgacgcagactgttataaatatcaaatggataaagctgctgttcaactgatttaatttcttgcataggaatcaagttagcatagcgattttctctttttactgcttttgaattcatctcgtattccttctttcgtttaaaagtgacctcgttaagttttttaatcttctacaggtgaaaagaatttttttccatctttatatcttttgatcagactatcacaagatttttccacttccaacggacataatcagaaaatttcgtcaattatacagaagacttattttatttaaggtctaaatcaatgattcttttccatttttttagttcatttatcttatttcataataattacatagatggttacactacaaataagtacgcaagaaagtagggatctcatgtgatagatgcccttatgtggggtggtgtctcaggctcggctgtattaattggagctattatagctatttttgtacctttaaaaaaacagttgactgcttatattatggcttttggcacgggcgttttgttaggagctgctgcttacgagctcattcaagattcggtaaaagaagcaggaattattgcttcttctttaggtttcttaacaggcgcagcactttttactcttcttgacatatccttagctaaaaaaggcgctcacaaaagaaaacgttcggaccaccttgtccccgctagctcgggactagccatttttattggtaccattatggatgctatacctgagtcactgatgattggcgcaagtttgattgaacagcaccacgtcagctggttgcttgttgtctctatttttatcagcaatatacccgaaggaatctccgggacaagcggactactaaaaagccaatataagcaaacgaaaattttttcattatggctttcggtcttctttatatcagctctttgttcttggattggatatctatttcttcaaaatgctaccccaaacatgatgggctttattgcctcattcgccggtggtggaattgtatccatggttgcttctacgatgttgccagaagcttttgaagaaggcggtcctgttattggttttattgcttcattagggttattaacttctattattttggattatctgtctttttaatgagtaaacttatattttgtatgaaacaaaatatataggtctttcgtctttacaagtagatataaataaaaggagttacaatgatgaaaaaaatatatgcttctcttacactttgcacagtgctcacttgcctatcagggtgtgcttatgcacctcataataatctgtctgccgaaagagtctctgcttcttctattcaacatacttcttcttcaaaacatgaggcttcagtagaggaaattacaaataagcttccaggacacgtttatttaaaagatataacctttcaagatacgcaaaaaccttattacttagcaattaattacgctgcaataaataatcagcatacgtttgaaaaaagctggacgtctgtgaaaactaaacgcatacttttacataacgcaaccatcttactttctgccgtacaaaatgctgacagcgttcactttactattaatacgactgttcctcagacaatcaccattactcgaaaagagttaacagacttctacggaatagatctggggaattataatgacgtgaaacaagtatggaaagaaaaattcgaaggacagcaagaaaaaatcgaggaattttatgatgcacatccaattacggaaatgcagtaaaagcggcccatggccgctttttaaagttgttttttcataaacacctgctcaagtttgattccttcatctgtatataaatcttgaaaaccaaatgattttaacattttcacgagtaagctatttcttttttcaggtacattatatgtattgtaagcaattggtccatacatattaaaaatggttgctaataaaaagccgagaacatcctctgtatttgagatattttccttaacgcctccttgataaaaagtaacggaattcacgatgcctatggaagaaaaattcttttgaaataacagatagccaacttcttcgtttttttcattcaacgcaataaacgattctccatcacgaatacagtcaaattgatttttccacggaacgtcgtatgtataaaaagataggttcgaaatatcttttgcaagccttcgctttaacgaatacgtaagctgattcttctttttaagtaaagaagcgtgaaaactacctctatgctttaaaaataaaagcgtatctacaatctcatatccgtatttctgataaaggtgaatggctttttcattcactttaaatgcttccagactggcttccactactccttgctgctggtatctctcaagtgtagcttttagtaaggcttctccaattcccagtttccggtaaggtaaggctacgcttgtacctccattccaagcgtgtttttttcccttgaccttttttattccatttaacataattccagctggtgtattattataaaaagccataaaagagtagtcgacagatagctgatccaaatcaaatctacaagtgaattgatctagtgacagctcaatcggaagataataatcttcaaaacctttattgaatgcttgtagtgcatcagaaaaagaacactggcttagaggcttaattataatcacgggacattccttccttttgtaaaaagataataagctagaaaatcattataagaaaacatcatcaataaccttctgaatttttgcggtttttaaaagaaaagaaagagacataccgtttaaacaccctgtctcttcctttcttttaacacttgattctattgtcttttaacctctacatccgacgctttcacaaacgcatagcggtgattaaaataaatttgataatattcgtcttttccaacaatcattttatgatcgtttggattggttgtaaaaattggtgcatagtaatagtcactcgttactttttctatccccacgtacacctgctctggagaaatttcatattgaagtggcaccatagctttaactggtatatcagaaggataggctgaagcttccggaaaagctcctccgtacacttgaattctttcttttcctggttttggcgttaataatatgcctgtacctttacttgtatttttattatgcggattataaaaccacgctttttgccctccgtaccaaatcgctgtccattctccttttgtctcagctactgcatacgtttggccagttacaactttgcttccccagtctaacgtttgtttcgttcccggccctgaagctgcaggctcattcagtagcggtgaatcattgctaggagcttgatgcaaatacacaaagttggccggctgctttggtgcatccgatacctctggctgattattttgaaagactggattaatcgtaacggctagtttgtttgtgtgcttgcgctcaactgggcttcctaccaaatccatgtagtgtccccaatcccaaaacggcccgggatctgaatgcatacctgattgagccttaggagacaagcctggcacctcgtcatgaccaataatgtgagctcggtctaatggaatattatattctttggcaaggtggcgtacgagtcttgccgaagaacgatacatttcttctgtaaaccaagtagatccttcaagggcgaatccttcatgttcaattccaatactgtgcgtattaaaataccagtttcctgcatgccatgctacatctttgttattgatcatctgtgcgatgtgaccatcacttgaacggattacatagtttgcagctgctctattagggttagcaaacaaatcaatcgttccatcataacttacttctgtatcatgaataacaatatagcgaacatctgatttttgacggtttgcaatatcatagtttccgtaatctgaaggactttcgctgaatttcccgtaaaatgcaggtatgtattcacattttaaagatgccggacaatccgctttattcgtattggaattttcagcacgaggaatcgacatatctatattttgaggggaaattttaagatgctgtccgtctgatgttgtatgctctgctcctttttccaacgtttcatatacatcatcggcaaatacttgagcgttttctttatcctgagaagcactgtaagcggcgactgcatcgtaccatttctgatcagtggacggtatatttccatttttgtcttttgcgataaaagctagcacagcagcgccaccccgaatattttgcacaggatctttttttaatctttctttatctgagttaagcagcttagcagctaaggagagtgtttgctgtttgtcatatgctggttttgaaggtgcagctccgtttccttttccatcttctaaagaagggatgtctgttaaatgcataagaccgtatcccccggctgcactaggttttccgttatgattttcccagcgcgacttgttgtaggaaattgcttttaaaagcgaagctggcacaccaaactctttagatgcttgtgcaaatgctagctccaaagaatttgactgattctctgcagccaaagcgactacaggcacttgtagcgtatgaatagatgtataagctgtacacataaccccggccgcaagcatggctacccctatcttatttaattttaatcttttttttagtttcaaacgtattcctcccccgtaaagtatgtaaataaggtcaataaagacatgatatgactttacctcattctcaaccatttcgtcttctttctttctattcccttgagacaatagtctagaagattcgacagagttactaggaggaaagatgtggtacgaggaaaaatcataaaaatcatccctcttctttaaagctgcgctctcaaaaatggttgagtacaacagcggtccattcatcccttttgctgcctttttaataaaacagcaatattgtagataatgacattccttctataattcaactattactaaaccaaatttcttaatttaccagttttttaacagactgtacgttcgacattttagtaacttttcaccatagttaaccatggaaaaggttgctattattaaagacaagagaatgtttacatatgattgaacgcagcaagaactgctcttgaaaggagataccttatgagaggacacagcattccagcaattaagttgaatgaagaagaaaaagaaaaattagaggaacttattgaacactataatttaaaacgaacgtctctcattcgaaaatttattatggatggaaaagttaagcctcctttaatcggcaaagaagcaggtgtggaactattggttaacctgcgaaagattgagtctgaactaagccggctaagcaataatatgcatcaaattgcaaagtacttacataaaccaaaagataagcaaaaccattcacagaatcttgaagaaatcctattagaaatgatgaaaaaacaaaaacatgtacaagaagatgtagagactatttcagagcagcttagcgatcatttatacgttaaatagagaaaaaacgctcttttcatttcagaaaagagcgttttttataaagaagtaaggatttaaatgctttttttcatgccgcactttgcgcatgtacggataaaaataaagtcttttactaagcttttaaatttcacatgtccacaattatcgcatctgcctgcaactttatccggaaactcctcatatacatatacttttgttaaatcaatcgcttcttgttgctcttccatttccatcacacctttatgcatctttacgattcagttctttatattctatcaaaaataagtaaaattactagggtgaaagcttcaaaaaacaagcaggttttttcactatttttttatccgttcagctttataccaccatttctctctatctaaaaatgcttttacattcagtatttttttatcgcgaagggtaatgatggctaccgcagctccttctttggaaaaggttacggctgtttctaatttctcttttgtcacaaacacttttaatgtttccatattctcttttgttaattccgcagttgtgatggtttctccttcaatgattgtatcttttttttcaataaaatgttgtccatcaatcacccaggctgcacgtgtttcaccataaacttgaaagaaggtattcttttttaaataacctgttctctctgacatatttgcatccttatacgtctccgtatcctcggttgtttttatccataaaggtttatataaaaaagtaggctttggaaaaccttcctcgtcagaatctcccacaggatttgtagatttaggctccaagtttaaaaactgcgcaatcccttttgcatatgccacccccatatcttttagaaattgaggattttttaaaagctttgcatcgtgttctgtatcaacaaacccaatttcagttagtacagacggcatatatgaacgccttaacacactatgattagctaatttcctgcctcggttagagtgattgtatttagtgagaacaaatttcacatgatcgtgaatatcgtttcgtaacacaatggtttggttatttatatttttgctataaataaaatcttcatatcccgtttcgccgcctgaatttatatgaatagataagtatacatcagcaccccacgcattggctttgttgacccgttcatttaatgacaaaaacacatcggttgtacgggttgtacaaagagaaaatctttgatagtgagtagaaagaaaagagatgatgtactgttgaacagctaacactaagtctttttcatatagcccgctggcgacagcccctagatctgcccctccgtgacctgcatctaaataaatttttttcatataacctgtctcctccttatccgtagcatatgcatgaataagcgaagacgtttgttatacaaaactacttttatgtataaagctttttgctatggctcatttagaagtctttacaactgatttaccatagctggtaacatcaaaatatgtatttgatccatcgtcttcattgatcacaacatctaagtcatgaaaataacgatgaagttcttttaacagtgctttatctttcgtctgctctagctgtccagcgagcttctccatatgcttaaagtctttctttaaaacagaatcttttacttcaatcgtgccaatcgtatttttaatggctgctgcttcttcttgtacggcaggccagtctgggtgctcaatggcaccccaccccgtcaaatcatttagtacatcatgatgttcagcaataaaatcttttgcctgctgatcgctgctttccagcttatcaactttttgttgattcactttaatggcacttgcctttatactttgctgtgataaaaaaggaatttttccgttttggtacaatatccatcctgtcgctcctcccccgactaaaagaacggataaagatatcgaaatgatcatacgctttttcttacttttatgtcttttttccatttgactcctttccgggtattcaaaaccctttaggccttatgaactgaaacgaataacctacaaaaagaattttaccatatttttaatattaaaaatattaaaaaaagagactccttcgagtctctttgaatccacttcagttaacttttacctgtgtgtagcgatttttaggaacattcaactgcaagttacttcttaacgtactcccttcgtattctgtacgatacaggcctctttcttgcagtatcggtacaacatgttcaacaaagtcatctaagccatgcggaacgcttgaatgaataataaagccgtcagctcctttttcttcgaaccactgttccatcaaattagcgatatgctctggcgtcccaataaattgtgttttaggtgtagcaattcgtagcgctgcttctcgcagtgtccacttatattttttggcgttttctttaattttgtcggttgtactgcggaaactattacttcctatatctcctaagtcaggaaatgcatcatctaatggaaactgtgaaaaatcaaaatgatcgaaaaagcgtcctaagtagtttagcgcatgttcaattgtcaccaattgagaaagttcttcatattttctttcggcttcttcgtttgtactaccaattataggaccaattcccggaaaaattaaaagttcgttttcattgcgaccttgcgctacggctcttgattttacatcttggtaaaaagcttttgcttcttctaaattttcttgtcccgtaaacactgcgtcagccgtttttgctgctaaatcttttccgctttcagaagagcctgcttgaaacactacgggctgcccctgagctgagcgtccaatgtttaacgggccttccacagaaaaaaattcgcctttgtgatgcaatcggtgcagctttttctcctcaaaaaattgtccggtttctttatttcgaataaatgcatcatcttcccaagaatcccataatccctttgttacttctagaaactcttcagctattctatagcgtttgtcatgagtggggtgctcttttccatagttaagcgcagatccttctaatggagatgttacaacattccatcccgctcggccgctgctaatatgatcaagcgaagcgaattgtctagccaccgtaaacggctcactatacgaagtcgatagagtgccgactaaaccaatatgagaagtgacagaagcaagtgctgatagaatagtaagaggttcaaaacgattcaaaaaatgcggaagcgatttttcattaatatataacccatcggcaatgaacactaaatcaaattttccttcttccgctttttgaacctgctgcttgtaaaaaccgaaattaacgctggcatctgacaaaatttcagggtgtctccacgtccccatatttcctccgactccatgaataatagcccctagctttaattgtctttgatgtgtcatattaccattctcctttttcatacccattcataaattctcgtaattgattggttaaaccgcctgctccaaagcgaaggactccttctttttctgtctttctttcatttgcttcttgtgcaaattgcaaaaaagcgataacgtgaactcttctagggtgaatattttcaattccttcgtcataaaaccattgatcaattgtattgtaaatccctttattgactctgaattgactgtggcaccaattaaaaaactggagatccggcaaatttaaatatctcgcttgccctagcttggaagctgtagcttcactagatacatagcccatatgttgaaatctttgctttgcttgtagcgtatcagctttaatttgatgctttaaaaactcaatagaagggaactttttctctcctcgcacccgaaagattatgtcgcattgaactgtctctccataaataacgtcgttaaaatccaaaatatgaacctcaaatgttttagatagttccgatccaaatgtcggcttaacccctacattcataactcctatatgttcaagtccccgcaggtaaacgaggacaccatacacgccattttttaattcctcatgctgagtatctatattagctgttggaaaccctaagtgtcttccttgctgccttccaggtacaacctggccttttataataagttttttgcttgttttagcttttaatgctcctctattcactacgttcacccttcttcccttaagtctagtaaaaaataaaaggttctttgcacaatgtcacacattgtgcaaagaacctctagtgatctagtcggtttgtttaatttgatgattttatcatatacttattattcctatgagtcaagttggtttttaattaaaatattagattgttttttcataaatataagagtaaggagaatgcgttgggctaatacgcttgaaaaattgctttgttcgttcttcttttggatttgaaagtatgtcttcaggatgaccttgttcgacaatctttcctccgtccataaataccacgtgattagaaacttcacgggcaaaactcatttcgtgcgtaacaatgatcattgtaattccttcttcagcaattttacgaataacagacagtacttcacccaccagttcagggtccaaagcagacgtcggctcatcaaataaaatgacttcaggatttaaagcaagcgctctagcaatgcccactcgctgctgttgacctcctgataactgacttggataagcatctgctttttcagcaagcccaactttttcaaggacgtctaaactgcgttgtttcgcttcttcctttggcagcttttgaacaataactagcccctccataatattttcaataacggttttgtgtttgaacaaattgtattgctgaaaaaccatcgttgttttttgtcgaagagttaaaatgtctttgcggtttggcttttggcactgaaccgtaaatttatcaatcgaaacttctccttcatctgctttttctaaaaaattaatgcagcgtaaaaacgtagtctttccagaaccactcggtcctaaaatggtcacaacgtcgccttttttaacaattaaatcaataccgtccagtactgtattatgaccaaatgttttttttatatttgttagtgcaatcatacaacccctcctcgattataaacagttaattttcgttcaagcagcgctgttattccttctattaacatcgtcagcatccaataaataagagcagcagcaatataggcttctaaaaacttgagattattcgaagctacgatattagcagcaccgtttagctctttttgcgatacgatgaatgcgatagaagacgtatgcaaaaagccgatgaagatattacataaattcggtaaagacaaagcaaacgcctgcggaaaaacaattcgtttcatcgattgaaaacgattcattccaatggcatacgcagcctcaatttgtcctttttctacagctaacaaaccagagcgaataatctctgacatataagctcccgctgtaaaagacaaagcgattaatacaaatacgacaataggaatgctgtttgcattgaagtcccatccatagtaactcgatagtttattaataaatagcgggaaccctaggtaaataaccataatatgaagaatagcaggcgttcctcggaaaaatgatacgtatacgttggcaattggcattattattttcactgaattgattctcacagccgcaacagcaataccaataagcaacccgcctagtaacggaccgatggtaataaggagcgttaaaggtaatgcctttaaaatttctacaaatgctgtccatataaacggtacgtcaataatcatgtttacacctcttttagtaagctcgttttatacatgaacaggctgatcatgtttttgcagcttctgttctgatttcacaaaaaaattctctaatataatcgccaccaaataataaataatggcaagtgcaatatatacctccactgcatgagccgttgcagcgataatggtatctcctcttcccatcatatccatcacaccaatggtaaaggctaaagacgtatcttttaaggacccaatcacaagatttccaaagttaggaaaggctacaacgagagcttgcggcagcacaattcgtgtgaacgtttgttttccggtcattcctatactataagctgcttcagtttgccctttatctacactattaatggcaccgcgcatcatttcagaaaaagacgccgccgtgctcagtgaatacgtgataataacaaatacgagcggagccattctagaaacgtcaatatgaatcaattgtaaaagggcaggtatcccgtaaaaaactaaaaataattgaattaaaataggcgtccccctcataaaagaaatataaactgctgctatttgacttaacaccggtactttataaatacgaggcagggcaataaacaatcccaaggtactgccaatcacaagtgaagcaaccaaaatccaaattgtaatatgcaaataagataataattgaggaatagaggtgaaaatcagctctatatcaaatgcttttcccatctttttctctcctttgtttccctctacaggtagcgaaaggacccaagtttaaggcttgggtcacattaagtgctttagttatttccagctgcttttgtataatcttctcccagccattttttacttaattttgtcaatgttccgtcttcttttatttcttttagcgctttatcaacgtctttttgtaaacctgtttcatttttgcgaagcataaaatatacttttgaatttgaaatagcaggccctacaactttttgctctgcgtccgcttgtttattgacaaagtcaactgcaaacggcgtactaatcgtggcatccgcacgccctgttttcagctgcgtttttgtatcatccgatccttggcctgaatagacgatattaattttatttccatgttctttgttatacttatcgattaagttagcagaattactcgttgctcctacaattacctttttaccgctcaaatctttaattgatttaatagacgtatttttttcgtttacaactacatgtagtggaaagatattataaggttctttattaaaaaggaacttttgttttctctcttcattcacttccatctgatgggctactaaatcaattttgttcgattctaagctcaaaagtaaattagaaaaatccattgtcttaaattcgaacttatagtttggaagacgtttgtctatttctttaacaagttctacgtcataccctgttagatttcctttatcgtcaagaaagcaaatgttcggaaattgcgtacccgttcctacaataattttttgtactttgtctttgcttgcgttagccgctgtttctttatttggtgttccgcaagcggctagtaataaaagaagtgataaaaagatagctgtcagctgtagttttttcatgtgttttgtccctcactatgtctcaaaataatttattgttttaatgaattaataaaatagatgttccagctatttaacgattggtgaatagtcttcaattaacttttctatttgttcataatctttttcaattactcctttaaactgcccctcgtctccaatttcaacgaccggtacatggcgaataccgtatttaatttcaagtaaatcccgcaaataatcttttccttctacatcgatactttcatattgatatcctttctcatgaaaatatgcttttagttcctcgcaatgatgacaaccttttcgattccataataaaatctttgctgacatggtttttcctcttttcttttaaattattaattagctttttgtaactccttgtgtttttctaactcgtatctttccggatgtaagatttttcttaagaatacaccttttccttcttctccttgatcgacttcaaaaaaacgttcataccctttcctttcatacataggaatcaaccacggatgtcgatcagaagtagccaatgtaacggcaggttcccccaattgatcccgaataattgtttcttcaacccatgttaagagtttagaacctactcctttctttttaaccaaaggatctaccgcaaaccaccataagaaaggccagttcgttatttctttatacgttcttgctgtaatcgtagctacgattttttcatcactttccagcacgtagcagcggctgttttgaatgttttcttttacaagttcaatcgttgccgttgcggctggaaacttaattcctagctctcgaatcggctcgtatgctcgaagtgttaaattccacagttcttcagcatcttctacggttgctaatcgaaataattcactcattttcttcacctcattttataaatgtttgaagagatagatcggctttataaatcagctcatccacagcttcctttaaacgacttttggcattcgcattgttgatgcctgtaaaagagacgtattcatgcagcagaaaaagactgctgagccaataaggcctacctaaaaaagacgctaaaagttttaaatcatacttagcttttagtaaagaattcacatttttaccaataagaattggcagaagtattttttcatgcaataaatcttctggcaatatttttgttagccgttcaaaagactgtacgtatgtttcatttactccagataacagaacgacaatacttttagcttggttcacttttgaaataaatgcctttacttctttctgttcttcctgcttcaaagcgtgtacatcatgatacaaaatagtttctgcgtacactccttttgaggttaagcaagcttctagctcatctttcactgaggctatttgttgataattatgagagcttccgttatataaaatacatacatcgctcactttcttcccctcctttttatagcaaaaaggctcctggagtttcctcaggagcctttggtagaccaatcagctttaactgtttctttgataaaaccggagaatgaagtgaagtgtctttgaaacatactcacttaattcttatttatccaagttgttttatcggcttttctgtttgatgattcaactatatagcctcaaaatggcaaagtcaacttatttttcaaaaaatatttttctttaaaaaaactcttttcatctggaaaatcctttgctaaaattaatcccaattattcttaccttttttatcaactttaaggagtgtttttagtgaaattaagtattttagatcaaagcccacgttatgaaggtgagcgtgctgaagatgcatttcagcatactatacaattagctcagctagcagaagaacttggctaccaccgcttttgggtagcggagcatcatgactctgaacatgttgtaggatcatcacctgaagtgttaatttctcacctgctcgctaaaacgcatcatatccgtatcggctcaggtggtgttatgcttcagcactacagcccttataaagtagcagaaaattttaatgttttagcctcattatctccaaatcgcatcgatcttggaatcggtagagcaccaggaggactacctcattctactcaagccttgcaacaaaactctcagcccactaagtccttaacagacaaactgatagaacttaaacaatacctaaacgatacgctgccggaagatcaccctctttacggtttaaaagcctatccaaggccggaaaaatcagcagatatgtttttactgggagcaagtgcttcaagcgcggagcttgcgggttcattaaaccttccttatgtatttgctcaatttattaatggtgatcaaaaagtgctagaagaagcgatttctgtctacaatcagcacgtttcacctcgcgcacgctcccttgtcgttgccctttccgtcatcgtagcggataccgtagaagaagcaaaagcattagcatccagcacaaaaatatttaaagtatacttacaaaatggtaagtccgctacattaggctccaaagaaaaagctgaagaatttggtcagcagtccaaagaaagctatcgaattgaagaaaaagaagcaaacgttatatacggcacaaaagaaaccattcgtcaaaagctccaagctttgaaacaggaattttctattgatgaatttatcatacttactgctattcaaaattttgaacaaaaaaagcattcttatacgctcttaaaagaagcattcaatgaaggagatgtgcagaaaactaatcagactctagctgcttactaatccagaagttgagataaaagtatttcagttgaagtaaaacacgaactaataatcataattaaggattattagttcgtgttttttattggtaagatgaatgtagctttcatgtgtttagttgcttctggctggtgattggagggcaaggctcatcggccgcccgcggaaagcgaagccttgcacggaaatcaacagtgatgtaacaagccatccacactggatcatttatcccatttgttcgtctatagattcgagtgatttagttatgtctcaatttctttgttttatctacttaccagcagttcaaacaaagtatacgcatacctctcattttttcaaaaaatcattaaattgaagcaaacgtttttttatagtaccatatgaagatatgagtctagtagaagaagggaatttaaaaatatgccttacaaaatgattgttttagatttggatgatacactattatgcgatgatcacactatttctccgcgcacaaaagaagcattaatgaaggcgcaagaatcgggagtgaaagtcgtacttgcttctggacgaccaacttacggaatggttcacattgcgaaagagctagaattagaaaaatacggaagctttattttatcatttaatggggcaaaaatcattaattgcctaacaaatgaagagctatttagcagcacattatctccgagaaccgtggcacgtctcgacgatattagccgcgaagaaggcgttttaattcatacgtacgttggagatgaaattataaccgaagtagaaaataaatttacggatattgaaagtgacattacaggtctgccgatccgtgttgtttcatcttttactgatgccgttacagaacctgttgtaaaagtactcatgcttgcagaaccggaaatgctggttcacgttgaaaagaaacttcaaaagcagcttcaaggagagctaagcgtaatgcgctctaaaccatacttccttgaatttacagaagaaggcgtcacaaaagggacaagtctccacttattaattcaacagcttggcattacacgcgatgaagtgattgccattggcgacagttataatgatcttgccatgattgaatttgcaggacttggggtagcaatgggaaatgctcctgaagatattaaagaaaaagccaaccacgtaacagatacaaacatgaacgacggtgtggcaaaagttgtggaagaatttatcttaaaacctgttagcgtttcataaaacaaaaaaaagcagctcgtccggacgagctgcttttttattttgattttatactcctaaaagtttcataagaagcgtagctaaaataacagtggaagcgcctccaagtcttgttgctacttgagcaaatggcataagcgacatacgattggaagctgataaaatcgctacgtctcccgtacctcctaaaccgctgtgacagcctgttacaattgcagcatccactggatgcattttcatcattttacctacaaaataacccgttgctatcatagcaataacaactgctgcacatacgactacataacctggtgtaacaattttcactacatcttcaagaggaatatacaaaattcctagccccaccattaacggccatgttaagctcgtagaaatgaatttgtacatatggtaagcaccttgctccatcttagcaggcattacttgtaaacatttgactagtgttgccgctacgatcattaaaactggacctggaattcctaaaaacttatgtgctaagcctccgaaaataaagaaactacatgcaattaaaagacctgcgcccattaacgaaaaatctactggtttcttgatatttgtatcttctgagatgccatctccgccttttgtcttcacaagaactccattacctgttaattctggctttttctctcctagacgtttcattaagccagcacatacgatagcaacgatgtttccgataacagcagctggaatcatttgcgacacaaaagattctgctgaactacctaaaatttgagaataagcaagtgaaagtggtaaaataccttcaccaatccctcctccaataattggtacaacaatatagaaaaatgtatgttttgctccgtaaccaaataacatcccaacagctacgcctgcagctacagcggctagcgtacctaatacaagcggtacgaacatacgtgtaaagccttgaattaaaactttacggttcataccaagaatacttccggctaccaaacaagaaatataaaggtataaaaagtttgatgttttcatcaaagttgttaccgcttccatagatgcgggatttaaaacattataaaaaactaatacggaaggtacaagcagtgataaaatagctggtccgccaatatcttttaaaatcggaatttttaatcctaaatcaccaagcagcattcccattaccataataatcgcaaatccgccaatcatatctggaggaagctcgttgtaaacggccgcgccatatacaattaatgcaagtaaaacgtatagcggcagaggaagaactcctattttaatattgttgattcggttccaaaaacccttattttcaggctgtgaatcttgagtaaacgtttccaatttacgtgcggtattcatctcataaccccctgtggttctaatatagagaatcatacacaaatttcaaaaaactatatacgttatgtaacttaagaattctttttgtaactaaaaaaaacacagcttcttttttccgaagctgtgttttttctatctaaaaattaagcatttactgtctctaaagctttaatttctttgtatgttggttcccacattgctgcttttactgccgctttaacatctgttggaacttcttttgcaacgccatctttaattgctgcgttagcaaccgctaaagcaactttatatgatacttcacgcaattcttctacgcgtggtagtaatgaagcacccggcttgctgctgtctaccatttgagctacagcgtgtgcacatgctgcaaacatgctatctgtaataacttctgcttttaccacgattgatccaagaccaagaccagggaaaacaaaagcattattagattgaccaatttcatattccacaccatcgtagttaactggttcaaacggacttccagtcgctacaagcgcttttccttctgtccaatttaataggttttcaggagtagcttccgcaagcggagttggatttgacatcggtaaaatagctgggcgttctacatgcttcgccatttcttttacgatttcttctgagaatgcgcctgccacaccagacgtaccaattaagattgttggcttaacttgtctgacaacttctaaaagagaaattttgtcttcttcacggttccagtccttcacttcttctgcttttcgtgcataaggcgtttggaaacctaataagtcgtccatgtcatctgttaaaaggcctcgaaaatcaactgcccagaagtttttgtatgcttcttcttctgtaataccgtctaataccattgcgtcacgaacttgatctgcaataccgatacctgctgtacccggtccaaagattaaaacgcggtggtcacgaagtggcattttagacacttgaactgctgagaaaatagcggcaagcgttacagcacctgttccttggatatcatcattaaacgttagaatttcttttccgtacttgttaataatgttacgagcatttacattaccgaaatcttcccagtgtaacaatgcattagggaatatttcaagagattttgaaatgaattgatctacgaaatgatcatagcgctcaccgcggatacgttcatgacggtttccgatatataaaggatcatttaataatttttcattgtttgttcctacatcaagaacaactggaagtactctgcttggatcgattcctgctgcagctgtatataccgctaatttaccgatagcaatattaataccgccaacgccccagtcgccaattcctaaaatactttctgaatctgtaataaccattaaatcaatgtcttcactatttgcatcgatatttttaagagcttcttcaatgccttctacattatcgattgacaagtatacgccacccggacggcgatattcgtggctgtactcttggattgcttgtccaactgttggtgtataaacaactggaagcatttcttttaagtgatcttgcaataaacgatagaataatacagcattacggttctgtaaatcgtttaaatacacattcttaccaaggttatctgcctgagctaaaaattgctcatatgcacgttttgcctgctcatctaaagttaaagtcattggaggaagtaaaccttctaatcctaacgttttacgctcttcttttgtaaaagctactcctttgtttaacattggagctcctaaaatttctttcccgcgtaaagtcgtttcaattgtttcattatctgcaaaaaatacgttgcgcatacgactatcttcctttctgtagacttgtatgacaagcatacaagttggttagatttaagtaattaataccttatatgaatattactcatattattcaaatgtccgttaactttttatgaatagcttgctaattcatttgacaatagtatattttatgcctatctatttctgctgtcaactattttagtagagcaattttttagttataaagaggtagaaatttctgaatttaatatcttttatcaattttctttttatat

SEQ ID NO: 2 - DNA, 260154 bp, Priestia aryabhattai
  source 1..260154: mol_type = genomic DNA
ttaacctgtcacatactttattaggaaatgcaaaggttttcattttctatattcacgattaatccatttgtctagtgggagtaagaaagttcttcacaaactatgttcatttaactaaggggggtctacgcagatggcggcaaacagagagtttcaatatcggagaatccattcattacttggggtaataccaatcgggattttcttaacacagcatttagttgtgaatcatttcgcgacaaagggagaagaatcatttaatcaagcagctcacttcatggagagcttacctttccgctatgctctagaaattttcattattttcttaccaatcgtttttcacgcaatatacggtctttacatcgcattcactgctaaaacaaacgttaacaactatgggtttttccgtaactggatgtttatacttcagcgtgtttcaggtgtaatcacacttatcttcatcacatggcacgtatgggaaaccagaatacaagctgcgcttggaaaagaagtagattttcaaatgatggaacgaattttaagcaacccggcaatgcttgcattctacatagttggtgttgtatctacgatcttccactttgcaaacggtctatggtcatttggagttagctgggggctaactgtaacgccacgttctcaaagaatttcaacttatgtgacattagcaatcttcttagcacttacatttgtaggtgttcgtacattattcgcatttgcataaaattaaggttttgaaggagtggggttccgatgagtaacggaaaaatcatcgtagtcggtggcggtttagctggcttgatggcaacaataaaaattgctgagtctggcaagcaagtagatttattttcactagttccggtaaaaagatctcactcagtttgcgcgcaaggtggaatcaacggagccgtaaatacgaaaggtgaaggggattcaccatgggaacactttgatgacacagtgtacggcggagactttttagccaaccagccacctgtaaaagcaatgtgtgaagcagctcctggtattattcacttacttgaccgcatgggtgttatgtttaaccgtactcctgagggtttgttagacttcagacgatttggcgggacgcagcatcaccgtacggcttttgctggagcaacaacgggtcaacaattattgtacgcattagatgagcaggttcgtcgctatgaagttgccggacttgtgacaaagtacgaaggatgggaattcttaggtgctgttcttgacgatgagcgcagctgtcgcggaatttctgcacagaatttaaaatcaatggaaattaaaacgttcccagctgacgcggttattatggctacaggtggacctggaattgtttttggaaaatcgacgaactcagttattaatacaggttcagcggcatctatcgtgtatcagcaaggtgcatactattcaaacggagagtttattcaaattcatccaactgctatcccaggagatgataagcttcgtcttatgagtgaatctgctcgtggagaaggcggacgcgtttggacatataaagacggtaaaccttggtatttcttagaggaaaaatatcctgcatacggtaacttagtacctcgtgatattgcaactcgtgaaatttttgacgtctgcgtagcgcagaagttaggaattaacggagagaacatggtttatctggacctttcacataaagatccaaaagagctagacattaaacttggaggtatcatcgaaatctatgaaaaattcatgggcgatgatccgcgcaaggtaccaatgaaaattttcccagccgtacactattcaatgggcggtttatgggtggattacgatcaaatgacaaatattcctggcttattcgcagctggtgagtgtgattattcacagcacggagcgaaccgtttaggagcaaactcattattatcagctatttatggtggtatggttgccggtcctaaagcggttgaatacatcaatggtttagaaaagagcgcagatgctatttcttcaagcgtatatgatcgtcatgtgaaagaagaagaagagaaatggaacaatatcatgaatcttcaaggtacagaaaatgcatacgttcttcataaagagctaggggaatggatgactgacaacgtgacagtcgtacgatacaatgacaaactgttaaaaacagatgaaaagattcaagaattaattgaacgctatgatcgtattaacattaatgatacggctaaatggagtaatcaagcggcaacatttactcgtcagctgcaaaacatgcttcagctttcacgtgttgtaacgctaggagcttacaaccgtaacgaaagtcgcggtgctcattataagccagatttcccagatcgtaacgatgaagaattcttaaaaacaacaatggcatcttttgtggataagaaaacggctccttctttccattatgaagaggtagacgtatcgttaatcaaaccgcgtaagcgcgactacacaaagaaaaaagatgaaaaaccaaaaaaacaacaagagggggttcgttaatcaatgagtgaacaacaaacagtccaaaagacagtgcgcttcattattacacgtcaagattcagctgaatctgctccttacaatcaggagtttgaaattccgtatcgtccgaatatgaacgttatttcagcactgatggaaatcagacgtaaccctgttgatgcttcaggtaaagaggttgctccgataaactgggaaatgaactgtttagaggaagtatgcggagcctgttcaatggtcatcaacggtaaacctcgtcagtcatgtacggctcttgttgacaaactagaacagccaattcgcttacagccaatgaaaacatttcctgtggttcgtgacttgcaagtagaccgcagtcgtatgtttgattcactaaaaaaagtaaaagcctgggttccaatcgatggcacatacgatttaggtccaggaccgcgtatgcctgaaaagaaacgtcagtgggcgtatgagttatccaagtgtatgacatgtggcgtttgcttagaagcttgtccaaacgtaaacgacaagtcaaacttcatcggtccagcaccgctttctcaagttcgcttgtttaatgcccatccaaccggtgcgttaaataaaggagaacgtttagagacgattatgggtgatggaggactagcgaactgcgggaactctcaaaactgcgttcaatcatgtccaaaaggaattccattgactacttcaatcgcagctttgaaccgcgatacaacaattcaagcattcagaagtttctttggtagcgatcaagtataatcactcaaaacctctccgcgcggagaggttttattttgtctatgacgaacggaggaaatacagatgaataatatttcatatattgaagacatggatcattggaaagagtcattttcgtttaagcaggagatcaaggtaagattttcggaaacagatatgtttgggcatttaaataatacggttccttttgtttattttgaacaaatacgtacggaattctttcaccatattggctttatgcaaaagtggacgagtgagcatgagggaacgataccggtggtggctgatttgcagtgcgattatgtcaaacaagtgtattttggcaacgtgctatctgtttttgtaaaagctcatagaattggacgttcgtcggttgatttacactatatgattcaaaataagcaaagagaggttgtactcaccgggagaggaacaatggtgcaaatttctaaagaaacaggaaaaagcgtcccttggaatgaagagatgaaaaggtgtttatcaaatatatgaaaatggcttgaaggctctttcttcaggctttttttcttttttaaaggtaaaaaagagttttttgcatattttttctaaaactagtaaccgcgtaggcataccgcacataagatatgttgactaaatttacacccatccgatagttcaactcaggatcaggcaaggagggttacattgaaagaaaaagagtttcaacctaaaccgctacttacaaagcgtgaacgagaagtattcgagcttttagtacaggacaaaacaacaaaagaaatcgcgagtgaactattcattagcgaaaaaacagttcgaaatcatatttctaatgcgatgcaaaagcttggagtcaaggggcgttctcaagcagtcgtagaactccttcgaatgggagaacttgaactataacatgagctggctttcttcttagaaagccagctttttgtatattttttaagtgtcgcatacatatctaaaaagaataacgttaagaaaatattataaaaaaggtaaatctttataaaaaaaacttattgcttgaaattgaatttcagagtacgtatacttttaagtaaggagatactagttcagaagaaagagaggtgagatgatgaaaaatgtatggatgagcttattgttgtgcatgatattctgtttgccttttgcgagtttgccagataaatttattgataacgattttgaaaaagtgaaggtcacaaaaagttcggttcagcattacacggatatcgtgcacatgtctccaggagctaagcacagcgtcaaacaaataggatctctcatacaaagtgtgatagtaacttttgctttaatatggatgagtgccaaactcatcattccgacgcatcaaattgcgtattttatcctcaagaaaacacttttttatccaaaaatctttcaatcaagttacctcaattaaataaaaaaggttgaaatttccacagccttttcttcaaacctaaaattaccaactattcttaggcttatttgctatgcggattttctatgcaaataacgcggcaaaattaaaaaattctttttaaaaactttataggagtgatcattcaatgatgattaaagaaacggagttaccaggaatcggccgtaaatttgaaattgagacaagcggaggaaaccgcgtagtcgttatcattcatgatgatggacgacgtgaaatctaccactttgatcaaaaagatttagaagaaagcatttttgacattacgttaacagatacggaatcaagacagctagctgcaattttaggcggcatgatttacaagccaaaagcaatggaaaccattgaagtggcattcaatgacttagttattgaatggtacaaagttgaaaaacaggcgaaagctcacagcaaaacaattggtgaaattgacgttcgcagcaactatgatgtcactatcatcgccgtcattaaaaacacgcaaaaaaaattatccaccccaggaccagatacgttaattgaagaaggagatacgcttgtcatctctggtgaaagaggaaatttaaaaacgctcattaaagaattgctttcacaaggaggtagttcataattggatcatttagtatttgaagttgggacagctttgttactagtcgctttagcggctatactagcacataaatttaaatttacgattattccattcctcattctgctgggcatggcggtcggtccccatgctcctgagtttggctcattcagtttaaagtttattgaaagccaagagattattgaattcatggggagaattggagttctctttttactcttttatttaggattagaattttcagttggaaagctaattaaatcaggtaggtccatcgcggtgggaggatctatttatattttaattaacttcactttaggactattgtatggatatctgacaggaaatcctcttcttgaagtgctgattatcgctggaattattacgatttcgtccagcgcaattgtcgcaaaagtattggttgatttaaaacgaacagcgaatccagaaacggaactgatattagggatcatcatgtttgaagatattttcttagccgtgtatctttctgtcgtttcagggttggtacttggagaccacggatcgcttgctggatctttaacatctattttaattgcgtttggctatatgatgctgttctttatcattgctcgaaaagccacgccgctactaaataaacttttaaatatttcatcaaacgaaatctttataatcgtcgtttttgcggtattgttttttgtggcaggcttctcagaaacaattcacgtggcagaagcaattggtgcgttattgcttggacttgtattttctgaaacggaacatcgcgatcgtattgaacatcttgtcgtaccgtttcgtgatttctttggagctatctttttcttcagcttcgggttaagtattgatcctctcacgctgtgggatgcaggatggcttgcgcttggcgcagttgcgcttacgatcattggtaactttacagccggtatgatttcaggaagaaaaagcgggctgtcacacaaggcctctaccaacattgggttaacgattatgtcacgaggcgagttttcgattattatggctaacattggaattgaaggaggattatccgcaattcttcagccattcgccgcgctttatgtattgattttagctattattggccctttgttaacgaaggagtctaagcatatatacggatttttaaactcagcatttaaatggaaaaagccaaatcctcaagaatcaaaaggataaaatatataaaacacagttgacaaatcggattaatatgataaaattcaaaataatccaataacaaatcagttaaatatagcaacgggctgatcggtcaaccgaaagctcctacctttttcaggtaggagcttttgtgtttttagatgaacgagtttttgatttaaaaattcaaggaggaggaattgctgtgagtgttgtcattcaatctgttaaccgctcatttcaaaaaggagaacaggtaactcaagcattgcgaaatgtaaatcttacgattaataaaggtgaatttatcgccgttattggtccgagcgggtgcggaaaaagtacactgcttaaaatgattgcaggacttgatatggattatgaagggcgtattgaaatcaatgggaagtacgtagtcggacctagcattaaacaaggaatgatctttcaagaacaccgcttgttcccttggcttaatgtggagcaaaatatagcggctgacttatcgctgaaagattcgaacgttcggcgccgcgtagatgagttaattgatattgtcaggctgaaaggatttgaaaaagcttatcctcgagaactatccggtgggatgtctcaacgagttgctattgcgcgtgctcttttaagaaatccagaagttttattgttagatgaaccgtttggtgcgttagatgctttcactcgcactcatttgcaagatgtgctgctagacatatggaaaaaagaaaaaacaactatgatttttgttacccatgatttagatgaatccatttacttggggactaaaattgtgattatgagtgccagaccaggagaaattagccgggtcgttccagtagaaattagtcatccccgaaaaaagacagaactaccatttcagcagctaaggcagcaagtactgaaagaatttgaagaagcaggagaacattaaagattcaataagacagagaaggagacggaacagatgaaaaagctacttttaactgcagctattgtacttgttctcgcattggctgggtgcgggacgaaagaaaaagcgagcggagaagattcaaaaaacgttacgattaatattggtatccaacaaagcttaggtcctttaatgctggcacaaaaacaaaaatggtttgaaaaagaatttaaaaaaataggtgtaaatgttaaatggacagagtttcaaagcggacccccgcaatttgaaggtttagcatctggacatttggatttcggccaagttggaaattcaccggttatttctggtcaaggcgcagacattccgtttttagaaattgctaattccagcgacgggttgaaaggaaatgccattttagtagggaaaaccagcaagattaaaagcgtaaaaggtttaaaaggtaaaaagatcgcggttgcgaaaggaagcagcggttttaatttattgtacagagctcttgatcaaaatgggttgaaaccaagtgatgtaaagattattcaacttcagccagacgaagctcagccagcatttgaaaatgggtcagtggatgcatggtcaatctgggaaccgtttatctcactgcaaaacttaaaaaatgaagctcgtattttagcagacggcgattcattaaaggttgcttcaccaggttttactattgtaagagaaggctttgcaaaagatcatccagagttagtcgttaagtttttacaagtttatcaaaaagcgcttgaatggcaaaacgaacattttgaagaatctgtggatattttagcaaaacaaaaaaatctagataaagatgtagtaaggcaagtgttaaaaaataatcctgcctataatcgcccaacctctaagggaattattgcagaacaacagcgaacagctgattttcaacaatctttaggcgttattaaaaagaaaattgatactggagatgtcgttgataattcatttattgaaaaagcattaaaagaaaaatgaggtgatgaaaatgagtaaaacatctgtggtttcaggacatgtccagtcttcagcagctcacttgcaaaaagtgaaaaaaagaaaggaagaagcgaaaaataagcagggaattttccttcgttctcttgtcgtgccccttctgcttatcgtcgtgtggcaaatcattggttctgcgggctatgtatccaaaactgttcttcctacacctgttgatattgtactttcttttaaacagctcatcgtatctggggaactcggagctaatcttcaaatcagtattttgcgtgctgccataggttttgccgttggagctggactaggattactatttggtgtaattgccggtttctcaaagaaaacggagcactatatggatccatctattcaaatgcttagaacggttccacaccttgcattagcgcctttatttatcttatggtttggctttggtgaaatttcaaagatattgctaattgcaaacggtgcatttttcccaatctatgttaatacgtatctaggcattcgcggcgttgattcgaaattatttgatgttgctcgtgttcttcaatttagtaaatggaaacaaatcacaaaactcattttaccagctgctcttcctaatattttacttggtgtccgattgtccttaggtattgcatggctcggactggtagttgctgaattaatgggagcaagtgaaggtgtaggatacatgattatggatgctagacagttttctcaaacggacgtagtttttgtcggaattattatttttgctgttgtaggcaaattaaccgattcatttgtccgagtattagaaaagcgtcttcttaaatggagagacagctacgcaggtgaaaaataaaagaaggatttatatacgtattattccttgtaaatctatcagttttataagttaaaaggagagatgataatgagccaggttacaattattacaggaagcccttcaaagcaatcaaggtcagctgctttaagcgagtatattgcagcatatctacaagatgaaaaatatgaagtgaaaaccgtgcatgttcgtgacttgcccgctgaagacttagtatatgctaacttttctagccctgcgattcaagaagctcaaaagaaagtggcaaatgctgatgccgttattattgtcagcccaatctataaagctagctacacaggaattttaaaaacatttttagatttaatacctgaaaaaagtttgcacaataaaaccgtgctgccgatagctacagggggaaccattgctcacctactggctcttgattatgtatttaagccgactttatccgttttaggagctactgctcttattcatggagtttatattgttgattctgaggtggcctatacgaaagaaaatgaaattgagtttattgcggaagaagcagaagcgagaattaaacgttcattaaaagagctgggatatcatctagaacaaacgaaaaggagtgttgaatcatgaaaatgttatggtttattccttcccatggagatggaagatatttagggacagatcgaggaggtcgttcagcagactattcatattttcggcaagttgctcaagcagctgaccggttagggtttgaaggagttttgattccaacggggaaatcatgcgaagacccgtggctattggctgcttcacttatacctgaaacagagcgtttgaaatttttagtagctgtacgtcccggcattatggcgccttctgtggcagcgcgcatgacctcgactcttgatcgaatttcaaacggtcgtttactagttaatgtagtagcaggaggagatccggcagaattagcgggagatggccttttcttatcacatgatgaacgttatgaagctgcggatgaatttttagatgtgtggaaagggttattggctggagatacggttaattatgaaggaaaacatattcatgtagagaacagtgagctgttgtatccacctgttcaaaaaccttctccacctatttattttggcggatcttcacccgcaggacaaaaagttgcagcaaaacattctgacgtgtatttaacgtggggcgaacctcctgaacaagtaagagaaaaaataacggttgtgagaaagcaagcagaagcagaaggcagaaccgttaagtttgggattcgtttgcatattattgtacgggaaacggaagaagaagcttggcaagcagccgatcgattaattcagtatttggacgacgacacgattcaagcagcacagcgtacttttgctaggtatgactcagtcgggcagcagcgaatggcgagccttcatagaggaaccagagaggaacttacgattagccctaacttatgggcaggtgtagggcttgtccggggaggtgcaggaactgcactagtgggcagtgctgaaaatgtagcgaaacgaataaaagagtatgaagctttaggaattgaatcttttattttgtcaggctatccgcatttagaagaagcttatcacgtaggagagttattgttcccgcttttaaatattgatgacggtgaaggaaagagtgaaagcatcggtgagattattgcaaacgataggtttccaaaagcttcaacgtcataaaagaagaaccggtgaatttttcaccggttcttcttttacattcatctcagccgagagacgagttcgttaaattgttggtttaggtttttcaggtgcagcttgtttatcttttcgactttcttgaatatatactttaaagagaaaaatatttaaacagcccagtgtgaggaataacggtgcaaaataatattcttgagacataagtaggacgaaaacgcttccaaaacagaacagagaactaaacataaagtaaaactgtaagaatcttctcattttagtcgcctcctattctttttcttcttacaattattatatcaaatactttccaaaaaagacacaaaatattcacaaaatgttcattttttttcttgtttacctattgatttttttgccgatatgtaaattaaacgggttgtaataccaattaattcctgattgtaactttccgatggaaagtttatgtaaaattttatatgatagagaaatggtattgaaaaaagggggaaaatcatcatgagacgaattgggtggctattttttactatggcaattctcttactaataaatgccggttgctcaaatgatcaacagaaagcacaggatcgatttgataaatatgtagccatgtggaataaagaagattttaaaggcatgtatggatacttgtctaaagatgctaaaaagacgatttcagaaaaagactttgtaaatcgatataaaaatatctatgatgcaattgaagcggacaagcttaaagtgaaggcaagtaaaatagaagacttagaaataaaagaccataaagctgttttaccttttgaagtaaacatgaactctgtagccggtaaaatctcatttaaagaaaatgctgctgtggttcaagaaaaacaaggggatgcagagaattggtatattaattggaagcctaatatgatttttaaagggcttaagcaaggagagcaagtaagagtagctactcagtcagccgtgcgtggagaaattatggatcgttcagggaaatatttagctcaaaatggagaagcgattcaagttggagttgttccccaacagttttctaaaggcggcgagcaatctatacaacagttaagcaagactcttgctctttcagaaaaaagtattaatcaagcactgagcgcttcttgggtgaaagagaatcaatttgttcctattaaaacagttagtcaaaaagacgcctctaatttagagaattctttgaaaaaggtagaaggcattcaacaaaaaaaggtaaatgcgcgcgtatatccttgtgaagaagcgtgtgcccatttagttggatacgttgcgcctgtcacagcagaatatttaaaagagcataaagatgaaggctataatgctcagtctaaagctggaatgattggcttagagtctttatatgaagataagcttcgtgctcgagacggcgtcacgatttatactgtagataaagatggtaataaaaagaatgaaattgcaaaagtgaatccaaaagacggggaaagcattcaagttacggtagacacgaatgttcaaaaatccctttatgaacagttaaaagatgaaaaaggagtagctactgctcttcaacctaaaacgggagaaatattaggtcttgtaagcaccccagcttttgatccgaattctttttcctttggaatcgatgctaatacgtaccaatccctttcaacgaatcccgataagccgttaatgaatcgctttaccaaaacgtattctccgggatctacatttaagttagtcacgggagctttagcagttgatgaaggcgtgctaaatccaaacgaaagtatatcaatcagcgggaagaaatggcaaaaagataaaagctgggggaatttctacgtaacacgagtgggaagcaagccgaatgttaatttacgtgatgcttatgttacatctgataatatttattttgcgcagactgctttgaagctaggtttagacaaatttaacagtggtttaaaacagtttgggttcaatcaaaaaatgcccgttaattatccttttgaaacgtctaaaattgcaggtgatcaagatattaaagatgagggagtattagcaaactctggttatggtcaggggaaactgcaagtgaatcctctccacttggcattgatgtatacatcgattgtaaacgatggaaacatagtaaagcctattcttatgaacggtgatgagagtggaatatggaaaaaacaagtaatatctaaagaaacggcgcaattaattcaaaatgatttagttgatgtcattgaagataaaaacggtacgggtcatgctgcaaagatagatgggttaaccctggctggaaaaactggaacggcagaattaaagaaaactcaaggtgaaaaagggcaggaaaacggctggtttatagctgtggatacaaaacagaaaaacctactcgtttcaatgatggttgaaggagtagaagataaaggcggaagtcattacgtcgtgccgaaagtaaaaaatgtatttcagcaatataataagtaaataataaaagccagttctaaaggagctggcttttattatttacacaaggggagtaatgttaagtttttgtaaatcccagttttatacaaactctgaaaacccttattttaaaaggaatgaacgtattattgttaatgtattgtaaagagacctaaaaaaatgtgtttgaaaagttattgacaattaacaataataggagtaatttttgacttggcgtaaaaaaatgaatcgcataacctataagtaaaagaaccaccttttgggacttttgctctggtaaacgtttgtttttttagaattttttgatacacaagagaggtggtttctctcgttatagtaatgaacagctaagttttatccattactttaaatgaaaaaagaaactagaacacatataaaaagatagagagaaaaaacgagtggtaaagtttcgataaattggatggaggattgcaacgtgatcaaaagaaaaaaagacaagttttctgaaatgttaatggacattgcccaaaatattaaggactcagcagagtttttaggcagctttgaacttcaaaatgtatctgacctaaaggaatttgccaacgttttaaaagcgtatgaatcaaaaggtgataaatacgtgcatacagtgattactgagttgaacaaagcatttattactccaattgagcgtgaagatattttacagctagcaatgagcatggatgatgtacttgatggcatcgacagctttgctgctttaatggaaattcattcaattacgaaatttgatgaatatgtagctgaatttgttaaaaatattcaaggctgtgctgaagagattttaattactattaatttgttgtctgagaaaaagcttcttcaaattagtgaacatgcaattaaaattaaagagtatgagtcacattgtgatacattatatcgtcgtgcgctaaaacaattatttgcaacatgtaaagatccaattaaagttattcaatataaagaaatttatgaaacgctagaagaaatcgcggattattgtcaaacggttgcgaacaacttagaatcagttattatgaagaatgcgtaacggggctatattataatggattcgatgctaatgttaaccattctaattgtagttggtgcacttggttttgactttatcaacggatttcacgatacagctaatgccattgcgacttctgtttcaaccaaagctttaaaaccgcgacatgcaattcttttagccgcaaccatgaactttgtcggtgctatgacgtttacgggcgtagccaaaacgattacaaaggatatcgttgatccttatacgcttcaaaatggttctgtcgttattttagcagcattaatttctgctatcgcgtggaacctaatcacatggtatttcggtatcccgagtagttcttctcatgcaattattggatcgattgcaggagcagctattgcagctgctggatttggtgctttaaattataaaggtttcatcaaaatcattgaagctcttctaatttcaccagttctagcctttgtagtaggttatattgtctatacgattatcaaactaacgtttaaaaaccataacttgacgaaaacgaataagcgttttcgacgcgttcaaatcctgactgcagccctacaatcttacacacacggtacgaatgatgcgcaaaaagcaatgggtatcattacgctagcgcttattgctaacaatatgcaaagtggtactgagattcagtggtgggtacagctggcttgtgcggtcgcaatggggcttggaacgtcaattggtggatggaaaatcattaaaaccgtcggcggtaaaattatgaaaattcgtcctgttaatggagtagctgcggacttaacaggtgctgccattatctttggagcaacgtttattcatctacctgtcagtactactcatgttatttcatcttctatcttaggtgtaggttctgctcaccgagtgaaaggtgtaaaatggggaactgcacagcgcatggtgattacatgggttatcacattgccaatttcagcttcattagctgcacttatctatatgtttttaaatttgttcttttaataaatgtggagcttctttttaagaagctcctttttttatttacatcccctcatttgcacagtacacttaaaacatgaaaataatacaattgtttttaaaagggagatggggaaatgtttggaaaagtagctgctgatgtattggggctaagtgatattggttctgttattaagccagttgattatgacaaggtagatgcagacgattacgttatgcatgaagaacaagaaaaaatttattttctaatcaaatcaaagtcagatgaatattgctttaccaataaagcgctcattcatcttgatggaacaagtgctacaagcaaaaagcgaatgcttcgccgctataactacagcacaaatcacatttcaaacgtgatgctagaaacggctggaactgtcgatttagatgtggaaattaaatttaaaattggctcggagactttttctatcgatgtacacaaaaagcatatagaagaggtaaaagatttatataaagcgctgtttaaaatgtctgaaataacgcgtgaaaatgaaattgcgctcgattttgctaaacaaagcattcagctagcttcttctacgctaagcagtacaagaaatacaagtggaagtgttgctggtgaatttaaagaaattaacgaagctgcgttttcttggttattagataaaaaaacagcctacacaacaaaagatttcagctcagttttcgagctgtatatcaataattaatagaaacagctgctccttttatggagcagctgttttttgatgctgaatgagagtatgtagacttatgatgaacgttgtagaatcctcatgttaaccttgaaaaatcactgaaaaaagagcacaatataaaatagaaaagagaaacaatagagacgggtttaactgaaagaaataatagaaaataagacttataggtggaaaggattacggtatgacagcaaaaaataatgaggatacagtggcagaattagagaagtcacttcgacatattgcagcgattgtgaaacaaaaaggaagagaaattttagaagactatacgattacgccacctcagtttattgctttgcagtggctgtttgaacgtggagatatgacgattggcgatttatcaaatcgtatttttctcgcttgtagtacaacgacagatttagtagatcgtatggaaaaaaataagttggtggttcgggtgaaagatccaaaagaccgccgcgtagtgcgtattcatttgcttcctgaaggagcacgtgttatcgaagaagtaattgaaaagcgacaaacgtatttaaatggcgtactggcaaacttctctccgagtgaaacggaagttttacgagtaacgttaagaaaattgcatgatgaaatgaaagaaaaatgaggcgattgttttgagtagaccaattggtgttatagattcaggtgtgggcggattaacggtagcaaaggaaattatgagacagcttccgaaagaacaaattatgtacattggagatacatcccgctgcccatacggtcctcgtcctagtgaagaagtacgagctttcacgtgggagatgactaattatttagtagataaagatattaaaatgcttgttattgcgtgtaatacggctacggcagttgtgctggatgaaattcaagaacagctcgatattccggttataggcgtcattgaaccaggatcacgcgctgcgcttaaagtaactaaaaatcataaaataggcgtaatcggcacaaacggaaccgtgaaaagtcaagcctatacacatgcactccgcgctcttcatacgagagtggaagtggaaaatttagcatgccctttgtttgtacctcttgtagagagcggtaattatgaaggaccggaagcgcagcgaattgtaaaagaaacattaaaacctttttatcatacagatatggatacccttattttaggatgtacgcattatccgttattaaagccagttattcaagaagcaattgggcctagagttcagttaatcagttctggcgaagaaacggcaatagaggtaagtgccattctttcttatagcaatttactagctcctagaaacatggagcctgaacactacttctttacaacaggatcaacagaactgtttcaatctattgcatctaaatggtttgagcaccctgtatataatgttgaacatatcaagctttaaaaccgtgcatatcatgctcggtttttttgtggacaaaaacttttttgagctggtctaaaatgcaaaaaagctcgtatacatagtagtacaaacagtctgaggagggaaaggaatgtccaaaaagacccaacttgttctcatatccgccgtggtgaccacatctgtattgttatccggctgtggacttttcggaggggataacgcagcaaaggaaattgatccgccaaaggatgtcacctatgtgaaagatgaaaaatcattagcgactgaagcgaaagtaacggaagctaataaaaaacaaagtaaagccgcagaaacatctgcacctaccaaaagagaactctacttaattgataaaaacgggtacgttgttccccagacgcttgaaattcctaaatcaaaaggtgtcgctaaacagtctcttgaatatttagtagagggtggaccagtcacaaacttattgccaaataatttccgagcagttcttcctgctgatacaagagttttagggacaaagctggaaagtgacggcacgatggtagcagatttttcacctgaatttgctgagtataaaaaagaagatgaactccgtattctgcaggccgtcacttggacgctgacgcagtttgaaggcgtaaataaagttaaaattcgcattaacggctatgataaagatgagatgcctgtaaatcatacgccaatcagtaaagggttgagcagagcagatggcattaactttgataatactggagtagttgacgtaactcaaacgaagccagttacgatttattacttagctcaagagggcaaacaaacttactatgttcctgtcacaaaacgaattgcttctgatgccaaagatatgtacactgccattgtgaacgaacttgtagaaggacctgcgcctgcatcaggtttagtgacagattttaatcctgatgcaaagctcgtagcagctccaaagtatgcggacggcgagttaacgctgaactttaataaaaacatctttgggaatttaaaaggaacggaaatttctcagcatgttctcgactccttagtgttatctctgacggaacaaaaagccgtagacagcgttgccattaaggtgaatggcaaaaaaacgctaaaagatgaaaaagggaaaaaattaacggaaccagtttcaagacctaaaaatgtgaacacaggtagtttttaaaaacaaatttttgttatactagtaaaggactaagtagaaagaggtctgctgaaatagcgacctctttccgctgttttaaagttaaaatggaagaggctattacatataaatgaatgaataggaggacatgattaatgcgtttggacggtagggaatttaatgaattgagacctgtatctcttcatacttcatacttaaagcatccagaaggatctgtattaatctcagtgggagacacaaaggttatttgtacagcaagcatagacgacagagtgcctccttttatgcgtggacaaggaaaaggatggattacagctgaatattctatgctgcctcgagctacggcacaaagaaatatacgtgaatcatcaaaaggtaaagtcacaggacgaacaatggaaattcagcgtctaatcggacgagctcttcgttctgtagtcgatctggaaaaggtcggagaaaagacaatttggattgattgtgatgttattcaagcagatggaggcacaagaacagcatcgattacaggtgcttttgtggctatggttttagcgtttggaaagctggttgaagagaacaaactaacagaaattcctattcgtgactacttagctgcgacttcagtaggtattcatggagaaaattcgattttagatttaaattatgaagaagattcgacagcggaagttgacatgaatattgtgatgacaggaagcggacagtttgtagaattacagggaacgggagaggaatcgacgttttcgagagaacagttaaaccatcttctagatttaggggaaaagggtgtttatcaattgattgaacggcaaaaggaagttcttgatcacctggctgcctacattccggttaaagaaaggtaagggattaacgtgcgtgaaatcattattgcaactaaaaacgcaggcaaagtaaaagattttgaaacacttttctcaccgaagggatttaaagtaaaatcgcttcttgattttcctgagattgaagacgtggaagaaacgggcgttacatttgcagagaatgccacgctaaaagcagaggccatttcatccgcattaaataagccggtcattgccgatgattccgggcttgctattgatgccttaaacggggagccaggcgtttattccgcgcgttatgctggtgaaaataaagatgataatgctaatatagagaaggtacttcaaaaattaaatgacgtgccgtttgaaaagcgcacggcacgctttcattgtgctcttgctattgcagtgcccagaaagagaaccgaaattgtagaaggcacgtgtgaagggcacatcttggaggaaaaaagaggggaaaacggttttgggtatgaccccattttctttgtagaaaaatggagatgctccatggcagaattgaccaaagagcaaaaaaatcagattagtcaccgagcaaatgcgttaaaaaaactagcaccgctaattgatgcgcaattttagaaggagtgatgacgtgtgaaactattaattgtaagcgatagccacgggttacaagaagagctgctcactatcagagagagacatgctgatgtagataagatgatccattgtggggactctgagttgccgcaagacagcaaagaaatgtctgcgtttttaggcgttcgaggaaattgtgactacgatgcatcttacgttaatgatcgagtagagtcgcttggagaagctacgtgtctggttacacacggtcacttatataatgttaaaatgtctatgatgaatctgcattacaaagcgagagaagtcggggcaaacgttgtttgttttgggcattctcacatagcgggagctgagctcatggacggagttttatttatcaatccaggaagtatgttacttcctcgtatgagaaaagaacgtacgtatgctatactagtaatggatggtacagaagctaccgtgcagttttacgatataagcggtaaacatattcctagcatgcagttaacctgtacaatttcagcataatatagccaaatatagggagaagagaaggttttttacctctcttctcataaaatttcaaaaaaacgttgacttttaaattatatttgaatataataagtattgtctttgatacactttaacattatgtcccagtagctcagcaggatagagcaacggccttctaagccgtcggtcgggagttcgaatctctcctgggacgtccaaaaaaaaccggtttttactaaaaagtaaaaaccggtttttttatttatcttaaaagtgaatgtttgttcattcagtgtgtacaaatgaacgtttcagaaaaactttttgaactgctgtaaacccttattacatcaataatgaaaacgcattcaaatattctgtttagtctaaattgtctaaaaaaatcttgaaaagtggttgactatgcatagaaatgggcgtaagatagtcctcaaatataagttttctaaaaattttaattaatttaaaatatgatgtgtaaagcattgttcaaaaagcatatagcgttttaaaacgttgaagaggataagtagttttgatgtttaggtatcaacagagagtcgggttgctggaagccggcgttaccaactcaaaatgaactcacctcagagtgtcaccctgaaattcagtaagggcgaccgagtgtacttccaaagcactcgttatcaaaaagaatgtacagtatacattcataaggtaatcattacgattacaaacgagggtggtaccgcgtaaagtacaaaagacttttcgccccttgacctatatcatttgatagggtctatttaggggtgagaagtcttttttcttttatctagaaaacgaaaggatgagaaaagtgggagccaatatgcaaacgaaagaacctgtaagcactggggcacaaatgaatggagctgacatgttgattgaatctctaagaagagaaaatgttgacgtcatcttcggttacccagggggagccgttttaccgatttacgataagctatatggttcaggaatgtttcacgtacttgctcgtcacgaacaaggtggaattcacgcagcagaagggtacgcaagaatttcaggcaaacccggtgtagttatcgcaacaagtggtcctggtgcaacaaatatcgtaacaggtttggcagatgcgatgattgactcacttcctttagttgtttttactggtcaagtagcttcaagtgtaattggttctgacgcgttccaagaagcagatgtattagggatcacaatgccaattacaaaacatagctatcaagtacgcaatatcagcgatatgccccgaatcatcaaagaggcatttcatattgcgacaacaggaagacctggtccagtcttaatcgacattccaaaagatatggcacagggtgatggaacatttaattacgaaggagaaattgatttacctggctatcagccaacttattttccaaatcagctgcaggttaaaaaattaacagacgcagtagcagctgcaaaacaacctgttatcctagcaggtgcgggagttttattgagtaaaggttcagaagaattaaaaaattatgccgagcgtcaaaatattccggttattaatacgcttttagggttgggctgttttcctgcagatcatccgcttcatttgggaatggctggcatgcacggaacgtacacagcaaacatggcaatttatgagagtgatcttctcattagtatcggtgcacgctttgatgaccgagtaacaggtaacttaaagcattttgcaccaaatgcaaaaattgctcacattgacatcgatccagcggaaattggcaagaatgttccaaccaagattccaattgttggagatgcaaaagaagtattgaagcaattgcttctgcaagaaggagaagttggagattatacgaaatggcatgagaaattagcggcgtggaagcaagaatatccattatggtatcagaactcagcggacgtgttaaaaccacaaaaagtagttgagttgcttcacaagtatacaaatggagatgccgttgttacaacggacgttgggcaacatcaaatgtgggtagctcaatactacacatttaataatccagatcgatgggtaacttcaggtggtcttggcaccatgggctttggattaccttctgcaatcggcgctcagctggcaaataaagataaaacagttgtagcagtcgttggtgacggtggatttcaaatgacgcttcaagaattaggggttattagagaattaaatttacctgtaaaagtggttgtactcaacaatcagtcgcttggtatggttcgtcagtggcaggaaatcttctatgaagaacgctactcacactctttaattccgaatcagcctaatttaatgaagcttgcagaggcttatgatatcaaaggtttacaagcttctactgaagaagaagcgcatgcagctctgaaagaagcaatggaaacagatggacctgttctactaaacttctttgtcgcacctaaagaaaacgtatatccaatggttgcacctggaaaaggattacatgaaatggtaggggtgaaaccatgaagcgaattattacagcaactgtattaaaccgtgcgggggttttaaatcgcgtaacgggattatttacgaaaagaaatttcaatattgagagtatttccgtagggcacactgaatctgaggatgtatcacgcatgacgtttgttgtgaacgtagagcatgataacgctgctgaacaagtgatcaagcagttaaataaacagatcgacgtgttgaaagttcaagatattacggatcaagctgtggtgtcaagagagcttgctttaatgaaagtagcatctacaccagcgagccgtaacgaactttatgcagtaattgaacctttccgtgcaaccatcattgatgtaagtcgcgacagcctaattattcaagtaacaggtgaatccagcaagattgaagcgatgattgatctacttcagccttatggattaaaagaagtaacgcgcacgggaacagtagctgttccgcgcggtacgcaaaaagcagcagccaaactttcatcaatcatttaattctagctagttactaaaaagtaaactatataaaactatataaactaagaggagagatttattatgacaaaggtatattataacggagatgcaaaggatcaactattacaaggtaaaacagtagcaatcgtaggttatggttcacaaggtcacgctcacgcacaaaacttacgcgacagcggagtaaacgtggtagtaggattacgtaaaggtaaatcatgggatcaagcagagcaagacggtttcactgtattatctgtaaaagatgcagttcaacaagcagaagtagtaatggtattacttccagatgagtatcagccaaaagtttataatgaagaaattcttccaggactaaaaccaggaaaatctttagtatttgctcacggtttcaacattcactttaaccaaatcgtagcacctgaattcgttgacgtattcttagtagctccaaaaggccctggtcaccttgtaagaagaacgtatgaagaaggagctggtgtaccggcgttattcgcagtattccaagatgtaactggcgaagcaaaagacgtagcgttagcttatgctaaagcaattggttcagctcgtgcgggtgtgttagaaacaacatttaaagaagaaacagaaacagatcttttcggtgagcaagcagtactttgcggtggtttaacttcattagttaaagctggttttgaaacgcttgtagaagctggctaccaaccggaagttgcatattttgagtgtttacacgaattaaaattaattgttgaccttatgtatgaaggcggaatggaaggcatgcgttattcaatctctgatacagctcaatggggtgacttcgtttcaggaccacgcgttgtagatgagcgttcaaaagaacaaatgaaaaaagtgcttgaagatatccaaacaggtaaatttgcaaaaggctggatcctagaaaaccaagcaaatcgtccggaatttactgctatcaataaccgtgaaaatgaacatttaattgaaaaagttggcgctcaattacgtgaaatgatgccatttgttaaaaaacaaaagaaagaagcggtgatcgctagtgcaaaaaattaaactatttgacacgacgctacgcgatggtgaacagtcacctggagtcaatttgaacctacaagaaaagcttgaaattgctaagcagttagagcgattaggtatcgacatcattgaagccggatttcccgcttcttcaaaaggtgattttcaatccgtaaaagaaattgcgtctattgtcaaaaattcttctgtaacaggccttgcaaggtctgttacaaaagatattgacattgcatgggaagcgttaaaagacagtgcagaaccaagactgcatgtttttatcgctacttccgaaattcatatgcagcataaattgaaaaaaacacctgatgaagtacttgaaacagcagtggaaatggtgaagtacgcaagtaaaaaattcccggttgttcaatggtctgctgaagatgcatgtcgaacagatttaccgtttttagcaagaattgtagaagcagttattgatgctggtgcaaaagtcgttaatattccagatacagtaggatttatcactcctagtgactatcaatcagtatttaattacttaaaagaacatgtgtcaaatattcataaagttgatttgtcagctcactgtcacgatgacttagggctagctgtggccaattcaatggctgctattgaagcaggagctactcaaattgaaggaacgattaacggaatcggagaacgtgcgggtaacgcagctcttgaagaagtagcacttgcgcttcatgtccgtcaagatttctatcaagcgagtacaggtcttatcttgcctgaaatcaaacgtacgagtgacattatcagtaagcttactggtatgaacatcgcaccaaataaagcaattgtcggaaaaaatgcttttgctcatgaatcaggtattcaccaagatggcgtcttaaaaaatccgttaacatatgagattatttccccagaacttgtgggtgttaaacaaaatccaattgtgcttggtaaacactcaggccgtcatgcgttccgtacacgcttagtagagcttggattcacattggaagatacagaagcaaacgtgctttttgagaagtttaaagacttagcagataagaaaaaagacattacagatgatgatttattggcattagtcattcaaaagcaagttagcaaagacagtgaatataagcttgaaagtctgcaagttcagtatggtacgaacaatattccaacggctacgattacgcttcacaaagaaaacggcgaagagattcaagaagcagctacaggatctggaagcgtggaagctatctataatacgctgcagcgctgtgttgaacaagatgtaagactattagactatcgtattcagtctattaacggtgggccggatgcactggctgaagtatttgtgaaggttgaaagcgaaggaactgaagcaagcggacgcggagtagcatttgacgtattagaatcgtcagcgaaagcatatctgaacgccattaatcgtttaatcgctattcagcagcatcgtacaaagcaagaagtaatgtgaactgaagggagagaccaccatgacaaaaaaagtcgctgtattaccgggtgacggcgtaggaacagaagtaaccaaaggcgctgttgccgttttaaaagcagttggagagcgctttgatcatcaatttgagtttacgtatggactaattggcggagctgcaattgatgaggcgggcacacctcttccagaaagtacaattgagacttgtaagcaggcagatgctgtattacttggatcggttggagggccaaaatgggatcgtaacccttcacatttgcgaccggaaaaaggtttgctagctattcgaaaagaactggatttatatgctaatcttcgtccggtgacgttttatgatagcttagcggatgcctctcctctgaaaaaagaatacattgaaggtgttgacttcattatcgtccgtgaactaacaggaggcttatattttggtaagcctagcgagcgccgaacggaaggaaatgaagaaacagttgtcgacacattattttataagcgtacagaaatagaaagaattattcgccaagcatttgacacggctgtaaatcgacgtaaaaaagtaacgtctgttgataaagcgaatgtgcttgagtctagtagagtgtggcgtgaagtagctgaagaagtagcaaaagactacccggatgtagagcttgagcatatgcttgtagattcagctgctatgcagttaattcgtaatccgaagtattttgatgtagtggtaactgaaaatatgtttggtgatattttgagtgatgaggcttctatgctcacagggtcgttaggaatgttgccatctgccagcttaacggctgatggtccgtctttatacgaaccggttcacggttctgcaccagatattgctggtcaaaacaaagctaatccgattgctgctattttatctgcagcaatgttgcttagacattcgtttggattagaaaaagaagcagcagtgattgaacaagcggttgaaagtgtattacatgcaggtcatcgaacagctgacttagcagacggtaatcattatttaggtaccgataaaatggtggaggcgataactgcggtaattgccaatgattctgccatttcaagcattatgacagcttacagttaatcatgcgtttctcacgttttgtgagaaacgtttttcataatcagaaaggaggagcagtatgaaaccaaaaacaattattgataagctttgggaacaacatgttgtacgtcgagaagaggggaagccggatttattatatatcgatcttcatcttattcatgaagtaacgtctcctcaagcatttgaaggtcttcgcgtggcaaatcgccaagtgaagcgtccagacttaacgtttgctacaatggatcacaacattccaacggttgaccgttttaatattaaagatccgattgcaaagaaacaagtagacaaactatctgaaaactgtcatgagtttggtgtgaagcttttagatttaacaagtgaagagcaaggaattgtgcatatcattggaccggaattaggattaactcagcctggaaaaaccattgtgtgcggagatagtcatacatctactcacggtgcatttggagcgcttgcttttgggataggaactagtgaggtagagcatgttttagcaacacaaacgctatggcaagcgaaaccaaaaacgctacaagtgaaagtaaatggcaaaaagcagcctggcgtttatgctaaggacattgtgttagcaataattcaaaaattcggcgtgaattttggaacgggttcaatcgtggaatttacgggcgaatgtattcgcgatctttcaatggaagagcgcatgaccatttgtaatatgtctattgaagccggtgcaaaagctggtttaatcagtccagacgatgtcacgttctcttatattaaagggcgtcagtatgctcctaaaggagaacagtttgaaaaagcagtggaagcttgggcagctttagcaacagatgaaggtgcaacgtacgatgaaacgctggaaattgatgcagatacaattgaacctgttgtaacatggggaacaaacccggcgatgagttcttatgttagcaagcaagttcctacattagaagagtgtaaaacagaagctgagagaaagtctttgtcacgagcacttgagtatatgggcttacagcctggcatggcaatagaagagattccagttcagcatgtatttatcggttcatgtacaaatgctcgtttgtctgatcttcgtgacgtggcagcctttattaaaggaaagaaagtgtcaccagatgtgcgagcgatcattgtaccaggttctcaaaaagtaaagcgagtggctgaagaagaagggctatctgctatttttattgaagcaggttttgattggagagactcaggctgcagcatgtgtctaggcatgaactctgacttagttccacaaggcgaacactgtgcgtccacttctaaccggaattttgaaggacgtcaaggaaaaggcgccagaacgcatttagtaagcccggtaatggcagcagcggcagcagtatatggacattttgttgatgtacgcaaattacaagaacaagcggtgcgataaggaggagaacacagatgaatgcttttacaatccatacagggaaagtagcaggtctcgaccgagcaaacgtagatactgatcaaattatcccaaagcaatttttgaaaagaattgagcgtactggctttggccaatttctattttttgattggcgatataatgaagatgagacgttaaatgaaacgtttgaattaaatcagcctcaaaatcaaggagcaacaattcttgtagctgacgagaacttcggatgtggttcgtcacgtgaacacgctccatgggcgcttttagactacgggtttcgtgctattatcgcaccttcatttgcggatatttttaaacaaaactgtctaaaaaatggtattttacctattgttttaccgaaagaagatgtttcctatttaatgaaagagtctcaaagtacttcttacgcctgtacaatcgatcttcatcagcaaaaaattaccgatgaagcaggttttgaacgtacgtttgatatcaatggccattggaagtatatgcttgttaacggatatgatgaaattggctatacgctttcttttgaagacgacatttctgcttatgaagcaaaaacggtaagatattaaccaaaaatcgagcaaaattatgattttgctcgatttttttgcgttccgttaatcgaattgctaaactgtaaagcaaatggaccgcgaagtggggagaaaacatgtcgaatgaacaacaaaacaaaattgtagcttttcctctattaaaagaacggttggttgaaaaagctacagatcatatgcagcacaagcaatttcaagaagcacttcctttatttgagcaggcctacgaacttgataataagcatcatgaaattttgcttggccttgttatttgtcacgtggagctcggtgatgcaggcatagctaaggaattatgtgagcaaatgctgaaagaagatattggcgattattatcataatttgcaaatgtacctcatggtgttaattcagcttggtcactatcatgaaggatatgtcactctacaagcagttattcaagaacacaaactcccttctgaacatgctgaacagctttatcagctattggagttctgcaagaatagaatgaatcaagaacaagtcatagaagaacaaacagaagaagaacagctagagcagtttaaatcattcacagctctagacaatattcaagatcagcttgaatgggttcattcattaaaaacaaaaagaattgaaaagcagcgcttctttctggaacagctattttcatctaaagctgttcaccctatcgtaaaaacagtcgctttaaaaacagtcatggaagaagaagtagacattgattttatgattactaagtttggagagacgaaaaaagtaaatgcgcttcagcttcaacgaacaacaccgtatttgtttgccgagcaagtagaagcgcagctgacggaaaagctggagcatgaaaatcctacattgctgcaggttgccgttgagatatggcagcgtcatttatttattacatttccgtttttaccgggtgataatgtaaaactttggacagaagcggtgtatgctgttagtctgatgatgcaaggagaagagtcagatgcagctgtagcagaggaagacggaagtttctccgcagctgaattaagaaaggcaattaaagagctaaaagaaattgaagaaatttcttttatataaaatgtggtgtttagttgaaacgtcattgttgtatgttataatataatggttgtaaaatgcacttaaatacgtatagtagaatttcatctttacattacattcctacttactttaaagtaatagggagttaaatagataatgattgagggttgaactgataggctatctgcattatctaatttagaaatcactacttaaaatgattttggagggaaacattcatgtctgcaaaatgggaaaaacaagaaggaaatcaaggcgttttaacagtagaagttgaagctgctgagtttgataaagccttagataaagcattcacaaaagttgtaaaacaagtaaacgtaccagggttccgtaaaggtaaaatgcctcgtccacttttcgaaaaacgttttggcgtagaatctttataccaagatgcactagacatcttattacctgaagcttacagcaatgcaattgttgaagctggtatcgagccggttgatcgtccagaaatcgatgttgaaacaatcgaaaaaggacaacctctagttttcactgctaaagtaactgttaagcctgaagttaaattaggcgaatacaaaaacttagaagtagaaaaagtagatacaactgtaacagatgaagacgttgaagctgaattaaaaacacttcaagagcgtcacgctgaactagttgttaaagaagaaggaactgtagctgaaggtgatacagctgtaatcgactttgaaggtttcgttgatggcgaagcattcgaaggcggaaaaggtgaaaattattctttagaaatcggttctaacacattcatccctggctttgaagagcaactagttggtcttgaagtaggcgctgaaaaagaagtggaagtaacattccctgaagagtatcacgctgaagagctagctggtaaagctgctaaattcaaagtgaaattacacgaaatcaaatctaaagagcttccagctttagacgatgagtttgcaaaagacgtagatgaagaagtagaaactttagaagcgttaaaagcaaaaacaaaagaaaaattacaaagcgataaagagaatcaagcggaatcagctcttcgcgacactttagtagaaaaagctgctgaaaatgctgaagtagaaattccagaagcaatgttcaacactgaaatggatcgtatgatgcaagagtttgaacaacgtttacaaatgcaaggtcttaaccttgaactttacttccaattctcaggtcaagatgaaaaagctcttcgcgaccaaatgcgtccggatgctgaaaagcgtgtgaaaatcaacttaacgctagaagcaatttcaaaagctgaaaatcttgaagtaagcgaagaagaagtagaaaaagaattagaaaacatggcaggaatgtacaacatgcctgtcgaagaaattaagaaagtgcttggcagtcttgatagcattaaagaagacatgaaagtacgtaaagcagttgaatttcttgtagaaaacagcaaagctgttgcataatagtaattaagaaacaaggcgcgacttgatcgtgccttgttttataaacttcaatagtttttttatatcataaccaacaccgtagaagcagctttaacccattgtttgaaatccgtggttatgaaataggcccaataagaggacactatataatagcagatctccattctgttatgctcatcaacaacatatacataaaacgttttagtatctattcaagaaaatgtatggtaaaatgcaatacaaatcttttcatagcgcttttactatgtgataaagaggggcatttacctacaaatagatgagttgttcatgttgttgggctatagcgcggatagaaatcagcttcgagcactttagtaaatactacaaggggtgaaaattatgtttaaatttaacgatgaaaaagggcagttaaaatgctcattttgtggtaaaacacaagaacaagtacgcaagttagttgcgggtccaggtgtttacatatgcgatgaatgtattgaactttgcacggaaatcgtagaagaagagttaggtacagaagaagaagtagaatttaaagatgtaccaaaaccaaaagaaattcgtgacattttagatgagtatgtaattggtcaagaggatgcgaaaaaatcgttatccgttgcggtatacaaccattacaaacgaatcaattcaaacagtaaaattgatgacgttgagttatcaaaaagtaatattgcattaattggacctacaggaagcggtaaaactttactagctcaaacattggctcgtattttaaacgtaccgtttgcgattgcagatgcaacatctctaacagaagcgggttatgtaggagaagatgttgaaaacatcttattaaaattaattcaatcagctgattacgatgtggagaaagctgaaaaaggtatcatctacatcgatgaaattgataaagtagcgcgtaagtctgaaaacccatctattacacgtgatgtatcaggtgaaggtgtgcagcaggctcttcttaaaatcttagaaggtactgtagcaagtgttcctcctcaaggtggacgtaaacaccctcatcaagaatttattcaaattgatacaacaaatatcttatttatttgcggtggtgcatttgacggaatcgaacctattattaagcgtcgtctaggtaaaaaagtaattggtttcggttcagaaacaaaacaacaagactttacagaaaaagagttactagcaaaagtattaccggaagatttattaaaatttggtttaattccagagtttatcggtcgtttaccggttactgctagcttagtgcctcttgatgaagaagcgctagttgagattttaacaaaaccgaaaaatgcactagtgaaacaatatcaaaaaatgcttgaacttgatgacgttgaacttgagttcgaagacgaggctttagtagaaatttctaaaaaagcaatcgagcgtaaaacaggtgctcgtggtctacgttcaatcattgaaggtattatgttagatgtaatgtttgatcttccttcacgtgatgatattacaaaatgtattatcacaggtgaaactgttcgtgatcaagcggctcctaagttcgtattagaagacggatctactattcaagaaggcagcaaaacatcagcataaaaaaagccgggtactcaaattgagtacccggcttttttctggtgatgaagcacaactaaattttactttttactagaatcttgtttattcctactgctgcagggagataataactgataattatcttactaaactgcgcaggaggtttatctatgaactggacgaatattgccttaatggtccaactcttttttggtatcatcattggcttatatttttggaatttattacgcaatcagcgtacgcaaaaagtctcaattgaccgggattcaaagaaagaaatggagcaattgcagaaaatgagagccatctctttgactgagccgcttgccgaacgtgtgaggccgtctagcttctccgatattgtcggacaagaggatggaattcggtcactaaaggctgccctttgcggtcctaatccacagcacgtgattgtatacgggccgcctggagtaggaaaaaccgcagcagcacgtttagtgttagaagaagcaaaaaaaaataaaaaatcacctttcaaacaatcggctgtatttgtagagttagatgcaactacggcgcgttttgatgagcgaggcattgctgatcctttgattgggtctgttcatgatcctatttaccaaggagcgggtgctatgggccaagctggaattccgcagccaaaacaaggagcggttacagatgcacacgggggaattttatttattgatgaaattggagagctccatcctattcagatgaataagctgttaaaggttctagaagatcgaaaagtgtttatggaaagcgcctattacagcgaagaaaacacacaaatcccgacacatattcacgatatttttcaaaatggtttgccagcagactttcgtttgattggtgcgacgactagaacgcctaatgaaattccgcctgccattcgttccagatgcgtagaggtatttttccgtgagcttgatcgcgacgaaattattacagtcgcaaaaaaagcagcaaataaagtaagaatggatatatcagaagaaggtttatctctgttttctacatatgcacgcaatggacgtgaaacggttaatatgatgcaaattgcggctggattagcgatatcagaggaacgaacggacattaaaaatgaagatattgaatggattgttcattctagtcaactatctccaagacacgatccgaaaattgcagatgaggaaaaagtgggacttattaatggattagcagtgtacgggcccaactctggagcacttttagaaattgaagtcaaagcgattcctgcaaaggagaaagggaacattattattacaggtatcgttgaagaggaaagtatagggactcaagggaagtctattcgccgtaaaagtatggctaaaagctcaattgaaaatgtcataacggttcttcgttcaatggatgttccagccgatgagtatgatattcatgtaaactttccgggaggcgtgccaattgatggaccttctgctggtattgctatggcaacaggtatctactcagcgatttatgaagttccaatcaaacatacggtagcaatgacaggagaaattggtctgcacggcaacgtaaagccaattggcggtgtgattccaaaaatcaaggcagcaaaacaagcaggcgttcagacggtgattgtgccaaaggaaaatatgaatgcaatggtagaaaaggtaaaaggtatcgatattattcctgtccatcatttaacagaggtgttcgaacaagcactattgtctgtacatgagcatgttgcacatttgtcggtagatccagctatttcaaatagagaatctagctaattctatcatgataattaaaaattaatggtcagatgaatattcatcgcctttttcgcgtataaaacctttatacacagacaacgaaaaaggcgtttttttatgaaaagagcttaaaaagatatattttgccttttaattctttctcatggtacaattagtaattactattgttagacatgtgtatacaaatgagataaaattgttaaaagaattcacactttacatactttaattgacgagcattggaggtgttcattgcatggcagaaaaagaaaaattgacaatgccgctattgcctttacgaggtttgatcgtctatccgacaatggtgcttcatttagatgttgggcgagataaatctgtgcaagcattagaaaaagcaatgatggatgatcacttagtttgtttagtatcacaaaaagatatgggtatcgatgaaccaacaaaagaggatttatatagaaccggtacgttagcaaaaattaaacaaatgctaaagctgccgaatggaacgatgcgcgtcttagtagaaggactaaatcgcgtaaccgttacagaatttgaagacagcgaagaatattttgttgtgcaagtggaaaagcaaaacgaagaacatcaggttgatgtagaagataaagcgctgatacgcacgcttttagactatttcgaacaatacataaaactttccaaaaaggtgtccgttgaaaccctttcaaccgtaagcgacattgaagaaccaggaagattagcggatattgtagcctctcatttaccaataaaaattcagcttaaacaagaaattttagaaataactgatgtgaaagaaagattaaatacgatcatttctcatattcaagacgagcaagaagttttgcagctggagaaaaaaattggacagcgtgtaaagaaatcaatggaacgcactcagaaagagtattatcttcgtgagcaaatgaaggcgattcaaaaagagcttggagacaaagaaggaaagacgggagaagtagcaacacttcgcgaaaaaattgaagcaagtgggatgacggaccatgtcaaacaagtggcgtttaaagaattggatcgctatgaaaaaattcctgctacctccgctgaaagctcagtcattcgaaattatatcgagtggttgattgcgctaccttggacaaatgaaacggaagatacgctcaatattcataatgctgaacaagtgctgaacgatgagcactatggccttgaaaaagtgaaggaacgcgtattagaatatctagctgtgcagcagttgacaaaatctcttaaaggccctattttatgtttagcaggacctcctggcgtagggaaaacatccctagcccgttcaattgctacgtctctagatcgtcattttgtacgagtgtctctaggcggcgtgagagatgagtcagaaatccgcggtcatcgtcgcacgtacgtgggagctatgcctggacgcattattcaaggaatgaaaaaagcaggaacgattaatccggtatttctgcttgatgaaatcgataaaatgtcaaatgatttccgtggagacccgtcttctgctttgttagaagtattggatcctgaacaaaatcataatttcagcgatcactatatagaagaaacgtatgatttatcaaaagtgatgttcgtggctacagctaataacttagctacgattccggggccgctgcgcgatcgaatggaaattattcaaattgctggttacacggagctggaaaagcttgaaatcgcgaagcgtcacctattgctgcgccagctagaaaatcacggattgcaaaagggcaatttgcagattcgcgatgacgcgttaacagcaatcatccgtttatatacgagagaagctggtgttcgtaaccttgaacgcgaaattgcttcaatttgtcgaaaagcagctcgtatcgtagtctctggcgagaaaaaacgcgtggtggtgacggccaaaacgcttgaagaattccttggtaagcctaggttccgttacggacaggctgagacggaagatcaagtcggcgttgctacaggtcttgcttacacaactgtaggaggagacacgctagccattgaagtaagcttatcccctggtaaaggaagactagtgctaactggaaagcttggagacgtgatgaaagaatcagctcaggcagcatttagctacgtgcgttcaaatgcagagaaactaggaattgatgaaaagttttatgaaaaacatgatattcatatccatgttccagaaggagctgtaccaaaggatggaccttctgcaggaattaccattgccactgctctagtatcagcactaacgggtaaaccagtgcgtagagaagtaggaatgacaggagaaattacactaagaggtcgcgtattaccaatcggcggtttaaaagaaaagtcacttagtgcacatcgtgccggattaactaaaatattaatccctcatgataatgaacgtgatattgaagatatccctgacagtgtacaagaggaattagacatcgttcttgtgtcacatgtggaccaagtattggaacatgcgctagtaggagaggtaaaatgaaagtaactcaagccgatattgtcatcagtgcggtacgcccggaacaatatcctaaagaaaacctgccagagtttgcgttagcaggccgttcaaatgtaggaaaatcatcttttattaacaagatgctcaatcgcaaaagcttagcgcgtacgtcgtctaagccgggaaaaactcaaacgcttaacttctttttaattaatgaaatccttcactttgtagacgtacctggctacggatttgcaaaagtgtctaaaaaagagcgtgaagcatgggggaaaatgattgaaacgtatttaacaaatcgtgagcagcttaaagctgtgttaatgattgttgatctacgccatgccccttcaaaggatgacgttatgatgtatgagtttttgaagcaccatgaccttcccgttatggttattgcgacgaaagctgataaaattcctaaaggaaaatggcaaaagcacttaaaagtagtgagagaaacgctggacttagatccaaatgatgaattaattcatttctcatctgaaacaggtgaaggaaaagataaggcgtggaaatctttgcagtatcgcatgactcactaaacaaaggaatagaatctgaaaaaaatggaacgtttatcatcactctaacaggaagtgagtcaaacgttccatttttttaacttgtttacatagattactttcgtttgaaaaataataaatatagcccaactagtaacaataaaataggccagaaggttgttaaataatttacgccgtcttcaacttttggcaaaaatagtttaagacggtctgaaaacatcattaaaatggcaataattaaaagggtgccgccttggaaaaagcctgatttggcttttctagcactgagtaaaaagctaatggccaccataaaaacgaccatgctaatattcgtaggccaaaagggaatttgttcacttacatagaaatgaatacctaaagtgattaatatgtagcttgcaagcaagtttgaatgatcttgagataaagcagactcagttaacagggctgctcctattaaaattaacagtacaggccacgtgtatacctttgctgcaatgctcatatgtagttcattcagtaagaaaaagattccaaatccaactagtaagacaccaaaaaacattgattgctttttcatagtaacctccaggtgtttcaaaacagaaaacgtgataaaacgctgcttttttgatacaatttattacggaataacagttaatatcttaacacatgttttcaaagactgttcacatttttttttcgaatgacttatagaacatgttataatagttagagataaggcgaagcttacacctgtgtaatgtccgccgctttttacgaatagtagaatgaagaacgccggattttacgggcagttatctcactgtagctctttgggaatttaggggttactgcccgtcaaattcggataaataagcacatttcaattatagggggtatgtacaaatgcatattatagcagtcggcttaaactttcgaacagcccctgttgaaataagagaaaagcttagttttaatgagcaagaactaacatctgccatgaaaacgttaagcggccaaaaaagtattttggaaaacatcattgtttcaacatgcaatcgtacggaaatttatgctgttgttgatcaattacacacgggccgttattatgtaaaagcatttttagctgaatggttcggaatagataaagaagagttttcgccttatttaaccatctatgaaaatgatggagccatcgaacatttataccgagtagcatgtggattagattcaatggtgattggtgaaacacaaattcttggacaagtgcgttcaagctttttgcttgctcaagaagaagaaacaattggaacggtttttaatcagctgtttaaacaagctgtgacattagccaaaaaagctcatcatgaaacagaaattggtgcgaacgcagtttctgtcagctatgcagctgtagagcttgctaaaaagatttttggagacttatcatccaaacatgtgttgattcttggtgcgggaaaaatgggtcagcttgccgtacagaatttatatggcagcggagctaaaaaagtaacggtagtgaatcgaacatttgaaaaggcacaagagctagcaaaccgtttttctggagaagccaaaccatttgctgatcttcaacatgctttaagcgaagcagatattttaattagttcaacaggggctaatgactatgtagtaacgaaacaaatgatgagtgaagccgagcgtacgcgtaaaggtcgtccattgtttatggtagacatcgccgttccgcgtgacttagatccagaactagatgagctagagacggtctttttatatgatatcgacgatttaaacgggattgtagaatccaatttgcaagaacgtcaaaaagctgcggatgaaattgaaattatgcttgaagctgaaattgttgctttcaagtcttggcttggtacattaggcgttgtgcctgttatttctgcgcttcgtcaaaaagcacttaccattcaagctgaaacgatgaaaagcattgatcgtaagctcccagatttatctgagcgtgagcgcaaagttttaaataaacatacaaaaagtataattaatcaacttcttcgcgatccaattttacacgcgaaagaattggctggagagaaacatgctgaagagtctttagagctgttcatgaagatttttaatattgaacaggaagttgctttgcaaaaagaaaaagaagagcagcttcatacatcgattacgtctcattcagtagcttatcagtcttaagtgaggattgaataatggttgatatggaattaaccagaatctatgaattgattgtgattttatacgcggtgagcgttttattatattttattgattttgtacaaaataaccggaaggcaaactcgatagccttctggttactttctattgtgtgggttttgcaaacagcctttttaattttacgaatgtttgagacgggaaggtttcctattcttaccgtttctgaagggctgtatttttacgcgtgggtcttaattactctttcacttgtgattaatcgcctgttccgcgttgattttatggtgttttttacaaatgtgattggtttcttaattatggctattcatacgtttgctccacttgaaacatacactgctgtccagtcggagcgccttgtgtcagaattattaatcattcatattaccatggctattttatcttacggcgctttttcagtttcttttgttttttccgctctgtatcttgttcagtataatttattgaaaaagaagaaatggggcaagcgcttgctaagaattgaagatttaacaaagctagattacatgtcctatgtattaattttaattggtgtaccgctgttattgctttcgttaatcttaggaatcatatgggcttatattaaatacgtagattttcattggtacgatacaaaagtgttaggttcatttttaatgtttgttgcatacagcgcttacttgtatgctagactgcgtagaggtattcaaggaaaggcaatcgcaatgtggaatattggattgttcttagtcttacttattaatttctttttatttggcagtttatcgaattttcacttttggggttcgtaattaggaggacaacatgcgaaaaattattgtcggctctcgtcgaagcaaacttgcgttaacacagaccaagtgggtcattgaacagttaaaaaaacaaggtcttccttttgagtttgaaattaaagaaatggttacaaaaggggaccaaattttaaatgtaacgctgtccaaagtaggcggtaaaggtctctttgtaaaagaaattgaacaagccatgttagataaagaaattgatatggccgttcatagtatgaaagatatgccggctgttttgccagaaggattaacgattggatgtattcctttacgagaagatcatcgtgatgcgcttatttcaaaaaatggtgagcgatttgaggagctaccaagcggtgctgtgattgggacaagcagcttgcgtcgaggggcacagcttctatctatgcgttcagatatcgaaattaaatggattcgaggaaatatcgacacacgcctagagaaattaaaaaatgaagattacgatgcgattatcttggcagctgcaggattatctcgtatgggctggtcgagagatacggtcactcagtacctagagccggaaataagcgttcccgctgtaggacagggagctttagctatcgaatgccgagaaaatgaccatgaattattatcgcttcttcaagctctaaatcatgatgaaaccgctcgtgctgttagagctgaacgcgtatttttaaaagagatggaaggcggatgccaagtgccgattgcgggttatgggcgtatattggacggcggaaacattgagctaacgtcgctagtcgcgtctcctgatggcaaaacgatttacaaagagcaaattacgggaaaagaccccgttgctattggttcagaagctgctgagcgcttaacatctcaaggagctaagcttttaattgaccgtgtaaaagaggagctggacaaataatgagtcatgaggctcctctttttttaaaaaaagttttgattacaagagaagcgaagcaggctcatccatttgcagcacagattaaaaagcttggaggcatacctttaagcttaccagtcctcacgttcgcacgttctaacaatgaaaaagaagtgggagatgtcctgctgtcgattgactgttttgattggattgtttttacaagtcaaaacggcatttcttttttctttgaatggctaaaagagttaaatatcagttggagtgctttaaaaagattaaaagtggctgcggttggagaaaaaaccgcaaaattgctagaaaaacatgatgttaatgtgcaacttgttccaaaagaatacgttgcggaatcacttcttgagtcgttaaaagcaaatgtgtcacatcacgagcgagttctccttgtacgaggacaattagcccgctctgttttaaaagatgggttaaaagagtgtgaggtaacggatttagttgtatatcagaccattcgaaatcaagactctgaacgcttggttaagcaacatttagaaataggaattgatgccattacttttacaagttcttctacagtgagattttttgtcgagtcagttaaagatattccgaattggcttgagcttataaatagaaccaaagttgtttgtatcggtcctattacgagtcagacagcgagcgaatatggaattaagcatcttgttcctaacacatacacaataaatggtatgatagatatgttggttagttgttttgaataataaaggaggattttaacatgaaagatttacaatttacacgtcatcgtcgtcttcgtaattctgtaaatatgcgtgcgcttgtacgcgaaacacatttacatcctgaagactttatatatcctatttttattgtagaaggtgaacaaaaaagaaatgctgtaaaatcaatgccaggtgtggatcaaatttctttagactacttgaatgatgaaatccaagagttagtcgatttaggaatcaagtcagctatggtatttggtgttcccgctgaaaaagatgcggtcggctcacaggcataccatgaccacggaattgtccaaaaaggtattcgtcaaattaaagaaaattttccagactttgttgttatcgcagatacatgcttatgtcaatacacagatcatggccactgtggtgtaattgaagacggaaaaatcttaaacgatcctagccttgacttattagcgcgtacagcggttagtcaagctaaagcaggagcggatattattgcgccttcaaacatgatggacggtttcgtggcagctattcgccacggtctagacgaagctggatttgaagatgtgcccgtgatgtcttatgctgttaaatatgcatctgctttttacggaccattccgcgatgcagcgcattcttctcctcaatttggagaccgtaaaacatatcaaatggacccagccaatcgcttagaagcacttcgagaagcagaatctgatgtcgaagaaggagcagatttcttaattgtaaaaccagctctatcttatttagatattatgcgcgatgtgaaaaatacgtttaatttaccggtagtggcttataatgtgagcggtgaatattcgatgattaaagcggcagctcaaaacggctgggtaaatgaaaaagagattgttcttgaaaaattaattagcatgaagcgtgcaggagcggatttaattgtaacgtatcatgctaaagacgcagcacgctggttatctgacaagtaattaaggaggcttacacatgagaagttatgaaaagtcaaaagcagcttttttagaagcgcagcaattaatgccgggtggagtaaatagtcctgttcgtgcatttaaatcagtagatatggatcctatttttatggaacgaggaaaaggagctacgatttacgatattgacggcaacaaatatattgactacgtcttatcatggggacctttaattcacggacattccaacgatcaagtagttgaagcagtaaaaaaagtaacggaatctggtacaagctttggtgcaccaacattaattgaaaatgagcttgctaaggttgttattgagcgcgttccttcaatcgaaatcgtccgtatggtgagttcaggtacggaagcaacgatgagcgcactgcgtttagcacgtggctatacgggccgcaacaaaattttaaaatttgaaggctgttaccatggacacggtgactctcttctaattaaagctggctcaggcgttgcaacgttaggcctaccagatagtccgggagtgcctgaaggaatcgctaaaaacacgattacagtgccgtacaatgatttagaaagtgtacaatatgcttttaaagaattcggagatgacattgccggagtaattgttgaaccggtagcaggaaatatgggtgtggtaccgcctcagccaggtttcttacaagggcttcgtgatatcacatcagaatatggctcactgctcatttttgatgaagtaatgacagggttccgcgtagcgtacaactgtgcacagggctactataacattactcctgacttaacttgcttaggaaaagtaatcggtggtggtttaccagtaggtgcttacggtggtaaagctgaaattatggagcgagttgcaccaagcggcccgatttatcaagcaggtacattatcaggtaatccgcttgcgatgacagctggatacgagacgttaacgcagctgacacctcaatcctacgatgagttcattcgtaaagcagatcgattagaagaaggattgatggcagcagctgaaaaatatgatgtaccgtttacggtaaaccgagctggttcaatgatcggtttcttctttaccaacgaacaggtaataaattacgaaacagcgaaaacatcgaatttagattattttgcagcttactatcgtgaaatggctaatgaaggcgtgtttttacctccttctcaattcgaaggaatgtttttatcaacttctcatacagatgcagacattgaacatacaattgcagcagctgaaaaagctttttcgaagttacgtggataaacagataaataagattgacttttatatcaaagcttacggaggattccgtaagcttttttagttttaaagacatattttaatttatttgttcatacatctttaatgaccgcgctattacctggcgggtgttggaagggggagaacaatttgtcgcaggataatttatcatgtctgcgtttttccgtagaagaatcagtatggtttcaaaaaggacaggaagtctcacaacttttgtctatctccttagagcctcaagtatctattcaagaatatgaccaatacgtgtctattcgaggagcattacaattaacaggtgaatacgaaacgtacgagggagagcactcgttacgcgaatatacaaatgagaatcaagtgcaatctatctctgtccgtgaagacggaacggctgaattatcacatcaatttcctgttgatattaccattcctaaaaatcgtattcaaagtattgaagacgtatatgtatctattgatttatttgattatgaattgccaggcacaaatcagctgcagctaatggctgacttgtccatcacaggattgtacggagaacaggatgaagaacgagaagaagaggaagagttttcagaggaacagcacatcgtctcctatgaagaagtggacgatgctgaagaggtatatactgaaaactttgctcaagaagaagaggaacaagagtttgacgtaagctatcgtgaagctcccgcacttttagaggcagaggctattgaagaagatcattcagaagagccccctagttatttttcatctgtatttaaaaaagaatctcgtgctgagcaggtcgtggaatatgaagaggaagcatatgaaccatttgaagttgaagtgaaaaaagaagcgcaaatcgaggaagaaagagaagacaacgtgattgagctctttcagcttcgtcaagagcaagaaagtttcgaagaatcgcaagctagtgaattgaatacgtatgctgacgttcaacaagaggctgagcaagaagaagctgagcaagaagaggaaaagattattgttgaatttcggaaagaagaaaatgaaagcggccgaaatgaaaacgccctttatttaacaaagctcttttcgcgggaagaagaagctttttcaacgtggaagctttgtattgttcaagacggagattcgcttgatacgatagcaaaccgctataatacgaatgtacaaaacattttacgagtgaataatttagaagatgaatatgagctggaagaaggaagcatcttaaatatccccgttcgttaaagtcggaaagaaaacagttttgacgcatataatgtcttaactgttttctttattttttacgaggaaggagaatatagatgcagcggacagtagcagactacaaagtattgttaaaagaatatgacttagatgttgactttatcgaagactacggaaaagtaaaaaaagtctatacgaaaaccggcgtgtttgcgcttaaagaaatggcgaatcatcaagagcgaaatcaaaactttatccaaaagctgcagaacgtgtatcaaaaaggatggatgggatttgtccctatttatcaaacgaagcgttctcagcccattgtttcagatgaaagcggctcgtattacttaatgccgtggctcccaaataacccgaccgaagagcgtgatattcgatatcataaattatttcaagagcttgctaagcttcacggcgcttcggcgcaggaagtagaagtgaaaaaagaagatatagaaaatcattatacatcgatgaaagaaacgtgggaaaaacgtcaggaagagatgaagcagtatgtagtagaatgcgagaagaaagtttatatgtccccgtttgaattgcattactgtacattttattatgaaatgacaagagcgcttgaatttggttttggaaagctcgatcagtggaacgatgaaatggaagaaaaagaaaagatccggctggttacgtctcatggaaagctatcggctaaacattttatctatgacgaacggggaaatggtttttttattaattttgaacatgcaaaagatgcttcaccgatttatgatttggtctcattttatttccgtactcttcgcacatacccagtaactacctatgacagctatgagtggtttagtacgtatgaaaaacattttgctctcagagaagaggaacggctgcttttacacagttatttggcgtttccagaacccttgtatcagtgtatcgttcaatatagacagcataaagaaagtaaaacagaacttgaacatatgcagtcatttattcgagcatactggctgacgaaaaacattgaacagctcaatattaaaatatttgaagtagatcagcaaaaaaaaatggcagcggaagcagctgcacaagcccaagcgaacgaatagcgcttgggtttttaaatccaatcggaatataaagcaaccgctagtatggcaagcagtgccaacaacagtacatcaaaggttgtagggaaaaatagtgtacgtataccttgaaaaattgttaaaggaacaataaactgtccacaagccgctcctgctgttttgagccaccgctgcagctgatacgaatttacatttattcgtttcttcatttgtacatgcccctttcaatccacgtgcccaggttaaagtcagtatatgaaaaaagaaagaaatggtgccatttttttgagtgggctcttcattttatttccaaaattagcgagtgaatgaaaaaataaagagcagaacaaaaaaattatgaatataatcataaaaaagtggagaagattattgacgattcaacattttttcatatagtataattaagagaaattcatacataaatacagtgaataggaagagtacgggatgttcgtctttcagagagagaaatcagctgctgtgaggtttcttaagaatgtgcactcggaatgtcgcctatgagtagcttttttgaacagctgcatagctcagtagaaaaagccggttaatcaaccgttatgaaatgaagtgtataggcttatcaaacgggatacgtctataaaaaaaggtggtaccgcgaaatcaactcctttcgtccttttattaggaaaggagtttttttatgtttataaaagctttacacagtttctaaagactgaaactttatattatggaggtatacattatgtctgaaaaagaagtgactcttccaacgaagtatgatccaaaagccgttgaagaaaatcgttatcagtattggttagacgggaagttttttgaagcaacaaatgaccctgaaaaagagccatatacaattgtaattccacccccaaacgtaacgggcaagctgcatttaggccatgcttgggatacaacgttacaagacattttaacgcgtatgaagcgcatgcaaggctatgacgttttatggcttcctggcatggaccatgcggggattgcaacgcaggcaaaagtagaagaaaagcttcgcagcgaaggaaaaagccgctacgatctaggccgcgaaaattttgtagccgaaacgtggaaatggaaagaagaatatgcaagctttattcgccagcagtggtcgaagctaggacttggcttagactattcacgcgagcgcttcacgcttgatgaaggcctttctaaagcggtgcgcgaagtattcgtaacgctttacaaaaaagggttaatctatcgcggagaatatattattaactgggatcctgctacaaaaacagctctttcagacatcgaggttatttacaaagatgtacaaggtgcgttttatcatatgcgctatccgttggcagatggttctggacatattgaaatcgcaacaactcgtcctgaaacaatgctaggagatacggctgtagctgttcaccctgaagatgatcgttataagcacttaatcggcaaaaaggttgtccttccgattgtaggtcgtgaaattccaatcgtaggcgatgattatgtagatatggaattcggttctggtgcggtgaaaattacgcctgctcatgacccgaacgattttgaaattggaaaccgccataatttagaacgtattttagtgatgaatcaagacggtacgatgaatgacaaagcaggtaaatatgaaggaatggatcgttttgcttgccgtaagcaaattgttaaagaccttcaagaagacggtgtattgttcaacattgaagaccacatgcattcagtaggtcacagtgaacgaagcggtgccgttgttgaaccttatttatcaactcaatggtttgtaaaaatgcagccgttagcagataaagcagtagatcttcaaaaacaagaagaaaaagtaaactttgtgcctgatcgttttgaaaagacatacttacactggatggaaaatattcgcgactggtgtatttcgcgtcagctttggtggggacatcgcattccagcttggtatcataaagaaactggagaagtatacgtagatcatgaggctccagcagatatcgaaaactgggaacaagattcagatgtattagacacatggttcagttcagcgctatggccattctcaacaatgggctggcccgatgtggatgcagctgatttcaaacgctactacccaacgaacgtgcttgtaacaggctacgatattattttcttctgggtatctcgtatgattttccaaggtcttgaatttacgggtaaacgtccgtttgacgatgtactcattcacggtcttgtacgagatgctgaaggtcgtaaaatgagtaaatcacttggtaacggtgtagatccaatggaagtaatcgagaaatacggtgcagattctcttcgctacttcttatctacaggaagctcaccaggacaagatttacgcttcagctttgaaaaagtcgaagcgacatggaactttgcaaataaaatttggaatgcttctcgttttgcattaatgaacatggacggcatcacatttgaagagcttgatttatcaggcgaaaagtcagttgccgataaatggattttaacgcgcttaaatgaaacgattgagcacgtaacaaaattagctgacaaatatgaattcggtgaagttggacgtattctttataactttatttgggatgatttctgcgattggtacattgaaatggctaaacttcctctttacggagaagatgaagcagctaaaaagacaactcgctcaattttagcttatgtacttgataatacaatgcgacttttacatccattcatgccgtttattaccgaagaaatttggcaaagcttgccgcatgaaggcgaatcgattacagtagctaaatggccggaagtacgccctgagctttctgataaagaagctgctaacgatatgcgtttacttgtagatattatccgcgctgttcgtaatattcgtgctgaagtgaacacgccgatgagcaaacaagtaaaattatttatcaaagctaaagatgaaaatattcaaagccagctcgaaaagaaccgtgcgtatgtagaacgtttctgtaatccaagtgagcttgtgatttcaacagatgtttcattagatgaaaaagcgatgactgctgttgtaacaggcgcagaattaattttacctcttgaaggtttaattaatatcgaagaagaaatcgcgcgtttagaaaaagaatacgacaagttaaacaaagaagtagaacgtgtacaaaagaagttaaacaaccaaggctttattgcaaaagcgcctgctaaagtagtagaagaagagcgtgcaaaagagcaggattatgttgaaaaacgtgaagctgttcagtctcgtattgctgaattacgcggataatcaatgggttaatgaaccaacagaaaaagcgtggcttgtatagcgacgctttttctttacataataatagcgatggaaaagaaaggtgaataaaagatgataacgacatatgaagaagcgcttgattggattcataacagacttcgctttggaatcaagccggggttagaacgaatggaatggatgctagagcagcttgattttccccagcaaaatctaaatgctattcatgttgctgggacgaatggtaaaggttctaccgtttcttatttgcgaaacatgttagaagaagcagggtataaagttggaacgtttacttctccttatatcgaaacatttaatgagcggatcagcgtgaatggacagcctatttcaaatgaagcaatgaccgctcttgttcaggaaataaagcctgttgtggagcgactagaacatacaaacttaggatcagcaacggaatttgaagtaattacagtcatggcttttctttatttcggctatcatgagtcagttgactatgctgtgtttgaaacaggtcttggaggacggtatgactcaacaaacgttgtgaattctatggtgagtattattacaaacattggatttgatcacatggcaatactaggagatacgatagaagaaattgcagcagaaaaagcggggattattaaaaaagaagtccctattattaccggtgcagagcaagtaaaggcgcttgatgtcattactgaagaagcaaagtcaaagcaggcttcgttatttgtgttaggaaaagattttgacattaaaaactatgagcccttagcaaatggagaaggctttgcgttaaaaacgccgtatggcacatttgaacatttagaattaaatatgcttggctatcatcaagtgaaaaatgcagctttggctgtcatggccgttggttatttaaaagaaaagaaaaagctttctatctccaatgagcaaatgataaaagggattcagcatacaaagtggaacggccgctttgagatagtaaatgagcatcctttaacgattattgatggggctcataatgcagaaggcattgatagcttgttatctactttacgccttcattatgaagatcgaaacattcatttagttttcagctgtttaaatgataaaagcgctgatcgaatggttcaagaacttgaaacaatcgctgcaagtattacatttacgtcgtttgactttcctcgtgctcgcgcagctcaagagctttatgagatgagtactcatcataataagcatatggacgaggagtggaaaaaagcaattgcttacgtaaaggaaaaggcgacaggtgaacaagacatggtcgtgattacagggtctctgtattttatatcagaagtgcgggcatttcttctaaaatgagcaaaagcagcaagtgaaatcttgctgcttttaacataatgtgaggaaaggatacggataataaggaagcactaagttcaaagtattgtcactttcaccccctaggtaagtgatatataataaacatgtacatcactaaataaggagattgttaacatgagtaagaataatgaaaaaattgtaccgaaaagtaataaaaactttactggtattattcttaccttttcagtgatagcgaatgtcattattttactgctattcttttcgaatatcggctatcaaggaaaagtaagttttgatttgactatctttccacggttaaatgctattttgaatagttttacgtttatttttttagttgcagcgttgatttcaattttcaggaaaaatattaatgctcataaaggttttattttagcagcattcacttccacactgctctttttagtttcatatttaacgttccattacatttccacagaaacagctacgtttggtggagaaggaatcgttcgtcccatttacttctttattttgatcacacacagtttcctagcagcgattattgttccgctggcactgtttgcacttgtgtggggctggacaatgcaagttgaaaaacacaaaaaaattgtgcgatggacaatgccaatctggctttatgtaagtcttacaggtgtaattgtctacttatttatggctccttactattaaaagacgtctgcttttgcagacgtttttttatgctgtttttgttttttagtggtataatccttattacctataaaaagtgtgttttaaggaaggaggcatacagaatatgacttttatgggtattatgattcagtttattaacgaaggagctgtttgatactaatcaataaaggagagatattgaaatggataaactgtcaacgaggaataaaggaatttctctaatgaaagtgatcatactggtcatcgtaataggtcttctagcagcttttctcattccgtttattggcagctatttaagggaacgagatacattccttcactcaaaagaaaacctacaattagtaagcagcaggcctgagatggaagaaatagtatgagtttaatttacctctatgcttttatttcaggtatcacgttaggttcattttataacgtagcaggacttagaatacctcagaaaaaatctattttatctccaagatctcattgtccacactgtttatacgttatttctccacaacaattaattcccatagtctcctacattaaaaatgcaggaaaatgtagtatgtgtcgcaaaaaaatctccttcatctacccattcatagaattttcgacaggaagtttatttgtatatgctttttttagattgaatatgacgttagaactgattgtcatattaacctttgtttcttttttaacaattatagttgtctcagacatagcctatatgattgtcccaaataaggtgctgcttttctttttgcctatctttctacttgagcgtcttttcattccattaacttcgtggagtgattccttaatgggaggaggaatcgcattttttctcctctttctaatcgcatttctcagcagaggagggcttggagaaggagatattaaattgtatgctttgattggtattgtgcttggagtaaagcttgttttgctatcgctttttttagctatattaataggcggaaccgttagtataggagcgttattaatgaaaaaggcaaaggtaggtgtaccaattcctttcgttccatttatttttataggcacaatcgctgcttattttcatggaaacgaattgatagattggtatgttagcaactatttttattgagcttcacgtcttcgacaaatttaaaatttctgtaactaaatagcgaaaaccttttgtaacaagacgacaaatgtcttgttattttttttttcttctatgatagcatggaaaaaagtgtatgttttatgtcggtttacctcagcttgcaaccgatactaagactacgttaactaaaggcggtggggcagtggacaagcaggaacgaaaaatttcaattaaaatcaacggtcaatccaaggaagaacaagcgccagaaaaagacgagtttacgtgggttcttccggaaccgggatccacggattctcatgtggaagaaaataaagtggtgtttattgaagatgtaagaaatgaaaaaaagaaaaagccgcgattacatcctaaaaatgtttcgattaaaacggtaaacggcggtgtgatcaaacgaacagctgtgattgtactgctagcagtcggaataggcagcggcatcggtatggttggtgtgaaaatgatgacgggaagcgaacagcctgtaagcaaagcacaaacaagtgagcaaatgaaagaagaaaaagcttctcaaacagcgtctaccactgaaagtgttggtaaagctgaaaagaaaagcgaacaggaatcgaaggtgacatcagctgctgcttctactttagaacctttttccttttacattgttcaagcaggtgctttttcatcaaaaactgctgcaaataaagcaatggataaatggaaagaagagaacgaagcaggcgagatcttttcacctaaaacctattctctagtcgttggtgctgccactggagaagaaaaagcgaacgcacttagtaaaacgtataaacaacaaggtaaagatgtatatgtaaagtcttatgaaattaagcccactagcgaattagggaaaaaagatcaaacggttataacaacagcgcagccgtttatggctaatctcttagatcaatctgttaaagcgattgaaggacagcggatagctgatatcaaatctctgaaaaaagagctgacaaaagttcagaaagaagcgtcaaatgaagacattaaaaccatattgagcacccttcaaaaagctgctgcttctctttcttcatatgaagacaataaaagcagtaaagatgcttggcttgctcagcgatacgtgttaaaagctcttcagcagtatgaaagccttgtaacgtcttaacaagtgaggtagtgtaatgctgcctcacttgtttattgtcatttggagatgaaattgctaaaataacgatgtgtccttcttttttaaatcaaaatgcaaaggtgagatgtatgaaacaaacattaattttagcctcaggctctcctcgtcgaaaagaattacttcagcagcttcacattccctttaccgttcacgttagtacaattgaagaaatcgtcaatccatcatacactccgtccgaggtagtaatggatttagctaggcaaaaagcagtggacgttgcttcgcatcataaagaggatattgtcctaggtgccgatacagttgtcgtatatggcaatcgtattttaggaaagccaaaaacgaaacaagaagcgattgaaacacttacgatgctgtcaggtcaaaaacatcaggtattaactggagtagcgttcgtatcaaatgcaaaagttcatacgttttatgaacaaacagatgtagagttttggccgattgaacaagatgaaatcgtacagtacgtagagtcaggagagcctatggataaggctggttcttatggaattcaaggtctcggtgctgcgctagttaaaaaaattgaaggagactatttctccgtggtgggcttgccgctctcccgaacaatacgtgagctaaaacaatacggtttcgtctactaaaaaggagtggcgaaattgggtcaatcattgttaattaaagatttccctcaagatgaaagacctcgagagcgccttgtgtcaatgggtgcttctagtctttctaaccacgagcttattgctattttactgcgcactggaaccaaagatgaatctgttcttcagctgtccaatcgcatattaacgcattttgaaggttttcaacttttgcagcatgcatcgcttgatgaaatgatgaatattaaaggtatcggacctgcaaaagcaattcaaattatagcggctattgaaataggtaagaggattgtacagcggaaatctagtcagcgatataccattcatggccctgaagacggagctaattatgtgatggaagaaatgcgcgtgctgtctcaagagcatttcgtctgtttatacctcaacacgaaaaatcaagttctccacaagcaaaccatttttatcggaagcctcaattcatctattgtccatccaagagaagtatttaaagaagcctttcgtcgttcagctgcatcccttatttgtattcataatcatccctccggcgaccctactcccagcagagaagatatagaggtaacgaagcgcttaaaagagtgcggatttattataggaattgaattgttagatcatttaattatcggagatcgaaaatatattagtttaaaagaaaaaggatacatgtaaggctatgctttttaaaatccttgggttataatagtagtcatgattttaaatgacaagttctttacaatcattcgttattaatagacaaagtatgactttttatcatacaatatttggcgttgacatctatgaaaaaagtatagaaaataaaaaatgttacttatgaaatgaagaaattgaattatggaatttttacctttgcattttggtaagagaaaggaagagacacatgtttggaatcggtactagagaccttggaatagatttgggtactgcaaatacactcgtttatgtaaaaggaaaaggaattgttgtgcgtgagccgtctgttgtggctttgcaaactgatacaaaacaaatcgttgcggtaggtaacgatgcaaaaaatatgattggtcgtacacctgggaacgtagtagcccttcgtccaatgaaagatggagttattgcagattacgaaacaactgcgacgatgatgaaatattacatcaatcaagctcaaaaaacaaaaagtttgtttgcgggtaagccgtatgtaatggtttgtgtaccttctggcattacagctgttgagaaacgtgccgttattgatgcgactcgtcaggctggagcgcgtgatgcgtatacaattgaagaaccgtttgctgcagcaatcggcgccaatctaccggtttgggagccaacgggaagtatggtagtagatattggtggaggaacaacagaagttgcgattatttctttaggaggaatcgtaacatgtcagtcaatccgtatcgctggggacgagatggatgaagcgattattcaatatattcgcaagaattacaatttaatgatcggtgagcgtacgtcagaagcattaaaagtagaagtcggttctgccggaattccagaaggtattgaaaacatggaaattcgcggacgtgatttactaacaggtctaccgaaaacaatcgaaatttcagcagaagaaattgcagaagcgctaaaagatacagtggcttctattgtagattcagtaaaaagtacattagaaaaaacaccacctgaacttgcggcagatattatggatcgcggtattgtattaacaggcggtggcgcattgctacgtaatttagataaagttattagtgaagaaacaaatatgccggttgtcatcgcagaagatccgcttgactgtgttgcaattggaactggtaaagcgttagaacacattgatttatttaaaaatcgtacaagcgattcatatcgctaaatattaagaggtgtagatcgtgccacaatttttcttaaataaacgtttagttattttattagtcagtattattgtattagtggcattgattggtttttcgttaaatggtcgtaaaaatgtaacgtggcctgaacagtttgtcaaagatacggttggtcttgttcaggctacctttaatgaacccgcacaatttgtagcgggtttctttcagaatgtaggtgacttaaagcgtacatacgaagaaaacgaggtattaaaagcccgtttagacgaacgcatgcaattagaaacgaaagccaacgctttgcagcaagaaaataaaaaattaagagcacagctcgacaaaaaaacggatttaagtcaatacaacccaatcgaagcaacagttattgctcgtaatccagaccgttggcatgaggtaattgccattgataaagggacggttcataatgtgcaggaaaatatggctgttatgactcctgaagggctgattggtaaagtgaagcatgcatctaagttcacatctactgtgcagttaattagttcatcagatcgtacaaaccgtgtatctgctaaaattcaggctaaaaaagaagtgtttggtttaattgaaggctatgatgataaagaacaggcgcttgttatgcgtcgtattccatttgatgctgatattaaagaaaagcaaaaagtagtaacgtctggtctaggacaagaagacggcattttccctagcaatcttccaattggcgttatcacaaaaattgagcctgatgaatatggattaacgaaaaaagcttatatcaaacctgctgctgacttgtatgacttagataacgtagttgtagctaaaagaagtgcgcccgctgctgaagacgatttaggggcggaggaggctaactgatgaagcggtttgtccttcctattctcgtgcttgtcgtttttatgtttgaaagtatctttgttaattttgtcgccatggcatcaccatggcgagactggattctatcgcctcactttgttgtagtggtactggcttttatgtcagtgtattatcacccaaagcaagcgatgctatatggggtaatccttggattcatgtacgatattgcctttacggatgtcttgggagtatacgcgcttgggttaccggccgtatgctatatcgtatcaaaactaatgaagatttttcagcaaaatacgcttatcgtaatctgcatgtcgctattagctgtagccattattgagttttatgtatatggaattaatagcattattaatatatccgatatgaccattggtcgcttcttgcaagagcgattttacgcaaccatcattttaaatgccatatttgcactcatttttgcatttccgcttcaaagatgttttcaatatttcgctaaatttatcgatgaacgctgatcggaacatatattacgcttctcgttcatgataggataaaaatgctgattgaagaaacgaaaaaaaggaattgagtaagtctctgtcgaaattatatattcgttgaggtgagcgtcttgaataaacaaaagcaacaaaatgtgacaattaaaggaacaaaagatggattaacgttgcatctcaatgatacatgttcatttgcagagcttttgacggaacttaagacgaagcttttgacaaataagcatggcgatgccgatcagatcgtcacagtgtatgtcaaaatcggaaatcgttatttaactacagagcaggaaaccgaattgaaggcgctcatagaagaaaatcagtatttagtagttaaacaaattgatagtaacgttattttaaagcaagatgcagtccgagtaagagaagaaagtgaattagtatctgttacaaaggtagttcgttcaggacaggttctccatgtagaaggcgatttgcttctagtcggagacgtaaatcccggaggaaccgttgtagctggaggaaatttatttgtattaggtgctttaaaagggattgctcatgcaggatatcgcggcaataaaaacgccgttattgctgcatcgttaatgaaaccttcacagctgcgcattgctgatatcattacccgatcagaagaagagcgcagtgagaaggaagagaatataatggaatgtgcatacttagatgataatgatcaaatggtgatagatcgcgtgcaaattttaccgcatctaagaccgaatttgaccagggtagaaaggagaatttgacagtgggagaggctattgttgttacgtctggtaaaggtggagttggaaaaacaacgacatcagccaatttaggtactgctctagcattagctggaaagcgcgtgtgtctagtagacactgatatcggcttacgcaacttggatgttgtaatggggcttgaaaatcgtattatttatgatcttgtagacgtggtagaaggtcgatgccaaccgcaaaaagccttgattaaggacaaacgttttgaatgtttgtacttacttcctgctgctcaaacgagtgacaaaacagctgttcaaccagaacaaatgcgagagttagttcttcagttaaagcaagactatgactatgtggttattgattgcccagctggtattgaacaaggctataagaatgccgtagctggcgctgataaggcactcgttgtgacaacaccggaagtttcagctgttcgtgatgctgaccgtattattggattattggagcaagaggatatcgagtctccaaaactggttattaaccgaatccgtagtcatatgatgaaaaatggagacatgctggacgtggaagaaatttctcagcttctggctgttgatttaattggaatcgttgctgacgatgaaaatgttattcgtgcttctaacaacggtgaaccaattgtcatggacccatcaagcaaagcatcaattgcatatcgtaatattgcaagacgtattctaggtgaaacggttcctcttcaatcgttagatgaagaagataagggaatgtttgcacgtattaaacgattctttggtgttcgttcttaaaaagcttccgatagaggaagctttttttatttgtgtgattttgtagagtcaagctgtcataagctccacggacaagtcatatagttgattatacgataagaacaaggagaatgatgaatcatgaatcgacgtgctgatgaaatccgtaaacgaattgctgagcgtaagcgaaaacaattaaatacaacgaagcgtcttcctcaagaacctcttcatacgtccttaatgagtgaagaagaaaaatatggatcgatggattattctacggttgaatacacaccatcagcaaaggaatatcacccgttatttcgaaaagaacgctttttatttaaaattttagcttcagcctgcttagtgttaattgtagggattatgttcaagaacgcttctcctacttttgaacaggccagagtggtggttcaacaaacaatggataaagaatttcagtttgcagctgtttcctcctggtacgaagataagtttgggaagccgttaacgctattgccaaataaagagtctagcaaaacggagcaaagtgtaagcggagaatatgctactccggcttcagggaaagtaacggaaacatttgctcaaagtaagcaaggcgtgacggttcaaacaggagtggattcggttgtagaagcaatgagtgaaggtatcgtaaggtatgtaggaaaacgtgatgatactgggaataccgttattattcaacatgccgatggaaccgaaacttggtatggacaactcaaaaaaatcaatgttagtatgtatgattttgtgaataaaggcagagaagtaggaattgtggaaaacagtaaaaaaggcgatgctggaacattctattttgctattaaaaaaggcgacaagtttgtggatcctagtcaggtgattcaatttgaatagtgctttttcgttattcatgaaaattcacattcatccattgttttgggggattttcgtaattggtatcttaacggctacggtaaagcagctttttttgttatttattattgtaattattcatgaactgggccacgccgtagcggctcagtgtttttcttggcggattcgcagaattatgctcttaccttttgggggagtagcagaagtagatgaacatgggaaccgtccatttcgagaagagtttattgtgacaataagtggacctcttcagcatctctggatgtttggagctgctttcttattaatgaaaataaatgtgttatctttggaaacgtatgagcaatttatgtttcaatgcacggtgattttactgtttaaccttttgcccatttggccattggacggagggaagcttctttttttaatttgcagtcggtctttaccatttttagaagcgcataagcttgcgctccggttatcaacgttttttttagctgtcggtattatctacgccgtcattatgcatccttttcagctgcacttatggattgttatttcatttttaattatatccggatatttggaatggaagagcaggcaatttgtctacatgcgctttttgttggagagatatcatggcaaagagcatccaattggagctttaaaaacgctaagtgtatcaaccagtgagacgctccatcaagtcctgcaaaaattccaaagaggttgtaagcatatgattattgctacatctcaaacaggcgagcatgtacaaattgatgaaaatgaacttttacacgcttactttgtagaaaaaagaacaaatagccaactagacgaacttgtaacagtttactgatttctagtaacatagaatagaatgaaaaaagttcggttgcactgaccgaactttttcctatgaatttagattaaagtgaggcaatgtatgtgaaggcatgtattattaacgcggctacttcttcaaaacgtatagccgtgataaacgataaagcactagaaaaaatctatttacaagaacaaagcgagaatcaaattattggtgatatatattggggtaaagtagtaaaagtactgccgcatatgcaagcagcctttatcgatatcggtttatcaatgaacggatttattcatcgaaatgaacttgtatcctatcagcagtcagagaatcctcacaaagatcagcagccgatgtctgcttttattcgtgaaggagaaaaagtattggttcaagttgtaaaagaaggcattgggacaaaaggtcccaagctgacgggtatcattgaattttcttccgatgagcttgtatatttaccgcacggaaactatgtggctgtatccaaaaaaatagctgagccaaaacgacaacagtggaagcagcttggtgagcggttaaagcaaggtatggaaggctttttatttcgaacagcgattgcagaaaaatcagaagccgcggtccaacataaaataaaagagctacagaaaaaatatgagcgccttgaacgacagacacagggaatgaaagttcctgccctagtcagcaaaggacaagattttctcgaaacaagagtgcaagctgcacttcaacaaggaattgatgggatagtagtagatgacttcgacctatatcagcaccttcaaactacctaccctaactcgtcaatagagtactataaaggaaatgaaaatattttctctttttacgatgtggaacggcaaatagagaagcttttaaagcgaatcgtgtggctcaaaagcggaggctatatcgttattgacgaaacggaagcgatgacggtcgtggacgtgaacacggggaagttttcaggaaaagataatattcgaaagacaatgcttcaaacaaatatggaagctgcgtatgaactgtccaaacagatgaaattacgtcacttaggcggcatgatcttaattgattttataaatatgcctcataaagaagatcggacagaagtagaaagatacatgaaaaagctatgtgaacaagatgaagtgcggacgaatgtagttggctttacagagcttggcatattgcaattaacgcggaagaaagtgcgcaatagtattggatcaacattaactatgccttgtgaagtatgtgaaggaaccggtaaaatgattgattccaaaacggctgcttttcaaattgaacgtgtaatttgggaacatcgcggcgcggaagaagaggctatttggattgagacgcgaagtgatgttataaatgaaatgaaggctcaagggtttctcaacgctttagagaaaatggtaaaaaaaaccgtatatcttacgccaagcgatgattatacaaacgcatttgttttgcgtcaattgggatcgaatgagcagatccaaaaaagggtctctgcttctatataaaattttagaagaaaacatgaattccaattgacactaacctttgatttgtagtaagatttaatatgttggtttgtagcacccgtgctacaaccgctcagaacaggttttaagttcacttgaacacctgtgatggcgagtcttagtttttagaggaggtgcagagaatgtacgcaattattgaaactggtggtaagcaaattaaagtagaggctggtcaagcaatctacgttgaaaaacttgctggtgaacaaggcgaaacagttacttttgacaaagtattatttgtaggtggcgacagcgtgaaagttggtgttcctttcgtagaaggtgcaacagttacggctaaagttgaaaaacaaggtcgcgctaaaaagatcactgtatttaaatacaaagcaaagaaaaactatcgtcgtaagcaaggtcaccgtcaaccttacacaaaagttgtaatcgacgctatcaacgcgtaattataacaaatgattaaggtgacgatttctcgtgatgcaaataagaaagttgacgggttcacgatgagtggacatgctgacttttccgaacacggaaaagatcttgtttgtgcgggagcatctgcagtttcatttgggacaattaatgctatcttttcaataagtggggttgaaccgcacttagagcaaggtggagatggtgggtatctccgttgtgagatccctaaagatgtggattcgttcacattggaacagattcaattgctattagagggtatggttgtttcactgaaaacgatcgaattagattacagtaattatataaaaattaacgacaactaaacaggaggtggatgtcatgttagtaagattagaccttcaattcttcgcttctaaaaaaggagtaggtagtactaaaaacggtcgtgattcaatctcgaaacgtcttggtgctaaacgtgctgatggccaattcgtatctggtggttcaattttatatcgtcaacgcggtactaaaatttacccaggtgcaaacgtaggtcgtggtggagatgatactttattcgctcaaatcgacggtatcgttaaatttgaacgtttcggtcgtgaccgtaaaaaagtatctgtataccctgttgctcaagaagcataagatacaaaaagaaaactctaacccaagtaggttagagttttctttttgtagaatatttcacctattacccattggaatttgttataatcgaacatatctaagaagattgatacgagatgtttgtcagcgttgtgaaatacttatgctcgagtcaaagttaggagtgctaagatggaaaaagaatgggatgtcgtagaggtattaagatacgcgcggcatgattggttaaataagctgcaattaatcaaaggcaatctggcgttgaatcggcttgatcgagcgaatgaaatcattgaagaaattgtaaatgaatccaaacatgaatccaagttaacaaacatcaatatgcgactgtttgcgggctttgttatgacctatcattggaataaccatgctgttcgcttagatgtggaagtgctcggagaattgaaggatttatcacaatacgatgagttcgtatacaactggtgttgctatttgacagaagcactcgaaaagtatgttgattatcatgcagaaaactatttaagtatttcagtatgcattgaagaacagggaattcgtttcttttttgactttagtggaatactaacagatatacagaagctacaaaacaagctacaatgttatgagtgcgctcaaggagttgcattggttgaacagcgtatgtctgaagatgaatttagccttatgctcacaataagttaacagcgcttttgctattgcaggagctaagatatagaacggagtggaaaagaaatgtttgtagatcaggtcaaggtatatgtaaaaggtggcgacggaggaaatggaatggttgccttccgtcgcgaaaagtacgtaccaaaaggaggccctgcaggtggtgacggtggtcacggtgcagatgtcatttttgaagtagaagaaggattacgtacgctgatggatttccgctataagcgtcactttaaagcaagccgcggtgaacatggaatgtcaaaagggcagcacggacgtaatgctgagccgatgattgtaaaagttccaccaggtacggttgtgttagatgaagatacgaacgaaacgattgctgatttagttgagcacggccagcgcgcagtgattgctaaaggtggacgcggagggcgtgggaatacgcgttttgctacacctgcaaatccagcaccggagctttcagaaaatggagagccgggtaaagagagaaatgtaattcttgaattaaaagtattagccgatgtaggattagttggtttcccaagtgttggaaagtcaacgttattatccgtaacgtctgctgcaaagccaaaaattgctgaatatcattttacaacaattaatccgaatttaggagtagttgaaacagaagataatcgcagttttgtgatggccgatttaccagggctaatcgaaggtgcacatgaaggggtaggattaggtcatcagtttttacgtcacattgaacgtactcgcgttattgtccatgtaatcgatatgtcaggtttagaaggccgtgacccatatgaagattacttaaccattaatgaagagctgcgtcaatataatatgcgtttaacagaacgtccgcaagtagtggtagcaaataaaatggatattccgcaagctgaagagaatctagctgcattcaaagaaaaagtaggagacgaagtgaaagtctttccaatttctgcagcaacgcgtgatggaatccgcgaactgttatttacagtagctgatcttgtagaaactaccccggaattcccaatgcaagaagaggaagatctatctatgcaccgcgtattgtacaagcatgaaaagaaagaagtggaatttgttattacgcgtgatagcgatggttcatacgtattaagcggtgaaaaaatcgaaaaattattcaagatgactgacttctcacgtgaagaatcagttcgtcgatttgcgcgccagcttcgaggcatgggcgtcgatgaagcccttcgtgaacgaggagcaaaagatggcgatattgtaaagctgtttgaatatgaatttgaatttattgactaattgttgttcataggataaggggaggggctttacttgcataagagcgataagcagttttatttagttcgcgaagatgtattaccagaagcgatgaaaaaaacattggatgcgaagctgttaattgaacggggaaaagctgaatcggtagcagatgctgtacaagccgtagacttgagtcgcagtgctttttataagtaccgcgacacggtctttccgtttcagacggttgtcaaacagcgaattatttcactattttttcatattgaagatcgatcaggaactttatcacatttattgagcaccgttgcatcatcgggatgcaatgtgttaacgattcaccaaaccatccctttacaagggcgtgccaacgtaactctttcattagatacagcaagcatgaatgttgaattaaatgaaatgctgcgaagactgaaaagcttagagtttgtagataaagtggacgtgcttggttcaggggcataatggtaaacagatatagataaggagagacatgattgtggggaaagtaggatatttaggaccaaaggcaacatttacacatgtagccgtccaaggcgtatttaaacagcacgacgaccatattccatacaaaacaattccagcatgcattgatgcagtggataacggagaaattgagtatggaattgtaccgttagaaaatgcacttgaaggatctgtaaatttaacacttgattatcttattcatgaacgtcgtctgccgattgttggggaaattgtgcttccaattcgtcagcatttaatggttcatccatctcgtgcagaacagtggaaaaacattgaaacgatttattctcatcctcatgcaattgcgcagtgtcataaatttttacacggagaatgtacgtcaactgcagtagaagagatgacatcaacggcgtttgctgctaagtatgtaagcgaacaccctgagcttaatattggagctattgcgaatgggttagcagcccatgaatatggattacatattgcctgcccgaacattcatgattatgatcataatacaacaaggtttgttattttgcataaagatggagcgcaagaggtgccatttttagctggaaacggatgcaagacaacgttaatgatcacacttccatctgatcaggcaggagcgcttcatcaagtgctttcagctttctcctggcgtaagctaaatctgtctaaaattgaatcccgtcctatgaaaacagggcttggaaactatttctttatcgttgatattgaacaaaaaatggatgaagtattaatccctggggctatggctgaacttgaggcactaggctgtagcgtagagcttttaggaagctatccccatacactacttgaaacagaaatcccgctttaaagcgggattttttatgttataacacctttttattcattcgaaactaaatagccttctgcttcaagagctaagcaggcagcattcagtttttcaattgtatctgcttcaatcgtatgaaggtgaatcccatctgttagctgagataaataagttgcgtttgtttcttgaattttttctatgaacgtttctacttcttttcgggtttgaatcataacggaagctgttaattcaccatacacagggtgttcaacggttacatcttttacgagaatgccgtgatcaacaagcagaagaagctccttttcagcatcttctggcgtgtgctgacaggcaataattcgctgatgcacggtagtttgagatggattttgaatataaatatatccttggcttgttgcgataatgggctcatttttagctttaagcagcgaaatatcttgtacaatgacttggcggctaacgtttgttcgtttcgaaagctcactgcctgtcattggtttattgtctgtttttaaccattgtagaataagttctcttctttcttctccaagaattttcttttgagttcctggcacctttaatccctccttttacactgtcataaattcttgctgtaataaacgaaaaacggatatgagtcgatcaatatgcttaaacgttgaatgttgactgaatgaaatacgtacaaagttcttagcattcgcagtcgatttgccaatcgcaagtagagaagctaatggttcctggtgatttacatgacaggcacttcccgtagagatagcaattccgtgacgattacattgtaacataacatattgaccctgtatgtttgaaaacgtcagtccaataattccaggaaaatgagagttcccaaggccttctacttctataaacgaagcaagaggctctaggttttccagtaagtacgattttaagcgctcataatggcttcgggcggtcttcatttctgcatatgcgcattcagctgctgcagtaaaggcagcaatgcccgctgtatttacagtcccagggcgaaagcctttttcatgagttgctttatggtaaataggcttccaagaagaacttgaattcatgtataccattcctacaccttttggtccgtaaattttatgactagagactgagatgctatcagctttcagctttttaacatcaataggaagcttaccgaaagattgaacacaatcacagtgaaagagaatttctttttcagataaaaaatggccaatatcctcaactggctggattgtaccgagctcatgattgatatgctgaatggctactagcacagtgtcagggcgaatagtcttctttaagtcgtctacagacacaactccgttttgatctacaggtacgtaagatagggaaaatccttctttttcaagctgctgcaacgtatgaagaaccgaagaatgttcaagcttcgttgtcactacatgttttcttttgtcatttttgccttttaaaagagaatgaatagctaagtaattagcttctgttcccccgcttgtaaaaaaaagatcatcctctcgacaatttactaacaggcttaatttttttctgcatagcgtaagtaaattctctgcttgtgttccaagcgtgtgaagactgctggagtttccataatagcttgttgccgcttcagtatatacctcaattgcttcttgtctcattggcgttgttgctgcatagtccagataaatcattttctccctccgataaaaaaacttcttgtctttcatttaataatatgtaaatataggtgtcaagacacatgtaaataaagaggtgtaaaatgttagagacggatgttttaattattggaagcggattagcagcgttttctgcagcttatgaactgtgtcgtcataacagagttgtaatggtaacaaaagggaaacttgaccgcaataactcagttcttgctcaaggcggagtagcagctgctattggaagcagcgatcactggagtgaacatctctatgatacgttggttgcgggcaataagcattgcaatggacaagcggtacgtactttagtggaagaaggtgcggctgtagtaaatgaattgattcataaaggaatgaagtttgataaaaatccagatggtacgctgcattttggaaaagaaggagcccatcgtatgaatcgtatcctgcatgcaggtggggatgcaacaggacaagcgctgttcgcttttttgaaaaaagaagtactggcatatattacagtgattgaaaacgaaatgattcagcatttaataactgtagatggaacgtgcagaggtgctatcggacaaggtaaaaacaacaaaattactatatatcatgctcgtcaaacggttattgctaccggaggaatcggcgctttgtacaagcatacatctaaccagccgcttgcgacaggagatgggctagcgctagcgtacagggctggagcaaaattagcggacttagaatttgttcagtttcatccgacgcttttgtatcaaaaggaagcgaaaggtctagtgtccgaagcggttcgaggtgaaggtggcgtactggtaaatgaatggaatgaacgcataatggaaggcgttcatccctttaaggatttagcaccgcgagatgttgtagcaaggacaatttttaatgaaatgaaaaaaggaagatccgtatttttagacattgaaaaagtggctcatttccaacaaaaatttcctacgattacggcactgtgtcggaagtataaaattcaactggacaaaaaacgaatacctgttactcccggcgcacattttttaatgggtggaattgaagtagatggttacggacaaacaagtgttgaaggattgtatgccgtgggggaagtttcttctacaggcgttcatggagcaaatcgtctagcaagcaattcattgttagagtgtcttgtatttggaaaacggacggggcgtcatattttacataaagcgagaacggtatctcgttatacccccgtccgttacgtctataaagatatgcctaaaatactgcctgccacaagacaaattcagcataaaatgatggattgtgtaggaatcgttcgtcatgaaaacgaattggctactattgtgcatgaattcacaaattatctggatggaatacctcttgatcaagaagttatatattcgagggaagctgcgaccatctgtaatatgctaactgcgggtctgcttattgcagagtcctctcttgcaagaaaagaaagtagaggaggtcattaccgaagtgactttccgcatgaaaagcaagaatgggagcataagcgaattattaagcagtctgctgcttcaacaaaacaatcattgattttataagcaaggaaatctaaaaggaaaggtgaaggtagcacaatgaacatgttgaaattacaaaaactattgcagtctttttttatagaagacattggagatggagatataacctgtgaagctattttttctccgtctgatcaagggaaggctgtgttcacagcaaagcaatcaggtattatcgcaggagtggaattgattaaagaaggatttcatttaatagaccctgacgtgaaagtgaatttcgagaaaaaagatggagatgttcttaagcctggagataaaatagctaccgtttcaggacccgtgcgatctattttgaccggtgaacgggtaatcttaaacttacttcaaagaatgagtggcattgccacgataacgcacaaagccgtagcgctgcttggcagctcacatacgcgcatatgtgacacgcgaaaaacaacgcctggtatgcgaatgttagagaagtatgccgttcgtgctggaggaggttataatcatcgttttggattgtacgatggcgtcatgttaaaagataaccatattgcacatgcaggatctattctagacgctgttgtgagagtaagagagcaggttggacatatggttaaggtggaagtagaaattgaaaacaaaagtcaattgctagaagcaatagaggcaggagcagatgtcattatgttcgataactgctctccagaagtcattaaagattggataccactggttccggctcatattgtcacagaagcatccggtggaattacgcttggcacgctccattcttttagagacagcggagtggactatatttcacttggagctttaacgcattcagcagggtctatcgatatcagcttggacttattaacagaaaggggaacagaaaacgatgagtttattacaaacgcttcagcagcaaacgctgcccgctaaatatacgcagctcacagaaaatgaaatgaaaagaagagtactagaaattaagaaaaagctcggaagcaaattgtttctgctcggccatcattatcaaaaagacgaagtgtacgagtttgcagatgcggtaggagactccttacagctggctcaaatagcagctgaaaatagagaagctgagcatattgtgttttgcggcgttcacttcatggcagaaacagctgatattttaacagctgaaaatcaaaaagtcattttacccgatatgcgagctggctgttcaatggctgatatggctactattcagcaaacagaaaaggcatggcctgtcttacaggatcttttcggagatacgattattccgcttacgtatgtgaactctacagctgcaattaaatcttttgtaggcgaacatgatggtgcaacggtaacatcttcaaatgcaaaaaatatggtggagtgggcattttctaaaaaagagcgcattctctttttgccagatcagcatttaggcagaaacactgcttatgatttaggtgttggactagatgaaatggccatttggaatcctattgaagaaatgcttgaatatgaaggggatataaacaacatcaaggtgattctgtggaaaggtcactgttctgtgcacgaaaatttcacggttaaaaatattaattatttacgcgagaagcagcctgagatgaatattattgttcatccagagtgttcttatgaagtggtgcaaaaatcagattatgcaggttctacaaaatatattattgatacaattgaaaaagctccttcaggctctaaatgggccattggcacggaaatgaacttggtgaaacggattatcaacagtcatccggataaagaaattgtttcgcttaatccctatatgtgtccttgtttgacgatgaaccgaattgatttgcctcacttgctgtgggctttagaaagcatcgaagaaggaacagaagtgaatcaaatcaaggtggataaacatacagcacaaggggcgatcaaagcgctaacgaatatgttagaacgagcataaagatttttaagacaattaaaaagagaaggtctaaaagaagacttattgacatattgtttgtgttgataagtctttttttctttatcataaaaacttgaaccaaactgtgggcaaaatgaataaaaaaatggttcaaggcatatcttgtgatgaacaaacagaacttactttgattttgcacatatagatggcagagactctactcgggaggggaatgacgttgaaaatccatatcgttcaaaaaggggataccctttggaaaatcgctgaaaagtatggggttaattttgaagagttaaaaaaagcgaattctcaattaagcaatccagacatgatcatgcctggaatgaaaattaaagtgccgacaagcggagtgcctgttcaaaaagaaggagttccttcacctggtataaaagaaatgcctaaagttcaacacccttatagtgaccaatccacaaaagcttatccagtaacggaaattgatgaaagtccagatgagaaaaagtccgctaatcagcctgctcaaacaccgtttatgcagccgataaaagaagcaccaattgcgcagccaaagaaagaagcaccgattgctcaaccgaaaaaggaagcgccgattgcgcagccaaagaaagaagcaccgatcgcacagcctaaaaaagaagcaccaattgcgcagcctaaaaaagaaatgccagttgcgccaaagcttcctaaattaaagccaattgcacctgagattgatattaacaattattacaccgttaatatggcgatgcaggctcccaaaaaagaagcaccaaaagaactacccaagcatgaatcgccagaaagtcctgagatggagagtatagaaatgcctcctcaaatgccatgttacccaatcatgccaatatcgcctgtgatgccaggctacggatttaattatatgccgtgtcatccgccaatgtatgcaccgcagccatatccaatgccaatgtatcaacaggctccaatgtatcatcacggttatgaaaacgaatcgtttgaagaacatgcgatgggcgctcacatggcaccgatgccaatgtatccaatgctgccacacagctgctatggaccggtacaatgttctccttgtccgcctccatggggatatcagcagcccgtttatccggcctatcatcaagcgccaatgtatccacaagtacaaggagctatgacaggtggccattatgaaagttcttccgatggttttggaaacgcaccttaccattatgggcagcaatatgcgccacagcagcaaggagactgcggatgcggtgaaccaagacctgacgactatgcaccacagcagccttatccacagtaccaacaacaggtatcttatggctttcaggacccaagggcaccctatccagccccatatggcatgattggtgtacctccgtatcgtgcgtttgacccaaatgcatttagtattccagaatatgatgagtacgacgaagatgaagattgattattatacacgagacgattttaatttaaatcgtctctttctctatttggaaaaaagagatattcacgttgagacctaccgtatgaaaaagcctcatgtcatcatagcggatacgaacaaaggaaaaaaagtaataaaagcatacagagacaaaggtaaaattgaacatgtttatcattttttatctcagattcaacaagggtacgctgttaatttcgaagcttacccagaaggtgaactttatataaaggaccgtcatttgtattgggcgatgatgccttttgttaagcaagtaaaagaggtaacgtatgaaagttttcaggatcgcgaagaagtattacaagcattgatccgctatcatggagaagttcataaaaagaaaatagccgcgtatacaaagctttctgagtatgatcttattttaaaatggaaaaagcggctttcctcttttcgagaaacctcacatatatttagggaatttaatcaatttcatgtatataaagatattgtgacttggggagaaaaagctttagtcttaatggaacgtttcaaagatagtgggttgaactgttccattattcacggtgacgttgcttcacataatttcttgaaaacaaaccacttgggtattgttatgattgattttgacttatcggctaaagctcctgctctttatgactatgttcagcttgtccagcgctttttgccttacgtccagtggtcgatgaaagaactacttcaacactcgaaaataaaagaattaagcaagcagcgtttttttcttgcttctttactatttccatcgatgctgatgagaaactggaatataaatgcctctgctttatcatgggcaaatcgccaaaggttaatgcagcaatcagtcgaagaatggtcacagcgtacacgtttttatcgagtgatttaccagcacttacaaaacctacatgacatgtaaagagtttataaacacttcatcgaataagaaacggctcgtcttttaatcctaatagtaagctcagagtaaatagagcttaaattagggggcgattatgttgaataggtatgtagcaacttctttagcttttgcatgtatgatgggacttggcgcttgcaataacaaagaccaaggtatggaacagcgctatacagatacgacacagcctgttgggtatcatacaaatgaaaaagcgaatgaacatcgcgtagataatccgaaaggtccaatgactgaagttttagatgggaatggaacacctaattatccgttaaacgtaagtgatggacgttttgacaatccgacaaacccttatggaaacatcaataatacaaatggtcgtacaaatggcgttgctaatatgtattatggtgaagattatccaagagactttacggaaaaagtggctgaccgggctgcaagcgttaaaggtgtagaaaatagtcgcgccgttgtccgtggaaatcagctattagttgctgtagatccggccaaagacataaataacggccgtttaaaacaaaacgtgctcgataaagtaaagcctattgcaaaggactacaatgttcaagtaaaagtagatcatgatgtatttatgaacgctcgctctcttgatgacgatattcgaaatggaaaagaccgaaatacgattcaaactaatttcaatggtctatttgaatcagtcgatgagaatgtcaatcataaacatcgttaaatgaagaagcagctgtctgtgaaggacggctgtttttttgatgagaagacatacaaaaaagctgccattgaagccaggcagctattcctcgaacatgtaactattaatttttcttgttagaagcagatttgtttgttgttttggattccgcttcttccttttgagcgttagtttcattttgtttgaggcgaccttctctttttttcgtatctgctgatgccgtagcgacactctttgtattttttacattttttgcagaagagcttgtctcattagcttgtgtgtttggcttctcgttgttagttgtctgactattttcgtattcagcttccacgtcgcttgctagagctgcagaaacttgagcgtaagtatggtctgtatagttcatcatattttcgtatacttcagggctcgcgagtccatcaggttctacgcttgcttcttctttcttaattgtttcagtccattcttttgtttcttgaataagtttttttcctataattacttcttcaacaataactggtcttttggttatttccactcgttcttccatgattggaacacgaataatttcatcttctgtaagtggcccagcgttatagtctccgtcaactacagggcgacgttcaatataaaactcttctctcgtaacaggaacgtgtacagttctttcttcctctattacttttttgtggagttttacttcaccgacttggacgcgttcttttaagacatctaatttttcttcacgtagttggacggctctatgctcgttgtgttccgtataggttccgtacgctggagtttgttcagagcttacggcatctatcaagattagaattttaccagcagctacatctgtctcgcactgcacggctgagaagtctggtatgcccatgcggattaattttgatttcaagccgtttccttgtttgaggcccatgccgcctgtcatcatggtaaaaaagttatccatcatgacgccagctaatgaacttacggcaggtgaaccagcttcaataattacatttgtatcgtgacctatttggaatgtattgcttttactgttagaaataaccataatgtctgtttctcgataaccttgacgctttaaattatggataacatctaaagcttctttctctgaaaaaaaagttccgactacacgtttattcattctcattacttcagctcccttttttgtgaaaatagataatagaagtccttacaattacttccactatgtacataccctgcgaaaatttaattaaaacgttcaagagaaaattttacaaaaagtgtgcaaatgtaacaaatactccatgttttcttaacataatatcgtaaaagggatttgcttcataaaataagaggataaaagaaaataagtaggtcaaactattagtgtagattttcacaaaacctttttagataatactaaaaagagtatgattaacgtgtgaggtgaaggtgagtgaagaaagtcattcatcaagcagcttttttaatgctagtaagtattgtgctttgtataatgccataccgtgcagatgcgaatgaaaaggagccgatgacattatttcttgaacgcgtgtacgtggatggagtcgtaagtcaagagatgatcaaaagcccttctatgacgaaaaaacaattaatgaaaaaatataaaaattggcgactgcttaaagaaacggatcaagagctagtttttagaacaagcatagacgatatttcacctattttaaaagaaaacggttatgtagggctttctgttaacggtattctctcagcatttgaaggcaaaccagcttcgtcgcagcacattatacaatcgttttttcaaattgacatcaaaaggcttgagagctatcagcatgaacaattaaagaaaggtattcgcgttcaatcaaaagatgaatatctttccctcattaatttctataaaatctatcagctccagcagcggccgctttgaatcaagcagccgttttttagtatggtaaaataattattgaattcaacattctaaattgcttctatttgcttttggcgatatgttaaaatggtattcagcagtctagtattgtatatattttaaaaggtcattcatcaatagaagtgtgcggttctgtttttttacagatattgtaaagataggttgacaaagatgaaaagaggcaaacgttctcttgaacgtctttttaaaaagcagctttaaaggaaaatagagaacgatgcgggcaggattcttcgtaggcaaagttgaagatcactgcccgcgcgtacgtgattaaggagagagcttattgtttgattatatcaaaggcactgttacatatataaatcctgagtatgtagtaatcgaaaacaacgggataggctatcaagtctttacgccgaatccatatgtattttcaattgatgaacaacccaagacggtttacacctatcaatatgtaagagaagacgtaattgcactttacgggtttgcttcccgagaacaaaaggatttatttatgaagttaattagcgtgtcaggaatcggcccaaaaggcggtttagctattttagcgtcaggtaatccagcgcaggttgtccaagctgtggaagaggaagacgagaagtttttagttaagtttccaggagtaggtaaaaaaacagctcgacagatgattctagatttaaaaggaaagctgcatgatattgtaccagatgccgttccttctttatttgcagatttggacgcacatgaagtcaaatctcaaagttcagaagcactcgatgaagcgattgaagcacttaaagtattaggttatgcagaaagagaaatcaaaaaaattgtgccggctttaatgaaggaaacgatgacaacggatcagtatattaaagaagcgttaaaacgattattgaaacaataagtaagggaggagtaaaatggacgatcgtattgtaacgggagatgttcttggtgaagaagaaatcatcgagcaaagtttgcggccgcaaaccttacagcagtacattggtcagcataaagtgaaatcccatcttgacatttttattaaagctgccaaaatgcgaagcgaaacgttagatcacgtgcttttatatggtcctccaggattggggaaaacaactcttgctactattatcgctaatgaaatggacgtgcaaatccgaacgacctcaggaccagctattgagcgtccaggcgacttagccgcagttttaaccagcttagagcctggagatgtgctttttattgatgaaattcatcgattaaatcgttcggttgaagaagtactatacccagcaatggaagatttctgtttagatattgttattggaaaaggaccgagtgcacgttccgtccgtctggatttgcctccgtttacgctagtaggtgcaacgacgagagcagggcttttatcttctcctttgcgtgatcgcttcggcgttttaagccgtttagaatattatcaagaagaagatcttgcttcgatagtagaaaggacagccgctattttagatgtagagattgatgagaaagctacgtttgagatggctaggcgtgctaggggaactccgcgtattgcgaatcgcttgcttagaagagtcagagattttgctcaggtcaaaggggacggagccataactgaaagacttgccaacgaagcattagaaatgttgcaggtggaccgtttaggtcttgatcatattgaccataaattattaagagggattatcgaaaaatttagaggcggacctgtagggttagacaccatatcggctactattggtgaagaatctcacacaattgaagacgtatacgagccgtatctattgcaaatcggctttttgcagcgaacgccgcgaggacgaattgtgacgtctttggtttatgatcattttcagctggaggtgcctgatcagtgaatgatatgcctaagatgcttatcacattaggaggcattgtagtcgtcattgggctgttatggcagttcgttggcaagcttcctggcgatatttttatcaaaaaaggaaatacaaccttttatttcccgattgtgacatgtattctagtaagcgttgtgttatcacttattttttatgtaattggcaaatttaaataattaagtagaaacaggtgaacattttgaaagtagatttatttgattttcatttaccagaagaattgattgcccaaacgccgcttgagcagcgagatgcgtcaagactcatggtattaaacaaagaaacaggaaatgtgaagcatcatatgtttcatgaccttcttgattatgtgcgtgaaggagattgtttagtgttaaacgacacgcgtgttcttcctgcacgattatttgggataaaagaagatacaggtgctaatattgaagtattgcttttaaaacaaacacaaggcgatacgtgggagacgcttgtaaaaccggctaagcgagtgaaagaaggcacggttatttcgtttggtgacggacgtctgacagctgtatgtaaagaaacgagcgaccaaggcggacgtttgttagaattcaactatgaaggcatcttttatgaggttctggaacaactgggagaaatgccgctgccgccttatattaaagagcgcttggatgatcaagagcgctaccaaacggtttttgctcgcgaacaaggttctgcagcagcgccaacagcaggtcttcactttacagaagagatgcttgaacagttaaaagaaaaaggtgtgcatattgcatttttaacgcttcatgttggattgggtacattccgtccagtcagtgttgacgacttagaagagcacgatatgcactcagagttttatcaagtgagtgaaggaaccgctgctttactaaacagcgtacgcgaaaaaggcggtcgcattatttcagtaggcacaacttccacccgtacccttgaaacgattgcaactgagcataacggcaaatttgttgcttcttcaggctggaccaatatttttatcttcccagggtatgaatttaaagcaattgatggaatgattacaaatttccatcttccaaaatctacgctcattatgcttgtaagtgccttagcaggaagagaaaacgttatttctgcctatgaacaagctgtagcagagaagtatcgctttttcagcttcggcgacgcgatgctaattttgtaatttaacatgaaaggaatacatcaatgacagcaattcgttacgaacatataaaaacttgtaaacaaacaggagcgcgtttagggattgtccatacgcctcacggctcatttgaaacgcctattttcatgccagtaggcacattagctacagtaaaaacaatgtctccggaagatttaaaagcaatgggggcaggcattattttaagtaatacgtatcatttatggcttcgtccaggtcatgaaattgttaaaaaagcgggaggccttcataaatttatgaactgggatcgtcccatcttaacggattcaggcggcttccaagtttttagcttaagtgatttgcgccgtattgaagaagaaggcgttcatttccgcaaccatttgaatggagacaagcttttcttatctccagaaaaagcgatggacatccaaaatgcgcttgggtctgatattatgatggcatttgatgaatgcccaccttatccagcagaatatgactacttaaaacgctcagttgaacgcacaagccgctgggcagagcgatgccttgaggctcacagccgccctcaagaccaaggtctttttgggattgttcaaggcggagagtttgaagatttacgccgtcaaagtgcagctgatttagtttcaatggacttcccaggttatgctgtgggagggctgtcagttggagaaccaaaagatgtaatgaatcgtgtgcttgagtttacgacgccatatttaccaaccgacaaaccacgttatttaatgggagtgggatcacctgactcgttaattgatggagcgattcgcgggatcgatatgtttgattgcgtattaccaacgcgtattgcacgtaacggaacgcttatgacaagcgaaggtcgtcttgttgttaaaaatgcaaaatatgcagaagacttcggtccgattgatccaaactgtgactgctacacgtgtcaaaattattcaagagcgtatattcgccacttaattcgttgtaatgaaacgtttggaattcgtttaacatcttaccataacttatattttctgctaaacttaatggagcaagtccgtgaagctattcgcgaagaccgacttggcgatttccgcgatgagttctttgaaaaatatgggtttaacggcccggatgcaaagaatttctaggtcactacaggaattttcatcaaatttatgaatgagtacctgttgataatataaataaaaggaggagttttcatgggtgttttacaaaatatttggccattacttttaatgtttgtcattttctatttcttgttaatccgtccacagcaaaaacgtcaaaaaaacgtacagcaaatgcaatcaacacttaaaaaaggtgataaggttgttacaattggcggtatgcacggtttggtagacgcaattgatgagtcacaagttgtggttcgcagcactgacggttcaaagttaacgtttgaccgcaatgctattcgtgaagtaagaagcgtagattaataaaaaaaacgtcacgtacatgtacgtgacgtttttttatgcttctcgtgaaccggcaatgtttacgccaacaattcccccgagaatagcgactccaataaatccagcgtgaaataaaagctgctgtgcagaaaacaggtgactatagccgagaaattgtagtaaaaacattaaaaaagaataagaaacaccagtggctcctccaacgagaagtccctttgaaccgtttcggcctcccgcgataaatcctccgataaacagtgtaataaatgagagaataagtaaaaataaacgtacggattgttcgtcaagcgatgtgaattttaaaataagcgaaaagataatgctaatcgctaaagccatcactaagattgttgctactcctgcaaatacagcgttgctcattcgctttgcacccaacttgtttccccctcatgaaataaaaagataggtgaacccttagtacgagcatattcgggatgacttcaaaatagacgcataaaagtaaggctattttaaaataaatggtacaaactacaagggaatacataaaggaggtctttgcggtggaactattgatcatggttgcgcgaaccgtgcttttatatgtagtagttttaattatttttcgcgtcatgggtaaaagggaaataggagagctgagcattttggatttagttgtctttattatgattgctgaaatggcagtaatggctatcgaaaacccaaaagatcctttgctgtattcaattcttccgatgttaacgcttctcattattcaaatcggcttagctatatggtctcttaaaagcaatcgaatgcgaaattttattgatggcaaacctagtattatcattgaaaatggaaaaataaacgaacatgaaatgaaaaggcagcgatataacttcaatgacttgctcgtgcagctgcgagataaaaatataaaaaatgtagctgatgttgaatttgctattttagaatcttcaggaaggctatccgtgtttgaaaaagatcagcaatcaggtgaaaaaggcaatttgaatttgccttttatcatcgacggtattattcaagaagagcatctgctgcatgaacataaaacgacggaatggttaaaggcagagctggaaaagctagggtattcaaacttagataagatttcatattgcagctacgacaacgaaaaattttttatagatttggtggatgtaaaacaataaaacgcggattgatccgcgttttattttcgtttaaaatagcgtaaaacagaaaaacggtttaattcttcttttgttatcagtctaaaaagcagcaaaaacagtacgtatacaacgcttgtaagtgcaattgataaaacggttcgtaagctcaaagggatggaagtgaaaagattcatataagcgaagtgtccggtaaaacctgatattcccattacagaaaaactgcgaagatactcaaacacatgaagcttatacgtaatttttttcatgacggtagacaggtgtaaaagagtgacaagcatcattcccacaacaattgcaaggccagctcccataatgcctagattgggctgagttgcgagtaagaagataagagatgttttgaccactgctcctataaaactgttaatcatggcagcttttgcaaggtctagcgcttgcagaacagcttgaagcggcccttgaaagtaataaaagataaaaaaaggcgccattactttgacaaaaatagcagctttgtcagaaccatacatcaattccattaccggattagcaaatacataaagaacaacaacggccagcccgcctgttacaaacgacaagcggagagcttgatgaagccgatattcgatttgtttcatttgattctgtgcaagagattcactgattgcgggaaccaaagaagtggatagagacaccgttacaaaagaaggcaacatcaggagagggagtgcaaagcctgttaattctccgtactgcttcgttgctacagctgtcgctactcctgcaattgctaaactttgagctactacaatcggttctaaaaaccaagaaattgacccaatcatgcggcttcctgtcgtgggaagagcgattcgcattaagtcaaagaacgtatctttgcctgcatgtaaagaagcaaaaaattttcgtcttaccgttattttcttctttcgcttgaacataaacaccatataaaacagtgaagctagttctccaaatacggaagatagcatagcgccagccgcagcgtactcaattccataaggcaaaaatgcttttgtacatacggcaattaacgtaatgcgcaccacttgttcgataatttgagaataagcggcaggcttcatttgttgctttccttgaaaatatccgcggatgacagacgagacggcgatgattggaataactggaataatcgcaagcagcggatagatcgtacgtgaatctgtaaagaaggtttttgctacaacgggagcgaataatattaatccgagcgtaaataaaacgctcagcgtacacgtaatacttaaagagacgacaagtattttttttattttatgcctgtcacctaaagcttctgcttctgccactaacttggatatggcaaccggtagcccaagctgtgttaaggtgattactaataccagcgtggggaccgccatcatataaagtcccacaccttcgtctccaatcattcgagccaccacaattcgattgacaaacccgagtacacgtgtaattaagccagcaattattaaaataatagttccctgtaaaaatttagacatatactcactgctttcttgaggtttatacagtgaatatatgcgcccccggtgtccaagcatgacaagtattcctcatacgagaaagaaattttacgcaaaatgtcaaacggaaaggaggatcgatatgacacatccatttatttcagcttcgaaagaacttatacagcctgtcttatccagcaaaatggaagaatttcatatgcttggatatgaagaagtaacggagaacgatttattgagttatttagaaatgaaaaaatggaaaaaagaaaaggagctatctctccatcaagttgtaaatgatattttatctgttaagatcacgcaggtgatgagctatgtaacaattgaatcttataaatctgatatgttctcaagtgttaataatggagaagactggaaagaattattaaagtagagcttgtaaaatacatgtattaaaatttgataaggtctttatttgacagacattaggttatgaatgataattagattggtcatttatctattgttatcatttcatgttttttacataagaaggaggattttctgtcgatggttaaaagaggacgtatcgttgcctttttcctcttagtactgcttgtgtttagtacaatcggaacaacgatgactggaattacaaaagatattaaacttggcctcgaccttcaaggtggatttgaaattttatataaagtcagtccagctaaaaaaggcgatgtcattgacaaaaaggcacttaacagcacggttgaagcgctccgtcaacgtgtcgatgtactgggagttagtgagcccagcattcaaattgaaggaaacgaccgcatccgcgttcagctagctggtgtcacgaatcaaaagcaagccagggatctgttatcaactcaagcaaacttaacgttccgtgacgtaaacgataaggtgctgatggatggtacagacttagcgcaaggcggagcaaagcaatcgtttgaccaaagcaatcagcctagcgtctcactaaaattaaaaaatgcgaaaaaatttgaaaagatcacgcgagagctttctcaaaaaccagcacctaacaatttaattgtcatttggctggattatgaagaaggaaaagactcgtaccaaaaagaagcgacaaaacaaaatccgaagtatctatctgcagcctctgttagcagcgtgttaacacagccagatgttgagatttcaggtgggaacttcaccgtgaaaagtgcaacgcagctggcggaattgctaaatgccgggtcgctgccggttaaattggatgagctatactctacatccgttggagcacagtttggagaagaagctcttcatacgactatattagcgggtattatcggcatcggaattatcttcctatacatgctgtttttctaccgcttaccggggcttattgccattattacactcagtttttatatctacttgaacttagttgtatttgacttgatgcatgtggttatgacgcttccaggtatcgcggctcttattctcggcgtaggtatggcagtagatgcaaatattattacctacgagcggattaaagatgaactcaaaacaggaaggtctgttatatcggcataccgggcaggaaatcgtcgctcccttgccaccatttttgatgccaatattacaacgatgctagcggctcttgtattgttcttttatggtcaaagttcagtaaaaggatttgctacaacgttaatgatcgggattgtgctaagctttattacggccgtatacggtacgcgattattaatgagccttttagtaaacagccgctggtttgataaaaaaccaggctactttggcgtgaagaaagagcaaattcacgacctaagcaaagacgacggcacaaccgttttacctacagcgtgggataaaattgactttgttaaataccgtaaagtatttttcacgttctcaagtgtgctcgtcattatcggtattatctcggttgccgtgttcaggctgaacctcggtattgactttacgagcggaactcgcatagagattccggcaaatcataccgttacgcaggctgagatacagcgcgaaatgaagtctctcgatatcaaaacggatgacgtagttattacagggaaaagtaatgatacgggtgtcgtacgtgtagttggggtcttgaataaaaaagaaattgccaatttaaaagatcactttaaagataaatacggttctgaaccaaatgtgagcaccgtctcaccgacagttggaaaagaactagcgaaaaatgcaatgatggcgattgtaattgcttcaatcggaattatcatttatgtaacgattcgatttgaattttacatggcgcttgcagccgtgcttgctctgttgcatgatgcgttttttatcgttacggtcttcagcttaacgaagttagaggttgatttaacgtttattgctgctgtcttgacgattgttggttactcaattaacgatacgatcgttacgtttgaccgcattcgtgaaaatatgcagaaatttaaatccaaaacgtttgacgatttagcgtttatcgtaaatctaagtttgcgtgaaacatttactcgttcaatgaacaccgttttaacagttgtaattgcagttgtagcacttcttctattcggaagtgaatcgattcaaaacttctcaattgccctgttagtaggtttaatccttggtgcatattcatctgtgtttattgctgctcagctatggcttgtgtggaaaggaaaacagttgaagcgtgaggaacaaaaagaagtagaaagcaagtaattcaaaaacgtgcgaagtgttcgcacgtttttttgtgcgtgaaaactcaagccgtactgtcagaaaaatgtgcttattttctttcgttgctccatttcatccactctagtataataatgtgggttaaggggtgaagagacatgttacagtcaaaaaaacgttggaatgttcaagaatgtgatgaacaacttgttaatgaatttgtagaaaacctcaatattacacctctagtagcttcgttattacttaatagaggcatgacaacagtagaagcggcacgtgagtttttacacgttgatgcacaaacgttccacgatccgtttttattgcacgatatggacaaagcagtagctcgtattcagcaagcaattgatcataatgaaaaaattatgatctatggagattacgatgctgacggcgtcagcagcacttctgttatgttatctgctttacagcagcttggcactaatgttgatttttatattcctaatcgctttacagaaggttatgggccgaataaggcggcatttgataaaataagcgcaggcggctatcagctggtgattacggtagacacaggtatttcggcagtcgaagaaactgcgtatgcacgtgaattaaactttgatttaattattactgatcaccacgagccggggccggttttgccggatgcttatgcaattattcatccaaagctgcctggaagtacatatccatttaaagaactggcaggtgtaggagtcgcttttaaactcgctcatgcgctgttaggggagcttccggaacatttgttagaactagcagtaattgggacgattgctgacttagttcctttagtcgacgaaaaccgcttaattgctcgcaaaggtcttgactatctcaagctcacgaagcgcaccggaattgaagcgcttctgagcgtatgtggagtaaaacgtgaagaaattaatgaggatacaattggatttgcgatggctcctcgcattaatgcagtaggacgtcttcaagatgccgatccagctgttcatttgcttatgacgacaaatgctgaagaggcaaaaggcttagctaaagaaattgatgcgttaaacaaggaaaggcagcaaatcgtaaacgatattacagaggaagccgttgaatttgttgagagtatgtatcctccggatgaaaacagcgttcttattgtagagggagaaggatggaatgcaggcgttgttggaattgtcgcttctaggctcgtagaaaaattctatagaccaacaattgtactaagtattgactctgaaaaccgtattgccaaaggttcagcaagaagtatcgaaggttttgacttattcgcgaacttatctaagtgccgtgacattttgccgcattttggagggcatccaatggcagccggcatgacattaaacagcgatgatgtagaagagctgcgcagatgtcttaatgaacaagcaagcaacgtgttaaccgaacaggattttattccaattacatcagttgatacagtatgcacaacagaggaaattacgctggaaaacattgaacaaatgagtgcgcttgctccatttggtatgcataacccgaagccaaaagttctcattaaagatgttcatacaacatctatgcggaaaattggtgctaataaaaatcatttaaaactcgtatttgaagacagcggtgtatcggttgatgcagtaggatttgggttaggctatatattagatgaagtatctcctatagctaaagtatcattagtaggtgaactatctattaatgagtggaataatatgcgcaagccgcagctgatggtggaagatatttctgtagatgaatggcagatgtttgattatcgcagtgcagttgatgtcaaacgtttctttcagcaggtatttacggatcaaatgaaagttgttgcttttcacgcttcaacaattgataaatacaagtcgctgctgccgatggagcatgttgttcttattcaagatgaagaacaggcaaaagcatgtatgtttgcaggggaacagatcgttttattagatttgcctccttcacagaagtggcttgaatgtttgtttgttaaaggtatcccttctagaatatacgctattttcttaacggaagaagaccattattttgatacaatcccaactcgcgatcattttaaatggttttacggctttttagcgaaaaagggtccatttgatttaaaacgctacaaagaagatttagcgattcataagggctggtcaaaagaaacgattgattttatggcaaaggtgttttttgagttagaatttgttacaataaacaatggcttaatttcgttagtgaaaaattctgcgaaacgtgatttaatagaatctgcgacttatcgccaaaagcagcagcagattgaaatagaaaaaaactttatttatacgtcatatgtacagcttaaaaatcaatttcaagatatttttaagcgttcgattgaatgaggaggcaacattagaatgaattttaaagattatattacaattgtacctgactggccaaaaccaggtattacatttaaagatatctcaacattaatggacaatggtgatgcataccgtgccgcaacggatgagattgtaaaatatgcgaatgataaacaagttgatattattgtagggccagaagctcgcggatttatcgttggttgtccagtagcatatgcgttaggtatcggttttgcacctgttcgtaaagaaggaaaattaccgcgtgaagtaatcaaagtagattacggtttagaatacggtaaagacgtattaacgattcacaaagatgcaattaagccaggtcagcgcgtgttgattacagatgatttattagcaacaggcggtacaattgaagcgacaattaagcttgtcgaagaattaggtggaattgttgttggagctgcgttcttaattgaactttcttaccttgacggccgtgacaaactggacggttacgatgtattcacattaatgacgtattaagaagaacgatcacataaaaaagagtaccttatacaggtgctcttttttcgttaaaaaacgttaatacgtaaaatggaaatgatgtaaatttgataaattaaacgcaaaggctttacatccttggattttttcaagataatagttacaatatgaattaaaaatgctagttgataaaaggtgatttcatggcaaatgagcaagtcctaacagcggaacaggtcattgacaatacgaagcgatatttaagtgaagaagacgtggcttttgtacaaaaagcatatgattttgcaaaagaagctcacaaagaacaatatcgcaagtcgggtgaaccatatattatccacccgattcaagtcgcaggaattttagttgatctagatatggatccagcaacaattgcagctggatttctacatgatgtggttgaagatacagagataacactaaaagatttagaaaaagcttttaatgaagaagtagcaatgttagtagacggcgtaacgaaactggggaaaattaaatataagtctaaagaagagcagcaggctgaaaatcaccgcaagatgtttgtagcaatggctcaagatattcgagtcatactgatcaaacttgcggatcgtcttcataacatgcgtacgctaaaacatttaccgcaggaaaaacagcgacgcatttcaaatgaaacgcttgaaatttttgctcctcttgctcatcgtcttggtatttcaaaaattaagtgggagcttgaagatacagctttacgttacttaaatcctcagcaatattatcgcattgtaaatttgatgaagaaaaagcgtgcggaacgcgagcagtatttggctgaagttattgatgaagttcgagagcaagtagatgaagtgtcgattaaagttgaaatttcaggacgtccaaaacatatttattccatctatcgtaaaatggcactgcaaaacaagcagtttaatgaaatttacgatttactagctgtgcgcattattgtaaatagcattaaagactgttatgcggtgttaggaattattcacacgtgctggaagccaatgccaggacgtttcaaagattatattgcaatgccaaaacaaaatatgtaccagtctcttcatacgacggttatcggaccaaaaggtgatccgttagaagttcaaattcgaacgtttgacatgcaccaaattgctgagtatggaattgctgctcactgggcttacaaagagggaaaaacagctgagcatgcttcatttgaagaaaagttgacgtggtttagagaaattttagaatttcaaaatgacgcaaacgatgcagaagagtttatggaatctctaaaagttgatttgttttctgacatggtttacatttttacgccaaaaggcgacgtcattgagcttccttcgggttctgttccaattgatttttcctatcgtattcattctgaaatcggaaataaaaccattggagcaaaagtcaacggcaagatggttacgcttgattaccgtttgaaaacgggggacattatcgaaattttgacgtctaagcattcgtatggtccaagcaaggactggttaaagcttgctcaaacgtctcaagccaaaaataaaattcgccaattctttaaaaagcaaagccgcgatgaaaatattgaaaaaggcaaagagctggttgaaaaagaaattcgtcaaatggagtttgacttaaaagaagtattaacagctgataatatcaaacgagtagcggagaagtttaatttctcaaacgaagatgatatgtatgcagctattgggtataacggattaactgcggctcaagtagctaatcgtttaactgagaagtggagaaagcagcgcgatcaagaacaagagatccaaattgatgatattgcacgcgatactgcggccaagcgtgttcgccagcataaacgaaaagattctggggttatcgtaccgggtgtagagaacatgctgattcgcttgtctaaatgctgtaatccagttcctggagatgagattgttggttttattacaaaggggcgaggagtatctgttcatagagcagattgtttaaacgttcacacagatgatgctgaaagccgccttattcctgtagagtgggaaacacatattaaagaaggcaaagagtttaacgtggaaattgaaatttccggatacgaccgcagaggcttactaaatgaagttctgcaggttgtaaacgagactaaaacgaatatttcagccgtttcaggaaaatcggatcgaaacaaaatggctacgattcatatgtcaatttctattcataacatcagtcatcttcataaagtggttgagcgcattaagcagcttcgagacatttattcagttcgccgaattatgcattaagaaaggtcgttatacatgagagtagtcgtacaaagagcaaagaatgcaaaagtaactgttgcaggtgagacggtcggtgagattaagcacggatatatgcttttagtgggcattacccatgacgatactgaagctgatgcagagtatgtagcagataaaattgtgaatttgcgagtgtttgatgatgagtctggcaaaatgaatttgtcgcttctagatgtagaaggagaaattttatcggtatctcaatttacgctgtacggagattgccgaaaaggcagaagaccaaactttatgggagctgctaggccagattatgctgtaacgctttacaactattttaataaagtattatcagaaaaaaatgttcgagtagaaaccggcgcatttggtgaaatgatggacgtatcatttacaaatgacggaccggtcacgcttattgtagaaagcaaagaaaaaacgcaggctcacagatgagtctgcgttttttctttgctttgaaagtagtgatttaatccttcagcgatagcggacgtaatcatttgctgataactgatggaattaatatacgtttcttcccgttcgttgcttaaaaagcccagttcaattaatgtactcggacgtgtattttcgcgaagaacataatagtttccaaaacgttctcctttgtctttcaattttgcatgattaataagggactgatgaatagaatgtgtgagtggactgtcctgatgctgatggtaataatacgtcataaggccagttagctgtgagctgttcgtactgttgtagtgaatgcttataaaagcatctgctttagtcgattgcagcgtgcgctgtgaaagtagaacgtactcatcatgggtgcgggttaaaatgacgtgtgcgccttctttttgaagtttgttttgtaaaataagtgctgttcggagagtgaggtctttttcatatgtgccctgtgtgccgatggctcctttgtcttttcctccatggcctgcatcaataataattgttttgccctttaggtgccgcaagcttttactcagcgtataaacaggctggcgctgcgctacctgcatgctaggctgaacgctgcgaagcgctacggttttcgtgaattttttaaacacccatccttgaatatccgagctttctacataataccaatctccttgacggtctgaaacggatagtcttgtattcttcgtcaatttatttgtaattgaaaatgaacgtcctggaccgctccgtacatgaagagagtcagctgttacaataatgggttgatggaccggtacatctgggcgctcaaatgaggaagagcacagtaataaaaggatacttgcagccaaaacagatacagacttcatgtttagatggcgaatagatagacctcctttttataacaaaatagagtattcgatgaaaataaaaaaaatcctttctcttatgtaaaaacatcttttttgggcaatgctaataaaaggataagtaagtgtaggcagggaggaagaaacgatgaagtttagtgaaaaaggtgaacaatcatttcagcaggtaaatccggtatttggcattcattttcatgattttattgacagagaaagtgaagcttcatcccttgaattggcttctgaatttggtttaacgcttcgagatattcagaaactaagaaaacaattagaccgctcttaacatgaaaggtgcttgacaactgctcatttcattcgtaatatagaaagcaattgctaaattaaaatgaatgtataacatttttatattgataagccaaagatcgagaaaagtagtaaagatgacacatggctagagaggaaatgtcttaggctgaaagcatttctacatgatgactttatgaaagaacactcaggaggcttcactctgaaaagggaaacttagtaggagatgaacgtgttcgtgcgttaacgaaatgagtggaaacatgtcatatgtttcaattagggtggtaccacgtgagatcaactctcgtccctactatggaaaaatagtagaggcgagagtttttttgtattgtaaattttaaatataggaggcatatcacgttatgtcagttcaaatacctagaggcacacaagatattttaccgggcaaagtagaatattggcagtttgttgaacagcgagcaagagaaatctgccgtgcgttcaactaccaagaaattcgtacaccaatgtttgaacacactgaattatttttgcgcggagtgggagaaacaacagatatcgtgcaaaaagaaatgtacacatttaaagatcgaggtgaccgcagcttaacgcttcgtccagaaggaacagctgcagttggacgatcatttgtttcaaataagatgtttggaaatccaacgcagccaaccaagctgttttatattggtcctatgtttcgctatgaacgacctcaagcgggacgtttccgtcaattcgttcagtttggtgtagaagcattaggggtaaatgatcctgctattgatgctgaagttcttgccctgttaatgagcttttaccaatcgcttggattgaaaaaattaaagttggttgttaacagtttaggagatacagaaagtcgtcaagctcaccgtcaagcgcttattgaccactttgcacctcgcattggagagttttgcagcgactgccaaagcagattggagaaaaatcctcttcgtattttagactgtaaaaaagatcgtgaccatgagctgatggctacagcgccgtctattcttgattatttaaacgactattcaaaagaatattttgaaaaagtacagcagtacttaaccgatttagacattgactatgttgtagatccgacgctagtacgcgggttagattattataatcacacagcatttgaactaatgagtgaagcagaaggatttggcgccattacaactctttgtggcggaggccgttataatgggctgattcaagaaatcggcggacctgaaacaccgggtatcggattcgctttaagtatcgaacgcttattatctgcattggaagcagaaggaattgagcttccggtagaaacaggcgtagattgctatgtagtaaccatgggcgatgaagcaaaagaaaaatccgtttcaattgtaaatacgcttcgacgcgcaggctttgtagctgataaagattatcaagataaaaaaatgaaagctcagttcaaagcagctgatcgtgtacaagcaaaatttgttgttgttctaggtgaagatgagctagcaaaacaagttgtaaacgtaaagaatatggaatctggcgaacagcaagaagtatcaattgagcaattggtcagctatttgcaagaacaagtataagggggaaccatgatgacaaaacgttcatactactgtggagatgtaacagaacaagcaactggcgaaacagttctattaaaaggatgggttcagaaacgccgtgatttagggggattaatctttattgatttacgcgaccgcggcggagttgtacaggttgtatttaatcctgaaaaatctgctgaagcgctaaaaattgctgaagatgtacgtaatgaattcgtactggaagtgcaaggaactgttgtggctcgtgaagagggaaccgttaactcgaacttaaaaacaggtaaaattgaagttcacgctgagcagattacggtattaaacaaagccaaaacacctccttttgctattgcggatcaaacggaagtatcagaagatgttcgattaaaatatcgttatttagaccttcgacgttctgagatgtttaacacgcttaaaatgcgcaatgacattacaaaaacaattcgtgacttcttagatcaaaatgactttttagatgttgaaacacctattctaacgaaaagtacgccagaaggcgcgcgtgattatcttgtgccaagccgcgtgcacgaaggggagttttatgctcttcctcaatcaccgcaaatctttaagcagctgttaatggtaagcggagttgagcgttattatcaaattgctcgctgcttccgcgatgaagacttgcgtgcagatcgtcagcctgaatttactcaaatcgatattgaaacatcatttttatctcaagaggacatcatgacaatgacggaagaaatgatgtctaaagtaatgaagcgcgtaaaaaatttagatgtaacgacgcctttcccgcgcatctcatatgatgaagcgatgagtcgctacggttcagataagccggatacacgttttgaaatggagctagtcaacttatcagagcttgtgaaagactgcgggttcaaagtatttagcgcagcagttgaaaacggcggagaagtaaaagcaattaacgtaaaaggtgccgcttctagctattcacgtaaagatatcgatgctctaacagagttcgtgaaaatttacggtgctaaagggttagcatggctgaaagttgaagctgacggcttaaaaggaccgattgcaaaattcttcaatgaagatgagcaaaagcaatttgctgaggctcttcaaacggaagagggagatttacttttatttgtagctgataaaaagtcagttgtagcagatgcacttggcgctcttcgtctaaagcttgcaaaagaacaaggaattattgatgaaacgaaatttaacttcctatgggtaacagattggcctcttcttgagcatgacgaagaagacaaccgttactacgcggctcatcatccattcacaatgccagttcgtgaagatttaccaatgttagaaagcgatcctggacaagtccgtgcacaagcatatgacttagtattgaatggttacgaacttggcggaggatctttacgtatttacgagcgtgatattcaagaaaaaatgtttaaaacgcttgggtttacattagaagaagcatatgagcagttcggtttcttacttgaagcatttgaatacggtactcctcctcacggcggaattgcgttaggtcttgaccgtttggttatgcttctagcaggacgcacaaacttgcgtgatacaattgccttccctaaaacagcaagtgcaagctgtctattaacaaacgcacctggtgaagtaagtgaagcgcaattagacgagctgcatttacaggtgaaaaagcaaaaaacagaagcgtaatcgattgaaccgtctgttaaatcgagcctgtcactggaacatgacaggctcaatttttttgttttacttattaattgcaaagtgattttttctgtgataagatactttcaagaactaaatagtcctgatgtgttcgtccttaatccagttttgaccgaacaattttttgcttgggagctcggagtttttaacgagcgtacatgcctcatctcgaggacttacaatggttaaagcagagcacccacctgccgagagcgggttcaaaacgaaggcactcgagacggcacgatcgggactagcatacatataagaaatcctctatgtaattatttgcatagagtttttttatggataaataacgaatgctcatgttcgttttgctaaaaatatggtatagtcaatttcgttgtttatttgaattaatcatacacgttggtgtatttaatagaggagtgttttaacatgttgcatcagttttcgcgtaatgaactggcgataggaaaagaagggctagctactttaaaaggcagcacagttgctattttagggataggaggagtagggtcattttctgctgaggctttggctaggtcaggagtagggcgtttaattcttgtagataaagacgatgttgatattacaaacgtaaatcgtcaaattcatgcgctgctttctacggtaggtcagcccaagacagaattaatgaaaaagcgtattttagatattaacccagactgtgacgtcgtttctcttcaaatgttttatacggaagaaacatatgaagagttctttagttacaaaccggacttcgtagtggatgcatccgatacgatttcgtataaaattcatttaatgaaagaatgtttaaaacgtgatattccaattatttcaagtatgggtgctgcgaataaaatggatccaacacgtttcaaaattgcagacatttcaaagacacatacagatccaattgcaaaagtagttcgtactcgtctgcgtaaagaaggaattcgcaaaggaattaacgtcgttttttctgatgaacgtccaatcgttattcgcgaagaagttcgcaaagaagtaggaaacgatcaagcgcaaattcgcaaagcgaaaatgcccccatcttctaatgcttttgttccatctgtagcaggattaattatgggcggtcatgttatcaatgaattattaagtgatattaagattcgccgcgtaggtgatgaataaaaagaaggctatcgcagccttcttttttttatggaaatatctgttctatttatgctttggatggaatcttctgtttgatatgtataaaaagtactaataaattgaaaaatatggcttgatggtgaatttacactgtattaaaaaaagagatttatgtaaatttatttaacgctttatttacataaaatttacgttttcgctttctttcttttgtatcttctacagcaatattcagaaagtcttatatatcaagggttttgatagaaataagaaaaaataaaccccaaataagtaagtttacagtaacttaaaattcacttcatataaagacaacaatctactcgtataatgtgtcttgtacctgttgttcgagtacaaaggactagtactaattacacatatatttattggagggtaatgtaatgaaaacaaagggttttaaagtaacattagcagcttttttaatggtaggagcactagcagcatgtggtaaagacggagcaagcaacgacagtggttcgggcagcaaagaagaagtgtcaggtacgttaacagcggcgggatctacagctttacaaccacttgcagaagaagcagcgaatggaattactgaaaaatatccaaacctttcagtaacggtacaaggtggaggtagtggaactggtgttaaccaagtagcatcaggagcagttgacattggaaactctgatgttccagcagccgataaaatcgaagataaatcaaaagcagataaacttgtggatacgaaagtagcgggcattgggttcgcacttgttgtaaataaagatgtaaaagtagaatcgttaacaaaagagcaaattcaaaagattttctctggcgaaattaaaaactggaaagaagttggcggaaacgacgaaaaaattaacgtaatcaaccgtccagcatcatctggtacacgtgctacattcgagaaaacattaatgggtgatgcaaaagtaaatgacagcgttggtacagctcaagattcaaacggagcggttgagcaatcagtaaactcaacgccaggagcagtaagttaccttgctatgtcgtatttaattggcgataaaaaagaaagtttaaaaatgcttaatattgatggtgtagagccaacaacagaaaacattgtttctaaaaaatatccgttttggtcttatgagtacatgattacaaacggtgagccaaaagatggtgcaaaagagtacattgactacgtagctggtaaagactttgctaagcaagtagaagatatgggatatatcccaatgactgagttcaaaaaataagagcgtttttaaaaagaatagggctgactaacacagtcagtcttattctatttgaatgttaataaagtatatagcgaataaaaagaaaagcgaatatatactgaataggtaaggagacagaacgatgaaggggaaaaaatccattaattatgtaaaaagcgaatacattggccgtacgctttctacattttgcggtattttaattgtacttgttacgttagctattatcgtatttatttgtgaaaaaggcatacagtcatttttacaaagtaatatatcaatcggtgaaatgttgacttcaacaaaatggagtccaaacaataaagaatacggcgcacttgtgtttattctgggttccatgcttgtatcaatcggagccgttattataagtgctccaattggacttgctatcgccatttttaataactatatttcgcctaaatttggttcaacggttttacgaccggttttagaacttttagtcggagttccttcagtggtatacggtcttttaggggttaccattttagtgccgcttcttcgcgataacttcggcggagtgggctttagtttgattgccggaattattgtcttaagcgtcatgattcttccgacaattgcaagtattgctgacgatgcaattcgaagcgtagcacctgaatatttagaagcttcttatggactaggttcaacaagatggcaggcaattagccgagtcattattccatctgctaaaacaggtattttaacaggtatcgtgttagggcttgcccgcgcattcggagaagcgctagctgttcaaatggttatcggaaacacggttaagcttcctgaaagcttatatagtccaacggcaacattaacaggtattttaacaatggatatgtctaatacgttaaacggaacggcatggaataacgcattgtggacgttagccatgattttactgcttatttctttcgtgttcattttaattatccgagcaattgggaaacgaggtgctcatcaatgagaaacaaaaatgcacgcacagtaaataatatatggacaggtattttttatggcattgccgctctagttgtggcgctattagtgtatttagttgttgaaattatcgctaaaggctggggattttgggatccgaactttttatttggaaagccaagcaatacgatggcaggaggcggtatcggaccgcagctgtttaactcgttctacatgcttgttttaacgctgatcatatctattcctcttggtttaggagctggaatttatttagcggagtacgcgaagcaaggtcgtttcttaaatttcgttcgcttatgtattgagacaatggcgtcattaccgtccattgtagttgggttatttggattattaattttcgtcacattttccggctggggctatacgcttatcggcggagcacttgtgattacaattttgaatttaccgggtttaacgcgcgtatgtgaaagtgcaattgcatctgttcctgcgagtgtaaaagaagcgagtttaggtttaggtgcgactaaatggcagacaattgttaaagtcgtcattccatcagcgattcaacaaattatcacaggtgttattttaacagcgggacgaatctttggagaggcagctgcgttgatttatacggctggcttaacgacgccgatgttaaattcaaatgctgacttaacgagtcctgtaaacccgtttaatatttttcggccagcagagacgcttgccgtccacatttggaaattaaactctgaaggaatcgtacctgatgcaagattgattgcaacaaagtcagctgctattctgatcattatggttctgttgtttaacattatcgctcgtttagtcgctaaaattttagacagctatttcaaaggttcaacaaaaacgaaaaaacgaaaagacgctaaaagtgtagcttaatagataaagacaaaaaagaaaatggctttgaaactgagcatcagtttcagccattttctttttttaatgtctctaaacgattgaaaacttttgaaaagtatttttcttgtccattttgtttaggatgaaaatattgtttgtttttgatgcgatccggtaaatactgttgaaggacccatccgttatcaaaatcatgggggtattgatattcaacgcctcggccaaggttctctgctcctttgtaatgagcatccttcaaatgagggggaacgtcgccggacagcccttttttaatatcacttatcgcttcatctaatgctttgtaagcagcgttggactttggtgataggcaaagctcaataacggcgtttgcaagtgggatacgtgcttctgggagtcctaatcgctcagttgcttgaatagctgcgagagttctcatgccggcatccggatcagctagtccaatgtcttcataggcaatgactaaaaggcgacgattgatgctgatcaagtctcctgcttcaattagccgtcccaaataatgaagagcggcatttacgtcgctgccgcgaatcgatttttgaaaagctgataatacatcatagtgagcgtcaccatttttatcatgtgaaaaatatttttgctgcagacattcttctgccgtttgtaaggtaataacgattttaccatcgctttcacctgttgataaaacagccagttccagagcattcaaagccgagcgcacgtcaccgttacagctgttggcaaagtggttcatggcgtcatcttcaacgataatttttctatccccaaatccgttggatgagtcgttgagtgctcttgttagcgccattttgatatcatctggcgtaagagattttaattcgaagatttggcatctgcttcgaatagcaggattaatcgcgtgataaggattgcttgttgtcgctccgattagaatgatcatgccgttttctaaataaggaagcaaaaagtcttgcttggctttgtcaaggcgatgaacttcatctaacagcagaattactttgcctgacattttggcttcttcggcgacaatttccatatcttttttattgtttacaacggcatttaactgacgaaacgccgtgttggttgtttttgcaatagctgtggcaattgttgtttttccaacgcctggaggcccatataaaatcatcgagcttaagtgatttgcttttaccattcgataaatcattttatctttgccaactaaatgctgctgcccgataacgtcatctaaatgagtcggacgcattcgaaatgcgagaggttttgtagccatgttgttctcctttcttttctttcactgtatcacaagaggtgaataggtggtggaaatttatcttataggcatagtatgttataatatcaacagttacatttgcaagaaacgcgtatagagaagttcatatagcttagtaaaaacgactcatcacagcattcagtgacaacgtgagggtcttatttttttcataaataaaaaaagtgtattgaaggagtgtatcgtatgaaaatttcaacaaaaggacgctacggtttaacgattatgattgagcttgcgaagcgctttggcgaaggtcctatctcgcttaaaactattgctcaaacgcatgacttatctgaacattatttagagcagcttatttcaccgctgcgtaacgctgggcttgtaaaaagcgtgcgcggagcttatggaggttacatcttagcccatgaacctgctaacattacttctggcgatattatttctgttttagaaggtcctattagtcctgtagaaggaattgaagatgaagagcctgcaaaacgcgagctgtggattcgtattcgagatgcagttaaagaagtgctagatagtacaacgcttgaagatttagcaaatcattctgatgatgatcaagcgtcttatatgttttatatttaataatgagctaggaggcgtttattttggaacgtatttatgttgatcatgcagcaacgtctccaatacatccagcagtcgttgagaaaatgacgacttttatgcatgagtactttggaaatccgtctagtattcatcactacgggcgggaaagtcgacgctatttagacgaagctcgccaaacgattgcagcaagtattggagcacacgaaaatgaactgatttttacaagtggtgggacagaagcagataatatggcactgatcggagtagctcttgcaaaccgccataaaggaaatcatattattaccacgcaaattgaacaccacgctgtgcttcatacgtgtgaatatttagaaacacagggctttgaagtgacttacttaccagttaatgagtacggacaagtatctgtggatgaaataaaatcagccctaaccgatcaaacaattcttgtgtcggtgatgtttggaaataatgaagtaggtgctattcagccaattggagaaattggagttctattaaaagagcatggagcatatttccacacggatgcagtgcaagcttatggattaattccgttaaatgtgcaacaattaggtgtcgatcttttatccgtttcggctcataaaattaacgggccaaaagggatgggctttttatatgcagctgctcacgtttcactgtctcctttgctatttggaggagaacaagagcgcaaacgacgagctggaactgagaacatgacaagtattgtcgggtttgaagaagctgtgaaaatttcgcaacaaacgctgcaaacacgtgcagatgaatatagaagatacaaagaaataatggtagctgtgttgaaagaagaaggtatttcatttgaaattaacggacatcttgaaaattctctgccacatgtgttaaatttatcatttccaaaaacaaatgttgaatcgatgctcgtaaatttagacttagcaggaattgcggcatcgagcggttcagcttgcacagcgggagcaatcgatccttctcatgtgcttgtagctatgtttggaaaagggtctgaacgtttaacaacttctattcgatttagctttggcctaggaaactcagctgagcaaattgaaaaaaccgcacgtcaaacagcaaacatcgttaagcgactaacgatgtaaatagcagccatcagtagggtcttcatccctcactgatggtttgtgtcgtttcgttcgctttttagcgaacaatttaattaaaatgaagaaaatggaggtggcgaagttgacaaaatcacctaaagatacacgtgtagtagtcggaatgagcggaggcgttgattcatctgtagcagctcttttattaaaacaacaaggatacgatgtgatcggaatctttatgaaaaactgggacgatacggatgaaaacggcgtttgtactgcgactgaagattataacgatgttattcgcgtatgtaatcaaattggtattccctactatgcagtcaactttgaaaaacaatattgggataaagtatttacctactttttagatgaatataaagcaggtcgtacaccgaatcctgatgtaatgtgtaataaagaaattaaattcaaagcctttttagagcatgcaatgacgctaggagcagactatctagcgacaggacattatgcacgcgttgcatatcgcgacggagagtataaaatgcttcgaggcgtagatggaaataaagatcaaacgtatttcttaaatcaattaggacaagatcagctgtccaaagtaatgttcccgattggtgaaattgagaaatcaaaagtgcgtgaaattgcgaaagaagcaggccttgctacagcaacgaaaaaagacagcacaggtatttgctttattggtgaacgcaacttcaaagaatttttaagtcattatcttcctgctcagccaggtataatgcaaacgcttgacggtgaagtaaaaggcaagcacgacggtcttatgtactacacgattggtcaacgccacggtttaggtattggaggcagcggtgaaccttggtttgtagtcggaaaagatttagaaaaaaatgttttatacgtcgatcaaggctttcacaatgagcttctttattctacatctcttacagcaaccaatgtcagctgggtaagcgaacgtgactggtcgtcaccaatgacgtgcacagcaaaattccgctatcgtcaaactgattcagcagtaaccgttgaaaaagtcgatgatcatacaattaaggttatttttgctgagcctgttcgtgcaattacgccaggtcaagcagttgtgttttacaaagatgatgaatgtcttggcggagcaacaattgacaaagtatttcaagaagaagagcaaatctggtacgtataattcatataagcaagaacgaaaaacctcggccgtatatagctgaggtttttctatgatatactttacttattgggtaaactaataacttacatattctagattttcatgatgtgaaaatctcttaaatcataactaaaacagtggagtgaacgaaaaaatgacagataaaaatcagctaggaattcagtatatgcaggaagggaaatttgaagaggctgctaaaacattttcagaagcaattgaagataatccaaaagatccaattgtgtatgtgaattttggcaatttgttagcggctgttagtgagatggatcgtgctttgaagttttatgaacgtgcgattgaattagatgaagaaacggcaacagcgtattacggggcaggaaatatttattttaatgcagagcagcttgagcaggcaaagcactactttgatttagcaatcaaaaaaggcttagattcatccgatgcgtactttatgcttggtttaacgctgtttcatatggaagaaattcgttttgcgatgccttatcttcagcgagcggtagaactaaacgagcatgatgtagaagcgaaatttcagtacggtctttgtttagcacagctcgaaatggtagatgaagcgattgctgaatttcttaaggtagtcaatcaagagccagaacacgccgatgctttttataatttaggcgtagcgtatgccatgaaagatgacaaagacaaggcgattgagatgttagatgaagctttaaacgtgcagccagatcacgtaatggcagcaaatgccaaacaagttctgtctacattagaacattaagaaagcgggtaaaggaaggataacatgaacgaagaacaagtgaacccttcacagccagaacgtcattatataagcggaacgtcgattgtaacggtctttcataacgaagaaaacttatataacgttacgcggatacggatcaaaaaaacaaatttagagattgaagataaagaaactgtcgttacaggctattttcctaagctgaatgaagatgaagtatacacgttttacggagacttcaaagagcatccaaagtttggtctgcagtttcatgttgaacagtttaaaaaagaacttccgcaatcaaggcaaggggttgttcagtacctgtctagcgatttatttcatggaatcggtaaaaaaactgctgaaaacattgtggacgccctaggagaacgcgctatttttcgtattttgcaaaatgagtctgtgctaaaagaggttccgaggctttcagccgacaaggcagaagctttagtcacgcagcttcgtgaacatcaagggttagaagaagtaatggtaaagctgacagacctcgggtttggaccgcagctttcgatgaagattttccaagcgtacaaacaagaagcgcttgaaattgttcaaaataatccttatcagctcgtagaagatattcaaggtattggctttagcagggccgatgaacttggaaagaggcttggtatggcaaccaatcatcctgatcgtttgcgtgcaggtattttatatgtcattgagcaagaatgtaatcaaatgggacatgtatacgtcacggcagatcagctgtatggaaaaacagcagagcttcttcgaaaaagcaggcatgagaatctgtctgaaatggatcttacaagagaagtggatgcattaaaagcagacaaaaagcttatcattcaagacgaaaaaatttattttcctccccttttctatgctgaaaaagggctggttaaagctattcaaaaaattatggctcaaacgcagtacgaagagcagtttccagaatcagaattcttattggcactgggtgaactagaagagcggttagacgtgcaatatgcaccttctcagcgcaagggcatacaaaccgctttaatgtctccgatgcttctcttaacaggtggaccaggtacagggaaaacaacggttattaaaggaatagtcgaactctatgcagaacttcacggatgttcgttaaatccaggggattataaaaaagatgaaacttttcctgttttacttgtggcacctactggacgcgctgctaaacgaatgagcgaagcgacgggacttccggcagttacaattcacagattattaaaatggaacggacaagaaggatttgatcataatgaggaaaatccaattgacggaaaattactgattgtggatgaagtatcaatggtagatttgtggcttgctcatcagctgtttaaatctcttcctgctaatttacaggttattttagtgggagacgaagaccagcttccttcagtaggtccgggacaggtgttaaaagatttactgagttcagaagtagttcctaccgtccgtctgacagatgtataccggcaagcggaaggatcttcaattattgatttggctcatgaaataaaaaaaggaaagcttccggaagacttatcaaggcagcaaggagatcgttcctttattcgttgtcaaggacagcacatcacgaatgtcgtgcaacaagtttgcgggaatgcgttaaaaaaaggctatacggctaaagatattcaagttctagctcctatgtataaaggtcctgcaggtattgataagctgaatgaagttcttcaggaattattcaacccggcttctgagcaaagaagagagcttaagcacggagatattacgtaccgagtcggagataaagtgctgcagcttgtaaatcagccggatagcaacgtatttaacggagatatgggagaaatcgtctcggttttctttgccaaagaaaatacggaaaaacaggatatgctggttatttcatatgaaggaaatgaagtaacttacacaaagcaagactttaatcaaataactcatgcatactgctgttccattcataaatcacagggaagtgaatttcccattgttgtgcttccaattgttaaaagctattaccggatgctgcgacgcaatttactttataccgccgttacgcgaagcaaacagtttttaattttatgcggcgaagacgaagcgtttcagcttggagtcagccgaaatgaagacagcgtccgacaaacgaatttacagcccttgcttcgagaaagcttggataacgacatagaagatccagaaattccatttatgaaagatgcaaatattgggatggaaaacgttacgccgtatgatttcatgtaacctttcgcatgctaacaaagagttaaataaactcctttgttgccatccttctttgctaattgtcagaaaataaagtatggacatggaaagaagtggacataatgcgtttatataagtagaacgtataaagaggtgtcgactttgtttaaatgtccaaactgtaaaagtattgacgttggcaaaattggtgtaaatcagtattactgctggaattgttttattgaaatgactatttcaaaaggacaaattaatactcaccaagtagaagaagatggaacattgagctcgcttgatgatttgttctcagacgacgagcgcacaatcaatttctaattcttttttaccgggaggaagagcaatgggcagaatcattccgtcagtagtcgctttcggtcttggagcttatgcatttaaaatggcagatgatcgagagatgtttacaaaaagaaatatgaaaaaaatgcgtaaacgtatgatgaaagctattcactaataaaaaaagcactattgcacttagctgcaatagtgcttttttgcaggcagaagagacaactgcatgtataaactcctttctttatcaaaaaatagaagagaggaggagtttacgttgaaagatagttcattcaaatggttctatagattcggactgctgttattagcgctgctgtgcatattagtcttttttaaagtccagtttttatggcttcctgttatttacatgtttttaaaagcactgctgcctttttttattgcagcattcattacatatttacttcatccgcttattgaaaaaacgcatgataaaggcgtgcctcgtcctctagctattttactgatctacatcatcttttttggaggaattgggtttggagcctataagtcgtaccctatttttgtggaacaagtaaaagatttaaacgaacagctgcctcattttacgaatacatatagacattgggtagaatcgattcatgatcgtacaacttcacttccaaacggtgtccatgagaaaattgaaggcagcattgatgatgtagaggctacgctcaacgtgtggcttacaaaagtggcggaaggattaaagtcattgattacctcttttttgattttaatcattattccatttattgttttttatatgctgaaggatttctcctctataaagaaagcaacagcttatatcacacctaaaaagtggcacaaaccaggcgaacgttttttatcggatgtgaatgaatcccttggcaattacattagagggcaattttttgtttgtctcattattggtgtgattgccacagcagcactgtggttctttcatgtaccttatgcacttcttttaggcttcattattggcgtaacgaatatcattccttattttggcccgattattggtgcggttccagcggctattattgcagccacaatctcgataaagttggttattaccattgtcattataatctttgtgctgcagtttctagagggaaatgtgctgtctccgcttatcgtaggaaagagtcttcatattcatcctttgtttatcatgcttgcgctccttttaggaggagaatttggaggagtattgggtctcattttggctgtgccaattttagcagtcattaaaatatctattttgcatatccgctcttatacgctcaaacattgacaaagagcggttaatttgtcataatatcgccataagaaaacgctacatattttaaacacaatgatggatcgagtacgttgcacactggtttttagagaagggcttccttggctgaaagaagcgctaaacaaagagcagctgaacgctagtccagagtgcaggctaaaacctgccgtgtcagcaacgttaacgctatgaaggtgataaatgcttttggcatttataatcagggtggtaccgcgagttcaactctcgtccctgctacagggatgagagtttttttgtgtgcaaataactagcaattgcttttgtacacagagaaaatagatgcttttatgtcatcatttttttgtctataaataagaagagtattaaaggaggaccaatcatgaaaaaactgacgtcagcacaagttcgtcaaatgtatttagatttctttaaagaaaaaggccatgatgtagaaccaagcgcatctttagttccgcatgaagatccatctttattatggattaacagtggagtagctacattaaaaaaatattttgatggtcgtgttattcctcaaaatccgcgtatttgtaacgcacaaaaatccattcgtacaaacgatatcgaaaacgtaggtaaaacggctcgccatcatacgttttttgaaatgcttggtaatttctctatcggtgattatttcaaagaagaagccatccaatgggcatgggaattcttaacgagcgataagtggattggattcgacgcagataagctatctgtaacagttcaccctgaagatgaagaagcatttaagatttggaatgaaaaaatgggcgtgcctaaagagcgcatcattcgtttagaaggtaatttctgggatatcggagaaggtccgagtggtccaaatacagagatcttttatgatcgcggagaagcatatggaaatgacctaactgatccggaattatatccaggtggagaaaatgagcgttatttagaaatttggaaccttgtattttctcaatttaatcacaatcctgatggcacgtatacgccgcttcctaagaaaaacatcgatacgggaatgggcttagaacgtatggtttctgttattcaagacgtgcaaacaaactttgatacagatttgtttatgccaattattgaagcaacagaaaacatttcaggcgctaaatatcgtacaaatgatgagcaagatacggcatttaaagtcattgctgaccatattcgtacggtaacatttgctgtaggtgatggtgcgcttccttcaaatgaaggccgtgggtatgtgctgcgccgtttgttacgccgagcagttcgctatgctaaaaagttaaacattaatcgtccgttcatgtacgagctagtgccggtagtaggtgaaatcatggttgatttctatccggaagtaaaggaaaaaacggattttatccagcgcgtagtaaaaaatgaagaagagcgttttcacgaaacgttaaatgacggactagctattttggcaaccgttattaaaaaagaaaaagcgcaaaacagtgatacggtacaaggcgaagatgttttccgtttatatgacacgtatggattccctgttgaattaacggaagaatatgcagaagatgagaacatgaaaattgatcatgcaggttttgaacgtgaaatggaagcacagcgtgagcgtgcgcgtgctgctcgtcaagattctagttctatgcaagttcaaggcggcgtacttggtgaagtaacggttgcaagtgagtttgtgggctatgataaaaatgaagtagaaacagttgttgaagcaattattgtagacggagagcttgttgaccgcgctgaagctggaacagaagcgcaagtcatcttaagccacacgccattctacgcagaaagcggcggtcaaattgcggaccaaggtacgattcaaagtgcttcaggtacagcggaagtaaaagacgttcaaaaagcgccaaacggccaaaatgtccaaacggtagctgtaacaaacggtgagcttgtaaaaggtgaaacatatacggcgacgcttgatgaagaaagccgcagtgcgattgtgaaaaaccatacggcaacgcatctattgcatcaagcattaaaagatacgttaggaacgcatgttaatcaagcgggttctttagtaacagcggatcgcttgcgctttgacttctctcactttggtcaagtgacacaagaagagcttgagaaaattgagcaaatcgttaatgaaaagatttgggacagcatctctgtacaaattgaaaacaaagcaattgacgaagcaaaagcgatgggtgcaatggcgctatttggtgagaaatacggagatatcgtgcgcgtagtacaagtaggcgactacagcttagaattatgtggtggatgtcacgtgccaaatacgtctgttatcggtttatttaaaattgtatcagaatcgggaatcggtgcaggtactcgacgcattgaagctgtaactggaaaagctgcctatcagttaatgaacgatcaagtaggcttactaaaagaagctgcggcaaaagtaaaatccaacccgcgtgatttagtagggcgcgttgaaggattactagaagaaattcgtaatcttcagcgtgaaaatgattcactatctacaaagcttggcaatattgaagctggcaatctcgttgaccgagtgcaaaacattaatggtgtgaatgtactagcagcgaaagtgaatgcaacggatatgaataaccttcgcgcaatggttgacgatttaaaacaaaaattagaatccgctgtgatcgtattagcttctccacaaggtgaaaaggtaaatattattgcaggtgtaacaagagatttaattgctaaaggtcatcatgctggcaaacttgttaaagaagtagcgacgatttgcggcggaggcggaggcggacgccctgacatggcgcaagctggaggaaaagacgctagccaaattgaaaaagcacttggcactgtagaagaatgggttaaatccgtttaattctcctctttcttggtgtacaatataaataagacttagcatagtgcacaatgtgttcacaaattaagagagtgaggtgggaccgtgagttcatttgataaaacgatgcaatttaattttcaagatgagccagctgaaacaaacgtacatgaagtattgtttacggtttatgacgcactgcaagaaaaaggctacaacccgatcaaccaaatcgttgggtatttgttatcaggagaccctgcttacattcctcgtcataacgatgcgagaaacacaattcgccagttagagcgagacgagctcattgaagaacttgttaaatcttatttacaacagcatcgaaaggattcataaatgcgcgtattaggattagatgtaggaaccaaaacaattggtgtggcagttagtgatgaaatgggatggacagcgcaaggaattgaaacaattaaaattgcagatgagcagatggagcaatcatatcctcgtttacagcagctaattgacgaatattccgtagagaaaatcgtagtgggtcttcctaaaaatatgaatggtacgattggccctcgaggcgaagcgtgcattgagtttgctgacaacgtcaaagaaaaacttaacattgaaacgatgatgtgggacgagcgcttgtcgacgatggcagcagagcgagtactgctgtctgccgatgtaagccgcaagaaacgcaaaaaagtaatcgataaaatggcagctgttatgattcttcaaggatacttagacagcaagcagtaagaaaagcagcaggctctgcctcagctgaaaagttatgaatttcccttttgcatattcttttgtacgtaaaagggaagtgaaataactgaacggcttgcttttcgctgaagaaaaagttaagctaagagcttacaatataaaatgaggtgcaaacatgagcgtagaagaaaataaaattacaatcgtcgatgagaatggaaatgagcagctatgcgaaattttattcacatttgattctgatcaatataacaaatcatatgtaatttactatccaatcggagcagaccaagatgatgaagaggaaattgaaattcatgcatctgctttcacaccaagtgaagatggtcaagacggtgagcttcaaccgattgaaacagaagaagagtgggacatggttgaggaaatggttaatacattccttgacgaagaaggcgaataattatagtgaaaaagctgatgacaatcgttatcagcttttttttacatagcggctgttctttttagatataaaaaggtttttccttgcattcttagggcagattgtatgataatgacgaaaaataagataaattgtagtataataatccctgcgtgtgagagtgcattttaataaaagaattcattgtttgaacggatgaaactagactttgggcagacaataacataaatcatggaaaaattttagaagaggcgagagtttaaggaagcgataccatctcacacctataggcgatacgaatgaatcgcaatctcatgtctcttctctgttcatacttataaaaaatcaagaagaaaagaggtgaaactggttgtatcttcttttacagaagtagatttaaccaggaagctgcttgtcgcaacaaacatttttaccacctaatcgttcaagaaaaaaacgagttatttttattacaattatcgtacttcttttactagttggcggtgcatttttctatgctcaatcccgcttaacgcccgtggatcgaaacagcaataaaaaagtaaatgtgaccattccacaaggttcttccgtccaatcgattggtacggtattgaaaaaagaagatttaattaaaagtaaaagtgcatttcgctattacgtaaaattaacccatgtgtctggatttcaagctggaacgtatttattttctccttccatgagcttaggggaaatggttgaaaaaatggaaaaaggcgaggtttcaaaacaacctgatattcgtgtcaccattccagaaggacgccagcttgtcgaaattgctgatatcattgctaaaaatacaaagtttacaaaagacgaagtcatgaaaaagctagacgataaggcattcgtcaataaaatgaaagaaaaatatccagatttagtaacggatgaagtgatgcaaaaagatattaaacatccgctagaaggttatttatatcccgttacgtatgatttttatgataaaaatgtgtcgttagatgaaatattggataaaatggtagggaaaacaaataatgtattagttcagtacagtgggcaaatgaagaagaaaaaattcagtgcacataaattgttaaccatgtcttctctcattgaagaggaagcgactgcgaaagtcgaccgagaaaaaattgccagcgtcttttataatcgccttgaaaaaaacatgcctcttcaaacggatccaaccgtcttatatgccttaggagagcataaagaccgcgtgttctataagcatttagaagtggactctccttacaatacgtataaagtaaaagggttgcctccaggaccaattgccagctctggtttaatgtcaatcaaagctgcgttacatccagccaatacagattatttatacttcttggccacacctgaaggaaaagttatttttactaaaacgttagaagaacataacaaagaaaaagccaagcatattacaggtaaagaaaagcaaaataccgaaaaataagtggaaatttaaaattggggaatcgcgatacttcgcattccccatcttttatgttaaaatatatcgggtttacgtaaaaacgaaaaaaacttataatagactagttgtcttactattttgcagtaatgaaacgttatgaaaacataatgtaaaatgtacttctgagaacggaggaagtgttttgcttttacaaaacgtagagcagtatgtggaaaagcttattcctaagcgccaggagcttattgaagaaatggaagcttatgcaaaagaacatcacgttccgattatggaattgattggtgttgaaacgctattgcaaattcttcgtcttcaccagccaaaacatatattagaaattggaacagcgattgcatattcgtctattcgaatgacccatgcgcttccagaggcacgagtggttacggtagaacgaaatgaagagcgttaccaaaaagcgcaagaatttattgaacgggcgggaaaacaagataaaattgtgtcgttgtttggagatgcactagagcttagagatgagattgaacgtcatggtccttatgatgcagtttttattgatgcagctaaaggtcagtatcagcgtttttttgaacattatgagccgatgctatcttctaaaggaatgattatttcggataacgtactatttaaaggtcacgtagcgaccgatttggccgaagtagaaacacgtcgacgccgcagcttaattaaaaaaattcaggcatacaatacgtggctgatgaatcatcccgattattatacaactattctccctattggagacggaatcgcgattagtattaaaagaggtgaccaagaatgaaaaaaccagaactattagtgacaccaactgcagtttcggaaatcgaatcattactacaagctggagcaacagctgttatggttggtgaacagcgctacggtttgcgtttagcaggtgaattcaaacgtgaagatatcgtagaagctgtaaatattgctcatcagcataatgcaaaagtctacgtagcgatgaacggattatttcacaatgataaaatcgccgaactaaatgaatatattttattcttaaaagaagcaagcgtggatgcgattgtatttggagatcctgctgtattgatggcagtgcgtgaaacagctccagaaatgaaaatgcactggagtactgaaacaacgggaacaaactggtattcatgtaactactggggacgtaaaggagctaagcgcgcagttcttgctcgtgagctaagcatggatagcatcattgatatcaaagaaaaagccgaagtagaaattgaagttcaggtgcatggcatgacgtgtatgttccaatcaaaacgttcacttcttggcaactactttgagtatcaaggaaaagtcatggaaattgaaaatcgtaaagtagaaaaaggtatgtttttactcgataatgagcgaaacaataagtatccaattttcgaagatgaaaatggaacgcacattatgagtccaaatgatatgtgcattatcgatgagctttccgaaatgattgacgctgaagtagatgtattcaaaattgacggcgtattaaagtcaccgcaatatattttagaagtaacaaaaaaatatcgtcaagcgattgatttatgtgtagatgaccgtgaagaatacgaaaacgttaaagacgatttgttagaagaaattgaaagcttgcagccaattaaccgtccgttagacacagggtttttctttaaagaaacggtatattaaaaagcatgcaaagaaagataaacaaaggaggtacaaacgatggctgttcaaatcgatactgtagtagaaggtaaacgagttattactaagaagcctgagttgttagctccagccggtaaccttgaaaaattaaaagttgccgtacactatggagcggatgctgtatttatcggaggaaaagagtttggccttcgttcaaatgcagataactttacatttgaagaaatggcagaaggtgttcagtttgcaaacaaatacggcgcacgtatttatgttacaacaaacatttttgctcataatgaaaatatggacggacttgaagattatttaatggggttagagcgcgctggtgtttctggaatcatcgtagctgatccgttaattatcgaaacctgtcgacgcgttgcacctaagcttgaagtacatttaagtacgcagcaatcactttcaaactggaaagccgttcagttctggaaagaagaaggattagaacgtgttgtacttgctcgtgaaacgggtgctgaagaaatgcgcgaaatgaaagaaaaagtggatattgaaattgaagcttttattcacggagcgatgtgtattgcttattcaggccgctgcgtgctaagtaaccatatgacagcacgtgattcaaaccgcggaggctgctgtcaatcatgccgttgggactatgatttatttaaagtagaagacggtaaaacggaaacggctttatttgatgagcaagacgatccgtttgcaatgagtccaaaagacttaaatttaattcaatctatccctcaaatgattgagctggggattgatagcttaaaaattgaaggacgtatgaagtcgattcactatatcgcaacagtggtgagcgtatatcgcaaggtgattgacgcatactgtgcaaatcctgagaattttgtgattcaaaaagaatggcttgatgagctagacaaatgtgcaaaccgcgatacggctcccgccttttttgaagggattcctggagtggatgagcaaatgtttggcgtacacggcaagaaaacaaaatttgattttgctggtttagtattgaattatgatgaagaaacaagcatcgtgacattgcaacagcgtaactattttaaaccgggagaagaagtggaatttttcggtccggaaattaaaaactttacgcaaaaaatagataaaatttgggacgaagatggcaatgaactagatgctgcgcgtcatccgctgcaaattgtgaaatttaaagtggaccaacctctattttcatataacatgatgcgaaaggggatttaaatataaaatggggaaaaagcccgttgtaatcggtatcgctggtggatccggttctggtaaaacaactgtaaccaaagctatttatgagtattttaaagggcattctattatgcttcttgagcaagactattattataaagatcaaagcgatgtaccgtttgaacagcgtttgcaaacaaactacgatcatcctttagcatttgataatgatttgctgattgaacacttgcaaaacttattaaattatgagagcattgacaaaccggtatatgattacgcaattcatacgcgctctgaaaaggtaattagagaagaaccaaaagatgttattatcttagaaggtattcttgtactagaagatcagcgcttgcgtaatttaatggatatcaagctatacgtagatacagatgcggatcttcgtatcattcgtcgtatgcttcgtgatattaaagaacgagagcgtacgcttgagtcagttgttgatcaatacgtatctgtcgttcgcccgatgcataatcagtttgttgaaccaacaaaacgttatgcagatattatcattcctgaaggcggtcaaaaccacgtagcgattgacttgatggtcactaaaattcaaacaattcttgaacaaaatgccattttataataacatagcatagatgcaggaatttttttgaagacaatgcagacatattctgctaactaaacacaaacattataaagaatagagaaacgagcagcttctattttgaagctgtcatttctctattaactaatttttccacagagtggaaaattttttgtacatacagaaatggactgtatacactagagattttgagttcaagaaggagtgaagggattatggcacaagaaaaagtatttccaatgacagaagaaggaaagctaaagctagagcaagagctagaatatttaaaaacagtaaaacgtaaagaagttgtagagcgtatcaaaatcgcccgcagttttggagatttatcggagaactctgagtacgattctgcaaaagacgagcaggctttcgtagaaggccgtattacaacgcttgaaaatatgattcgcaatgcgaaaattattgaagaagatgtagaaaattcttctattgtatcattaggtaaatctgtaacatttgtagagttgccagatggtgacgaagaaacgtatacaattgtaggtagtgcagaagcagatccgtttgaagggaaaatttcaaatgattcgccaattgctaaaagtctaatgggcaaacaaattggagatcaagtaactgttcaaactcctggtggagatatgtcagtgaaaattgtatctgttaagtaaaacatatggttggaagcgttctactgaatgctcgtaagtaaaaaagctgacacgcgtcagctttttttatatgattttaaaaagcggagagaatagaaaagatatgtaagaaaggaaagatgaaaatgaaagatatcgattttactaaaacagcgcttgttttaattgatttacaaaaagggattgttccaattggaggagacgaaattgtggagaaatctgttcagcttgtgaatcgtttccgcgaacaaaatggatttattagctttgtacgagtagattttcaagatggaaaagatgcgttgacgccagaaacggatcaaaagccatctgctcctcaagaaagacctgcagactgggcggaattcgatccaagacttaatgttcaagagaatgattacattgtgacaaaacgtcagtggggagccttttttgggacagatttagaccttcagcttcgccgaagaggaattgatacaattgtcctttgcggaattgcaacaaatattggtgtggaaagcacagctcgtgaagcatttcagtatgggtataaccaaatttttattacggatgccatggcgacatttacaaaagaagagcatgaagcaactctttcttacatctttccgaaaataggaaagctaagaacaacccaacaatttttaacagaaaattaataataaaaacttgctgattcagcaagtttttttgtgaaatgaaaaaaagaatgaatatttcttaagataatggttttaaaagtaatggcaacgtcgacacttgtaaagagtgaggtgtagtcatgaaaataattcacaagcgaatttatattactcttatttttattttattattaattagtggactcggagcacggcttgttcaactccagcttgtcagcacagaatcttttactgacaaaaagattaacttaattgaaggaagcgtaaaacagcgtacgcaggaaatggtggtagatgacgggcgagggaaatttgaagataaaaatggacagtctttaacatctatcacgcataatcgcttagtcctgtttccatttttagaaaaaatgaagtggcctgttcagcaagtaagtgaaatcgtgggaatgcaaccaaaggaactaacgaacagactagcgaatgctaaaacaccggttgttattacaaaagaattatcccatgcacaagtcgaaaaaataaatgcattaaaggtacctggcgtatttggaattcctctaaaagatgagcgtccagttcctcttgctgaacatttaatcggactagaggcacaaagcaaacaaataattgaagagaagtatagtgacaaattaaaaaatggagcaattaaatcaactacgcctgtaggtatctcagggatgcagagagcttttgacgagtttttgctgcctgaacaggagtctaagctcctttatcatgttgatcgcctaggtgggcctatgtttggcatcgatgtaaaatacacgggcaccgctaacccttattatccagtcagtgtgcgtacgacgcttgatttgtctgctcaggagctagtggagaatacattaaatcattataagttaaaagacggaggagccgtcttaattgatataaaaaacaataaagtaattgcgatggccagcaggccttcgattaataagaaagatccatttaaaaagcaaaacggttcagacagcgtagaaaaccgtttgctgacaccacaaactcctggatctatatttaaaaccgtaacagcagctgcagcgcttgaacaaaataaaattcagccttcttttacctataactgcgataaaagtatttatggcaataatgtagaagaagatcatcaaaaagggcagctgacgtttgaagaaagcttcgcgcaaagttgtaatgcaacgtttgcacagctagcaaaagaaatgataatatctaatccggatatccttgaacaatatgccgataagttagggcttattcagcctgtaggatggacgggtgatgtgtttcactttgaacattttaagcagtttttaggagaaaaatcgggaagagtttggacaaatgaaagagaaaaaaaagtaccaaatgctgtagcgcaaacggcaattggacagcttgatgtaaaagtgactccgcttgcagtagcaaatatgatggcgacaattgcacgcggaggagaaaagaaacaggtaaaagctgtagatgcgctagagtataaaaacaacacgtcattgtatacgtttaaagagcatgagctaaaaggagataccattaataaagccacagctgcttctatgcagcagcttttaaaaggtgtcgtacagagcgaaaaaggaacaggaagaagatttcaaacgcttccttatgaagtggcaggaaagtcaggaactgctgaaatcaatgtgaaagacgatatcgtcaataaatggtttgcgggttactttcctgcagatgatccaaaatatgcaatggtagtagtggatttaaatacaaaaagtgcgatatctcccacaaacagcgtattttatgatattgttaaagggatgtatgacttaaatacacgttaaaacaagaagaatttgtaaaaaatattacaaatatacttcaaataaattttgatgcttcatgtataagaaaacacatgttagaataaagcattataaaagttggaggaaattgtagcaatgaataacaatcgttcttcaagacacgaaaacaaagaaaaaaaagtaaaccgattatataatctgttaattgctgtcgtagcagttttaattgtatttgtcggtggtacgatgattcttggaaacaaggataaatcggataaccaagcggaaacaactcaaaacaatccgcaaacaaatgaccaaaaaacggacaagacggctaaaaaagacgatgattcttcgaaagatgatcaagcaacggacgatcaaagttctgaagatgaccaaagctctgaagatgatcaagcaacagatgaagaatcaaacgactcagattcacaggctgaagtagagaaaaatccagagcctggcgtggcagaacgcaaggtagatccttcatgggattcagtaggtacgtcacaagatgcacctgcagcaacatataaaaaaggatcaacggattggaatgaaatgctaaaagctgtaggtgaagggtcaggcattagcccaagcaatatgaccgtatggcgtttagggaataatggtggcgtaggtaaagccgtagctacggttagtcctaaaggcaactcatcaacaaaataccgcgttcaaattgaatgggtagatggagaaggctggaagcccgcagtagtggataagcttcaataaaaaagcagcgcgctagcgctgcttttttaatttgaaatgaacaaccgcagagtacagtttcttaccttgttcatagtccacagacatttgatgagatacgctatgcacctcaagtaaaatcgctttattttgatcaattttttcagcaatttgtttctcaagcattttaacatcaggcgcttcaaaaaattctattttatcttcaatcatttcaaattcaaaattcattttacgacctccttacctcattactatagtatagcaaatagaaagttaaaagcttaaaatatttgtaaatgaagaacaaacgatagctaaaaacatactatatccataagaattattagttataaggaggcgtttttatgggtctagagtttttagatatctttgaaaagtgggcgaacgagtatgatgcatcggtaagcgggaaagatgaacagtatagagaagtgtttcgcaattataatgaaatcttagagtatgtagcagaccgttcaatagggcatgtgatagaatttggaacagggactggaaacttaacaaaaaaactgttagaaaaagaactgactgtagtaggaattgaaccttcagtaccaatgagacaattggcacaccagaaattaggggcagatgttttagtcacaccaggagacttcttacaatttgatacatcattgtttccagcagagagcttagttagtacgtatgcttttcatcatttaacagataaagaaaaagaagaagctgtgataaactatggaaagttacttcaaaccggtggtaaaatagtgtttgctgatacaatgtttgaaacagcggattcatttgctgataccattgttcaggcaaaacaaaaagggtatacgcaactagcagaagatctagagagggaatactatacaacgattcccgtcttaaagcaaatctttgaaagcaatggttttcacataacctttacacaatttaatcactttgtgtgggtattggaggcaacgaaacaatagtagaaagaggttttaaaatgaaagtagcaatcattggagcaatggaagaagaagtgacgattttacgcgataaaattgaaaatcgtcaagaaacagtaatcgcgggatgtgaatactcgacaggaacaatcaaaggtgtggaggttgtattattaaaatcaggtattggaaaagtaaatgctgcgttatctacggccatcttactagagaagttcaaacctgattacgttattaacacaggatcagcaggcggcttccatccagagttaaacgtaggggatgcggttatttcaacagaagttcgtcatcatgatgtagatgtaacggtattcaactatgaatacggtcaagtgccaaacttgcctgcagcttttaaagcagatgaaaaactagttcgtcttgctgaagaaagcgctcttgaagtaacggatatgaaaattgtaaaaggactaattgctacaggagattcgttcatgaacgatcctgtgcgcgtagagtttgttcgctctaagtttccagacctgtatgcagctgaaatggaagcggcggctgttgctcaagtatgctaccaatttggcgtaccgtttgttattcttcgtgctctttctgacatcgcgggcaaagaatcaaatgtttcttttgagcaatttttagaaaaagcagctgttaattcaacgaaattagtattgaattttattacaaaattaaaataagctgttcgtaaaatatagagtttgttttcgtctacactctgcatcgtttgtcataacatggggtgtagactatatttttattttaattcatactttatttataggttaagttatattatttgatagggaggtgttcaagattatgaaggtagccaaaaacattcatgaattgattggaaacacacctatgattgaaattacacaatttgatttacctagagaaatcaggatatttgctaaattggaatatgttaatccaggaggaagtgtaaaagatcgtttaggaaaagaactgctgcaagaagctcttagctctggaagactgaagcgaggcggaacggtggttgagcctactgctggaaatacggggattgggctggctttagctgctcttcagcacgaaataaacgtcatactatgtgttccagaaaaattcagtattgaaaaacagcagcttatgaaggctttgggggcaactgtggttcaaacacctactgaagctggtatgaaaggtgctataaacaaggctcaagagctgctgcgtgaaatacctggttcttactgtcctcagcagtttgctaatccggccaatcctatgacttattacaaaaccttagggccagaaatatatgaacagcttgatggaaaaatcgacgtgtttgtagctggagcaggtacaggtggaacatttatgggtacagcaaaatttttgaaagaaaaaaatccttctctaaaaacagtcattgttgagccagaaggttcgattttaaatggagggaaatccggccctcacttaactgaaggaattggaatggagttcatccctgattatatggagcggtcttattttaatgctattcatactgttgaagatgtttatgcttttcaaagagtgaaagagctggctttaaaagaagggttactagtagggagctcttcaggagcagccttcgaagcagccttgctcgaatcaaaaaatgcagaaaaaggagctcatattgtcaccattttccccgatagcagcgaacggtacttaagtaaaaatatttacagtggaggaagataagatgaaacgtaaaacacaattaattcatggtggaattgttggtgatgaacagacgggtgctgtctctgttcctatttatcaagtgagcacttataaacaagagggagctggaaaacatacgggatacgaatattcgagaaccggtaaccctacacgacatgccttagaagaacttatcaaagaaattgaaggaggatatgctgggtttgcgtttggatctggtatggcagctactactgctgtattcatgctgtttaacagcggagatcatgtgctaattacagatgacgtatacggaggaacgtaccgagtgattacaaaagtgctgagccgtattggcattgaagctacttttattgatacaagcgacatcgaaaatattaagaaagaaattcgtcccaacacaaaagctatttatatcgagactcccacgaatcctctcctaaaaattactgacttgcagcaggcttcttcagtagctaaacagcatcatttacttaccatcgttgataacacattcagtaccccgtattggcaaaaccctatagaaaaaggtgcggatatcgttctgcacagtgcaactaagtatctaggcggccacagtgacgttgtagcagggctagctgttgtgaattcgcctaaattggcagaagaccttcattttattcaaaatgcgactggaggcattttaggaccccaagattcttggcttttgatgagggggattaagacattaggaatacgaatggaagaacatgagttcaacactgggaaaatagtagaatttttacttgctcatcctgctgttacaaaagtatattatccgggattaaaaactcacccaaaccacctcattgctaaaaagcaagcaagaggttttgggggaatggtttcttttgatgtgggaagcgaagagaaggcggaacaagtactgagcaaagtgaagtattttacattagcagaaagtttaggagccattgaaagcctcatttcaattcctgccaaaatgactcacgcttctataccgagcgaccgacgtaaagagctaggaattacagatggattaattcgtatttctgtaggccttgaagatgtagaagatttaattgaagacttagaagaggcattgaaataagggtggtaaaaataggatttttatagacctatagatctatgataaagtagagttataacattctactgagaaggtgattgtatgaaagctcaacacatcaaagcaaaaattgaagattacagccgctttatttacgtccttctagccgtaagtacattcttgtacattggtgttatgattggccaaggtgaaaaaagtgatatgcagcttggaataatggaagccatcgttattctttttgccgcccttgccttttattttagttatcaaactaaaaaactgaaaaaagaactaatgaaagaaaaagaataatagatataaaaaggcgatcatacatcgtcttttttttatgagggttggaaaaataaaaaaattccctatttttcaaaaaaacagtttactttttatgagtccgtggatataattaccattgtaaggaaaatactttattaaaaggaggtcgagtcatatgttaagacgtttatcagttatgggtcatccagtttcaactatgttcaaaaatcgtctatatacgtatactattcggccgtgttcctgtatcaagtaactttcttactttgatcattaaaacacgttaattcaccacaggtgcgaatagtagccctgtggtttttattatttttcagccacaggatgcttatgcattactgtggcttttttgtgtataaggaggtgattgtaatgacactgaacattttctttttaactattaccataaagtctcgtcaatactcagaggcagaaattaagcatgaacagtatgtaagacaattagaagaagaaataaaagaccgcaagtatgagttttatcgtcatttctaatttgaacagtggaaaggagtggatgaatgatgattaatcaaaaaggatatatcgttgtatggctgcttgtggagaaagattccacctaaatgattagtagggggagtaatgatgtgtttgctacggattattatttggaaattattttaaaaaaagagcgggaagaaggattaattctccttctttccgctcttttttttctctttttcggctctgtaaaattcgtgaaacattttcatcagcgctcgcttttcaattcgcgaaacataacttcttgaaatatttaattcttttgcaatttctcgctgggttttttcatcctggagatccaaaccgaagcggccaacaattacttccttttctcgatcatcgaggatatcgatgtattcttttattttttctaattccatatttagttgaatcatatcaattacatcgtctgattctgattttaatacatcaatcaaactgatttcatttccttctttatcctggccaattggatcatgcagagacacatctttttttgtttttttgagcgctcgcaagtgcatcaatatttcattttcaatacatcgtgcggcataagtagctaattttgttccttttccttgcgaataactttcgattgctttaattaaaccgattgtcccaattgaaattaaatcttccgcatcctctcccgtgttttcaaactttttaacaatatgcgcaacgagccggagattgtgttcgataagaaggtttcgcgcttcttgatctccttgttccattaaagataaatatctcttttcttcagcagcagacaagggttgaggaaacgcattgttttttacgtaggaaacaaggaaaaccaattctttaaagaaatagcctagtgcggtaaataatgcagacatctcttcacctccataaggggatatcaacctgtgagagactaacattacactatatgtaaaaagaaggatgtctttgcctgtacgtttaaaattccccccggggacaagagagtttgaaaaagtccacagatttttctttatagatagttaccagcctatacagggaaaaagtatgtacatacgctagtagtagttcatagtgtaaggagggaaagtatgtacggttacggaggctgctgttatcctaattatccagcttacccatgtggaggaggcttcggctggggacttggattgttgattgttctgtttgtcctgttattaattttcggaagcttctgttggttttttagctgctggtgttaaaaaaaactcatgcatgtgcatgagtttttttaggtgacatatcctaccgaatagaaccattcattcttaagaattcttaagggattttcgctttgtttcttaaagaagatgatttattctataattaagaaaagaagcaagacgataatattcctctgcaaaagtaaatggagctctatactttttttagcttgaaagtactaatcatcaagcaagcgagtacgataattaaaaacatataaaagtgtgaaggcaaataagggacgcccaagtagctaagagttaataaacaacctgctgcggtaatagggagccctgtaaaatacccagtattttctgtgatgttaaagcgggcaagacgaagtgctccgcaagcaatgtaacagatggtaacaattgaacctgcagcaccaaagtgagacaaaatactttgataaagtagtagagctggagcgatgccaaatgatataatatcgcacatggagtccagttgttttccaagttcagattcaatttgcagctttctggctaccatgccgtcgaatcggtctgctaacgctgctaaaaaaattagtaataaacttaagttcaattcatttttcatgacaaataaaatagcaaagcttcctaaacttaaattaacaatcgttaaggagtttgccgcttgggatctcagctttttaattgtatgatctagatagtctaataaaaacaatttcctcactcctttaaaggatggaatgaactaaaggtaaaaataatggtaatttcattgtagacgcaaaccttattctagtaaagaactattcagtatgtggaggtaaaattattgttgcagcacctgtatcgaacgtttattgagcttacgaatcaccaaggatcatcgaagctcattcgaaaattcactttctctaaatggagtcggtttgttataccctcctatacaaaagtttttaaagtaaataaagaagaaatggacaagcctctgcatcactatcaaaccttacacgagctatttattcgccgtttgaatccttctgcccgtccggtcgatcagcagaaagacagcgttgtcagtcctgtagatgcaaagatagaagcatatggagtcattacgcctcaaaaagaaatgattgtaaaaaacaaaccttattctatacaggaaatggtttcaaatgatctcattcttgaaaaatatatagagggacagtttattattctctatcttagtccgaaagactatcatcgcattcacagtcctcttaaagcccaagtggggaatacgtggaccgttggacaaaagtcttatccagtaaattcattaggaatcaagtacgggaaagaacccctggtgaaaaatttccggaagctcacggagttaacatttgaaaatggtcacatgctgatggtaaaagtaggagccatgtttatcaacagcattgaagcggtttctaaaaaagaagtagtcgaaaaaggggaagaaatggcttacttcacgtttggttcgactgtcattttattatttgagaagaactcaatcacttttgattctaacgttcactcaggttcttatgtaaagtatggagaaccaattgctcatttgaaaaaatagagcctatataataaaagagtagatagataaatgaagatgcagctttcttttattatataggctcttttattcgttaagaaggaatttgtatgctaatctttaatgatcttctttcaatttcctcttcaattaattttataaaatcagggcttaattgcagttcggttgctttgctgtatgattcaataagcagctcatctgataattttctcataagattgccgccacctcctactaaaataaatatcctaaaaagttatatttaaatgctaataaattccttatttataatctaacatgaatcaaataaaggaacaatcgttctgttatccacagctttcggtggataaaatgtgggtatgttgtttataattaccattaattgctgaactataacagaggataatgtgtataaacttatccacataattgggcttatcattttttgtcgaaaacttttaacagaatttgtttaccacttaccctatttgataagtaataaacgttttctgcactattttttattttaagtttgcagagaatgaatatatcgtaagcccacgaacaaatggaggtttcctaccttttgtcaataactttctgtataaagttaaagcattcacaaggcatatcctttatactaagaaaagacctgtttttgaagagaataaaattttaggttggaaaataacaagaagtcgttataatgatagacggcgttaattttagtatgtaactatatattcgaggtgcatgatacgtgttgaaactttttttaccaaatgaacatgtgaaaaacgtgtttcaaattaagccagacgatttgaaagagcgcggaataaaaggaattattaccgacttagataacacgttggtggaatgggatcgccctgatgccactccggaattaattgagtggtttcagttaatgaaagatagtggaattaaaattacgattgtatcgaataatgtggagaaacgagtcaagctgttttcagatccagttggacttccatttgtatataaagcacgcaaaccgatgcgtaaagcatttagaagagctcttcgtgatatggagctgcaaaaagatgaggttgtagttattggtgaccagcttttaacggatgtattaggaggaaaccgtctcggcgtatatacggttttggttgtaccagttgcgcaaacagatggatttgtaacgaaatttaaccgtaaaatggaacgaagaattctaggttggatgaaacgaaaaggtatgattaactgggaggattaaaacgtgagtgaagaaaaattacagtgcgtaggatgcggagtggagattcaaacagaacgaccggatgaacttggctatgctccaaaatcagcactagaaaaagaagctattatttgccagcgatgctttcgcttgaagcattataatgaagtacaagatgtttccttaacagacgatgattttttaaaaatcttaaatggaattggtcaaacggacggtttagttgtaaaagttgtagatatctttgactttaacggcagctggttacctggtttgcatcgatttgttggaaataacaaggttcttttagtgggaaataaagcagatttactgccaaagtctataaagaaaaataaactaattcattggatgaagcgagaagcgaaagagcttgggctaaaatcagtggatgtgttcctcatgagcgcgcaaaaaggacaaggaattcgagaaattgccgaagccattgaacattatcgcgaaggtaaagatgtatatgttgtgggatgtacaaacgttggtaaatcaacatttattaatgccattattaaagaagtaacgggagaaaaagatattattactacttctcaatatccgggcacaacgttggatatgattgatatcccgcttgataacggcgcgtctttatatgatacgcctggtattattaatcaccatcaaatggctcactatgtagataaacgagacttaaagctgatttctcctaaaaaagagataaagccgaaggtttatcagctaaatgaagggcaaacgttatactttggaggactggcgcgcttagattatgtacagggaggccgcaagtcattaacatgttatgtatcgaacgatttgcatatccatcgtacgaagcttgaaaaagcagatgagttgtatgaaaagcaagcaggtgaactgcttcagccgccgcgcccagagcaaatggatgagtttcctgaactggttgcacatgaatttacaataaaaaatgaaaaaacggatattgttttttcagggcttggctgggtgacggttaatgagtcaggttcaaaagttgtggcgcatgcaccaaaaggagtcggcgtatttgtgcgcgattctttaatttaaacaaaaaggggaaaaaatcttgagtacattatatgggctagttggttatccgcttgggcattcactatcgccattgatgcaaaatgatgcctttaaacgtctgaatatggatgctcattatgaagcttttccaattgaacctgttcattttgagtcagccattggagagctaaaagataaaaacattcaaggatttaatgtcacgattccttataaagttgatattatgaagcatttggatgaagtcgatccattagcaaaggcaattggcgctgtaaatacagttgttaatcaagatggccgttatattggatacaataccgacggagaggggtatgtgacgtctttactcaaagcagtagaaggcagcttatcccaaaaaagaattttaattattggagctggaggagctgcaaaagctattttttatacaattgcagctcagcatgctcccgaggtaattgcgatatgcaatcgtaccgtcgaaaaagcagctgtattagctaacgagctgcctttttcgacgaaaacggcggcgatgtctatttctgatgcggaaaaacaattagatacattcgatattattattaataccacttcagtgggaatgtatcctaacgttgatgagctgccattagcacttactttattgcaaaaagaagccgtagtcagcgatattatttacaaccctttaaaaacaaagcttttaaaagaggctgaagcaaaaggggcaggtactcataacggtgtcggtatgtttgtactgcaaggcgcacttgcatttgaaaagtggacgaacgtccgtcctgacgaagaggcaatggaacacattgttctttcaacactaactaagagataagatacaacggaggtttttatgttaacaggtaaacaaaaacgttttttacgttcaaaagcacatcatttaaatccaattttccaagtaggaaaaggtggagtcaatgaaaatatgattgatcaaattgctgatgcattagaagcaagagaattattaaaagtaagcattctgcaaaactgtgacgaagatcgtgacacggttgctgctcgattaacaaaaggaacaaaagcagagcttgtacaagtgattggaaatacaattgtattatataaagaatcacgcgaaaataagcagttaatgcttccaaaagtgaaatgaaatagagcggggaaacccgctctatttaaaaatgaagtaaattaaaggagtcggggattgttgaagagtattggaattttaggtggaacattcaatccgcctcatttggggcatttaatgatggcaaatgaggttttgcatgccttgaaattagatgagatatggttcatgccgtcgtatattccacctcataaaacaatcaaagagcctattgagccgtatcatcgtttacaaatgctaaagctagctattgaagaacatgatcaatttaccctgcagccgattgaatttgagcgcaaagagccttcatatacatatgatacgatgagaatactaacagagaaatatccaacgtatcagtttcatttcatcattggtgctgatatggtagaatatttgccgaagtggtatgaaattgatgaattagtcaatttggttacatttgtaggtgtaaaacgcccggggtataccattacgtccccttacccgataaaagaagtagaagttccgcagtttgatgtctcctcttcctttattcgcgaacgagtagtaaagaaagaaaccattcgttattttatacctgctggtgttaaacaatatatcgaggagaatcaattatatgaatcgaactgaggcattagaaatcgtaaagaaacagttaacagaacgtcgttatattcatactgtcggggtaatggaaacagcaattgaattagctaagcgttttaaagcagacgaaaaaaaagcagaactggctgctatttttcatgactacgccaagtttcgtccaaaggaagagatgaagcaaattattattgatcaaaacatgaacccttctttattggaatacaataccgaattatggcatgctccagtaggcgcgtttttagtgagaaatgaagtagggattacggataaggaagtattggatgcaattacttaccatacatccggaagacctggcatggcgttacttgaaaaaattgtgtacgttgctgattacattgaacccggaaggagatttccaggtgttgatgaagtgcgggagttagctgaaaccgacttaaatgcagcacttattcaatcactgaaaaacaccatttcttttttaatgactaaacatcaggccgtttatcccgatacgatgatgacatataatgatttaatcttaggaggtcaaacacatgactgaacgtgaattgctatctcttgttgtagaagcagcagacgataaaaaagcaatcgatatcgtagcgttaaatatggaaggaatctcacttgtggcagattattttgttatttgtcacggtaactcagataaacaagtgcaggcaattgctcgtgaaattaaagaaaaagcacacgaacaaggcatttctgtgaagcgtttagaaggatttgagcaggctaagtgggttcttgttgatcttggagatgttgtggttcacattttccataaagatgagcgcggatattataacttagaacgcttatggggagatgcaccatttgtaagttcagaagagctacagctatgagcaggtacggagaatttgcctacgtatatgatcagctaatggcagacgttccgtatgacgattgggctgaattttttaatcagcaggtggcaaaagcaaaaacaaagcctgacagtatattagaccttgcctgcggcacgggagaactctccgttcgatttgcaaaagaaggtttctccgtagtaggcgttgatttgtctgatgatatgcttatggtagcccaggaaaaggcggcagaagcaggggtaacgctatctctttttcagcaaaacatggcggaacttgagttattgaaagagttcgactgtgtagtaatcttttgtgattctttgaactatttgcaaagtgataaagaagttcaagaaaccattcaacgtgtatataagcacttaaaacccggtgggctctttatatttgatgttcattcagtgcacaagatgaaggacgtatttggaaatcaatctttttcttacgtagatgaagacgtgtcatatatttggaactgcacctatgacgatacagacatgcgcgtagagcatgatattacgttttttgcttatgatgaagaaattgatgcatatcatcgctttgatgaggtgcatgctcagcgcgcttggtcgattgaccattatcaatcatggctgcgcgaagctggttttataaatatagaagtaagtgcagatttcaaaatgagtgagcctacttcaaacagtgagcgcatctttttctctgcgcaaaaaaaagaagccgagtagaggcttcttttttgtttcaaagcaggatttctacagaaattatggaataagactatcaaactgattgtgaacaagctcaatgtcttcgtcaaatttttcatgtgttttttgaaatacgtgcacaaacatctctccgagttcagcttctaaaactttaataccttctccggttacaccgccttttacgcacactttatcctgcaaggtaggaagcgtaaatatttctttttccaacagttttcccattccaataatcatatcactggccatgacggtagcttcttcttcagaaatatttgtttcttgaactgctgcgtcaataaagcgttgaagcaaaaagctgaagaatgcaggaccgcagcttacgatatcggatgatacgcgcgtaatcgtttgatcaatagccacaggctttgacatagatgaaaataattcatgtaaataattttggtaaaaaggcgtacatctttctccaaacgtgaaaagagaaacacctgctaatgcccgattcgtaatgctagggataattctagctgcttgactcggaatgaggcgttcgatttgttctacgctaattggactggtaatggatacaatgcagtgatctttcgtcagcagtggttctaattttattaaaagggggtgaatatccaatggcttaacacaaataaaaatgactttggatgcgtgaacaacttcttcagctgtatcagcaacatgaatttttttatgctgctgttgaatctcttttgctcttttttttgtgcgattcataatagtaattttagaaggacgtacggcttttgattcaataaacgcatcaattaatattttccccatgtttcctgttccgataaaccctatgttcactgattcattccctccttcaaaagccttttcttctaaacactatgaagacataatggaatttatgacgttacttcaaaattcaaaggagtgtacaatttgactttttcaaaaaaacaatggctaattgggtgcatttgtttagcagttggattggctttttatatttatctcacaggcggagagaaaccggaaagttctcttcaaacctcagatatgataaaggcagaatcttctgctgcaaaaaaagaaggagagtcgtctgatcaagtaatttcgagccaagattccccgtttgttatggtggatattaaaggagctgttcagaagcctggtgtataccagcttccgaaagatgcaagggtaaaagatgctctagcacaagccggaggtgctacgaaagaagcggacttaagacagctcaatttagctagcaagctacaagatgaaatggcagtttacattccagctgttggagaagaaatcccaccttcatcccctgtttcttcaatctcttcctcaggaacttcaaacgatcagccccttgttaatatcaatacagcgaacactgatgaactgcaaacgttaaatggcattggaccttcaaaagcgagtgccatcatttcatatcgagaggaaaatggcttgtttcaaacagtagaggatttggggcaagtatcaggtattggtgagaagtcgctagaaaaaatcaaagctcaaattacggtacagtagagacttattgacgaaaaaggaaaagaaacgctacactatgaaagagacaagtataattattcagttttaaataaaaaggtagggaatgagatgaaccggatttcatgggatcaatattttatggcacaaagccatttgctagctttaagaagcacttgtgaacgtctggctgttggggctacagtggtgcgtgataaacgtattatagctggaggatacaacggctcgatcagcggaggcgtgcattgtgctgacgaaggctgttatgtgattgatggacactgtgtaagaactgtccatgcagaagtgaatgcactcttgcagtgtgctaagtttggtgtgaaaacagaagatgccgaagtatacgtcacgcattttccgtgtttaaactgctgtaaagcccttattcaagcgggaattaaaacagtatattacgctaatgattacaaaaatcatccgtatgctgttgagttatttcaacaggcgggagtgaaaacagcaaaagttgaacttgatgaagcagtcattgacttaaaaagtaaagagaagcttcaatttgtgacggatgttctcgctcgtttagaaaaaagcggagcggacgaagcagaagtgatgaatttacaacgtgaagctctcgctttgtttacggcaaattaaaggtaaaagaggttttttacttggtaacagtaagaagcctctttcttttaagaagaaaggagctaaaagtgaaaggatattatatttattgtgcttttagcatgatgatagctttatatgtatatgataatcattccgctgtaagcctatttttgctaatcgtgcttttcatttttcaatggctacaatgtccgaggaaagtggttattgcttctgcactgttgagtgttttgtgcgtctacctattagctgagacaaataagcataacaaaacgattcttttagctgaatcttcttcttttacaggcgaaatttcatctgtgccgcatagtgacggcgacaagcttacttttaagtttacggttcaaaatgaagaagtcatggctttttataaactaaaaacgttggaagagaaacagcagctcgaaaagctaacgattcatcaagtttgtcaactagcggggcaattaacttctccttcacctgctcgcaaccttcattcatttgattatcagcaatatttgtaccatcagtctattcattggcagcttaacgtcaagagacttgatttggtaaaatgccagctccccactttaactccacttacgtaccttacctttattcgccaaaaaggaattaattatattcaacaaactatgtcggatccaggcgctgggtttatgcaggcactaatttacggcgagcgcactggcatcgaagaagagagtatcaagcgctatcagcaatttggtttaatacacttgcttgccatatcaggtcttcatgttgcactgctgacagcgatgtgtttttatttgctcattcggattggaatgacgcgcgagcgagccattacgcttttacttttgcttcttcctgtatacatggttttggccggtggcagcgcttcagtcgtccgagctgtttttatgagtatgctgatgcttatatcgataaaaatacaaagaaaaattcttttggttgacagcatcagccttgcttttatggtcatgctgctttttgagccgtactatttatttgatgtaggatttcagctttcttttgccgttagttttgcattgattttatcgattcagacgattttacctcgttttcattcttctgtcagccagctcatggttgtttcagcgattgcacaagtcagttcacttcctttattgttgtactatttttatggagtatctctcctcagtttgccattaaatatggtttttgtaccgctgttttctcttgttatattacctctttgtttgctcattctttttgttcgtatcctcttgccaggagtgagtgaactgctggagcaaattcttcatgttcttttacttttttgtgaaaaattgcttggcttttttgaatggattcccgctgattttataacgggaaaaccccacattgttctgtttttgagcatgtacttatgcatttatgctttatttgtggcggtcgaagaaggagaatttttcgttcgctatatgtttcttctcgtggtattgttagccgcacaatgtatgtatccttatttgaatccaaaaggaacggtcacaatggtcgatgtaggacaaggagactgctttatcattgagcttccttatcgaaaaggtgtgtatatgatcgataccggaggaaccgtttcatttccaaaagaaccatggcaaaaacgtcgttcttcttttgacgtgggagaagacgtacttgttccctttttgcattcaaaaggaataacaagggtagataaaatgattatcacacacggcgattatgatcacgcaggggcggctcagcatttatttttacaagtggctatcggagagctggtgcttggggaaaaagctgaattaaatgacatagagactggcttggtgatcgctgctcaaaaacaaagcgtgcctgttcaaattgttcaacaaggagatagctggcaagaaggaggtgtgttatttcagattatttctccgacaggtttcgaagaaacgagcaacaaccgctcaattgtaatagacgctaagttaggaaatttaagatggctatttaccggagatttagaaaaggaaggagaacaaagaatattgaaagactttccaaaccttaaagcagatgtattaaaagttgggcatcatggcagtaaaacctcaacttcagaagagtttgttcaacatttaaatcctaaagtagcgcttgtttcagcgggacaaaaaaatcgttatggtcatcctcatcaagaaatattagagcttctgaaaagctacggggtgtatatttatcgaacggatgaaaatggtggggtaatgtatgaatttacaaaaaagtcaggaacgttttcgcagcaacttccatagtctatagtaagaaaaacgaactaaaaaagactgctaagaagcagccttgaagcaattttacgaacccaagtagtgaatcacagttgcaataacaaataaggcagtgaaaaagccaaatgaaacaccaaatcctacggcagaatcgacagcgtcgttgcgtttactttggacactttcttcaaattggttcattaacacccctcctgtttacagtataatctaactttttttaaaaatctagacaatttaaaagcgttttcacaaactgacaacagttaacaactatactttatgagcatgaggagaaaatagagataagggtttaatcattaacaaataagtaacctagggcttatattgttaatgtttatcataaactgaggaattgtctttttaaggcaattccttttgtattgttgccaaaaactcataacacctttacgatagaaattgtattttgtttatcagtaactatacataatcaatatagatgaataaaaaagaggagcgtatatacgttggcagttgatagcttaaaaagtattaccaaaaataatatagcccccgtttacttaatacacggggtcaatgcatttatgagtaaaaagattagagataaaatcgtcgactatacgttaaatgaagaagataaagaatttaacttgtcactatacgatttagaagaaacatcgattgatcaagttctagaagatgctgaaacgcttccttttttaggagacaagcgtgtagtggttgcgaaaaatgcagcatttttaacggctgaaaaatcgaaagataaagtagagcatgatctagcaaaactgcagcaatatgtggagcagcccccatctttttcaacgttaattctactagccccttatgaaaagctggatgaaagaaaaaaaataacaaaattattaaaaaaacaagcagcttacatcgaagcgaacgaatttggtgaaaaagaaatgaagcagtggattcataatttactttcaaaagatggagtgaatatggatgaagatgctgtgacgctgcttattcagcttgtgggtcttaatgtaacgcttgtgacaaatgaaattgaaaaaatggtgttatacgttggacaaggcggagtcattacaaaagaagttgtgcttaagcttgtggcaaaaacgcttgaacaaaatgtatttacgcttattgacgctgttattcagcgaaaggtttctactgctttaaatatgtatcaggatttattgcgtaataacgaagagcctattaaaattttatctttgttagcgacgcagtttcgtttgatttatcatacgaagcagctgtctagtcaagggtacggtcagcagcaaattgctcaaacgattaaggttcatccttttcgtgtgaaaattgctttgcagcagagcagaagttttgaggaacagcagcttaaagaaattttaaaggatttagcagaggcagattatgaaatgaagacggggaaaatggataaagcgcttattttacagctgtttttattaaaaagagcgcaataaaaaaacgatcctaatgggatcgtttttgtctcaattatgcagataaaccgttaagttttactgctaagcgagatttttgacgagctgcagcatttttgtggataataccagattgtgcagctttgtctaattttttagaagcaacagcaaatgctgcttttgcgttatctacatcgttgttttcaactaaagcttcaaagtttttgattgcagtacgcatagctgatttagcttgaatgttatgagcacggcgagcttcagtagtttttacacgtttgatagctgatttaatgtttggcatccgtttcacctcccgaaatgataacaatcgagattatatagaactcgacattcttcacaataagaacaaaagatattttatcaaacacaaggacagaatgcaatagccttgacaaggaattttatatgacagagctctctttaaaagcttgtagctgatattgcgcccttccttccacttttcatttcttaaatgcatgaatctgccagtcctcggtgacaataatttcaacaaagattgtctaggaggttaagaaatggaaaaagaacttgatttaagtcaatatagcgtgcgcacggatttagctgtcgaagcaaaagacatagcgttagaaaatcagcctaaaccgaataaccagtcagaaatcaaaggcgtaattgtaaaagaaaaagaagaacaaggtgtcaaaatttcaatggtagaaattacggaagagggcgcagaagcaatcggtaagaaaaaaggccgatatgtaacccttgaatcggtaggtattcgcgagcaggatactgaaaagcaagaggccatggaagaagtgtttgctaaagagctgaatttttttattaaaagcctcaacattccagatgatgctagctgtcttgtagtgggtcttggaaacttaagtgttacaccagatgcgcttggaccaaaggcagtagataatttgttgattacaagacatttgtttgagttacagcctgaaagcgtgcaagatggctttagacccgttagcgccattgttccgggagtaatgggaatgacgggtattgagacaagtgatattatctttggcgttgtaaagaaagtgaatccagattttatcattgcaatcgacgcgctggccgctcgttcgattgaacgggtaaatgctaccattcaaatttcagattcaggtattcatccggggtctggggttggaaataagcgcaaagaaatcagttatgaaacacttggcattccagttattgcaataggtattccaacggtagtggatgctgtttccattacaagcgatacaattgactttatcttaaaacattttggccgagaaatgaaagagcagggaaagccgtctaagtcgctgcttccgtccggtatgacgtttggagaaaaaaagaagctcacggaggatgatttacccaatgaagagcagcgtcaaacgtatctcggtatgattggcacccttcccgatgaagaaaaaagacgtcttattcatgaagtgcttgcacctttaggccataatttgatggttacgccaaaagaagtggatatgtttattgaagatatggctaatgtagttgcaggaggacttaacgctgctttgcatcatgaagtggatcaagagaactttggggcatatactcattaatacgcttttaaatgaatgagttcttcagaatatagtcataatggttagtactacagaagataaagaagtaaggggcctaataatatgattaaatttactttaaaatcagtagtactaaccatttttttactgtgcgtcgtatttttagggatgcagacggctcagcaagggttgattaaaatgaagggatataatgatccttcgattgaacatgttattaatgtgtctaaaacgtcagatggtcaggtggaagctgctgttttaggttcaaaaaaagtcgtgaacattgatgaaaaacagcagtttctagaaaaacgaaaggcttttaactttttctcctcgctaggtcaaagtctagcggaaggggtgaaaagtacaataggaaaagcttttaaggctctccatcatcttcttaattaaaagcagaatctctttctgcttttttgtatggaaaaatccccaatggaatgcttattgaatgttgacgaatgtgttgttataatttaatttagtgtattttgccgattttcagtaggagtgaaaaaaatatggatagagaagcaagattgaaacgacaatcgaaaatcagaaacttttcgattattgctcatatagaccacggtaagtcaacattagcagaccgtattttagaaaaaacaaatgcgttaacacagcgagaaatgaaagctcagcttttagattcgatggatttagaacgtgaacgtggaattaccattaaattaaatgctgtgcagcttcaatacaaagcaaaagatggagaagagtatacttttcatctaattgatacaccgggacacgtcgattttacatatgaagtgtcgcgaagtttagccgcgtgtgaaggtgcaattctagtagtagatgcagctcaaggtattgaagctcaaacactagcaaacgtatatttagcgcttgataacaaccttgaaattttacctgtcattaataagattgacctgccgagtgcagagccagagcgagtgcgccaagaggttgaagatgtaattggattagatgcatcggaagctgtattagcttcagctaaagcaggaattggtatcgaagaaattttagaacaaattgttgaaaaagttcctgctcctgaaggggatccagatgcaccgcttcaagcactaatctttgattcattttatgatgcataccgaggtgtagttgcatccattcgtatcgtacagggacgagtaaaagtaggcgaaaaaattaaaatgatggcaacaggaaaagagtttgaggtaacggagctaggtgtgttaacgccaaaagccgttgctaaagatgaactttctgttggcgacgtagggtttttaacagcagctattaaaaacgttggagatacgcgagtaggggacacgattactcttgctaaaaacggagcaagtgaacctcttcctggttatcgtcgtctgaatccaatggtatactgcggactgtatccgattgataccgcgaagtataacgatcttcgtgaagcactagaaaagctagagctaaatgactctgcacttcagtttgaaccagagacgtctcaggccttaggatttggtttccgatgtggattcttagggttgcttcacatggaaattatccaagagcgtattgagcgcgaatttaaaattgatttaattacaacagctccaagcgttatttatgacgtgtatttaacagacgagactcatctgtctgtagataacccgtctaatatgccggacccacaaaagattgaacgcgtggaagaaccgtatgtgaaggcaacgatgatggtaccaaacgattatgttggtgctgtgatggagctttgtcagaagaagcgaggcaactttattgatatgcagtacttggatgctaatcgcgtgagtattgtatatgaaattccactagctgaaattgtatatgatttctttgatcaattaaaatcaaatacaaaaggctacgcatcgtttgattacgagcttattggatatcagccttcgaagcttgtgaagatggatattctcttaaacggcgaaacggtcgatgcactgtcctttatcgtgcatagagattcggcttacgatcgtggtaaagtcattgtagaaaagcttaaagagcttattccacgtcaacagtttgaagtgccgattcaagcggcaatcggtcaaaaaattgtggcgcgttcaacaattaaagccattcgtaaaaacgttttagcaaaatgttacggaggagatatctctcgtaaacgtaaacttcttgaaaaacaaaaagaaggtaaaaaacgtatgaagcaggtcggttctgttgaagtaccgcaggaagcattcatggctgtgcttcgcatggacgaagattaatagctgaaattctattatttaacatgtcaaattagttttgaaaatcaagctaatctgatacgataataaagagttttgtacgctgtaaataagtctgaacgaacatagataaaaataccgcagagagattctgcggtatttttatcatttataaatgtgattgaggtggaagtccatggtgaaggcagcatatctgcatatcccgttttgtcatcatatttgtcactattgtgactttaataaagtgtttttcaaaaatcagcccgttatgccgtatttggaaagcatgcgagaagaaatgaaacaaacagttgaacattatccaacgaccaatttaaacacgatattcgttggaggtggaacgcccacagccttagatgaacagcagctggagtattttttagaatccattcgtatgtatctcccttatgacgaaaaaggtgagtttacatttgaagcgaatccgaatgaattgacaaaagaaaagcttcagcttctccatgattatggtgtgaatcgtttaagcattggtgtacaaacgtttaatgaaagattattggagaaaattggacgtgtgcattcaaatagacaggtatttgattgtgttgagcaagcgagaaagattggaatgtcgaatataagcttagacttaatttatagcctgccggaacaaacggtagctgatttctcttctacgcttcaaaccgctttttcattagaggtagagcatatgtctgcgtattcgttgattattgaacctaaaacggtgttttataatttaatgaataaaggaaagctgccgctgcctgctcaagaagaagaagcagctatgtatgagctgcttatgaaagaaatggacaaacaaggttttcatcaatacgaaatcagtaatttcgcaaagccaggctacgagagtattcataatctaacctattggaataacgacgattattacggaattggcgcaggcgcacatagctatatagacggaataagacgagcaaatattggaccattaaaaaagtacattgattcagtcgagcaaaaaggaaatgcatatctcaatgaagtgagcgtgaccgaggctgaaaaaatggaagaagaaatgtttttgggccttcgtaaaacgaaaggagtctcaaaagaggagtttaagaaaaaattcaatcgagaattaaaagatgtatttggagaacctattcaagaatacaaagagaaaggacttttgggtgaagacaatagctcagtctttttaacacacaatggtcgatttttggggaatgaagtttttcaagcctttattgggataatctaatatcaaatcgttgacatcgctatagtgatttggtaatttattattagatttagcactcagagttttagagtgctaacagaggtgatgaagcgtgcttactgatcgacagttattaattctacaagtcattattgatgatttcattcgatctgcgcagccggtaggctctcgaacattatctaagaaagaagagtttaattttagttcggctacgattcgtaatgagatgtcagacctagaagaacttggatttattgaaaaaactcatacttcttcagggcgcgttccgtctgagaaaggttatcgttattatgttgatcatctagtgtccccgcagcacttgaaagcaagcgacatttcgacggtacgttcggtattcgctgaacgcattgtagaactggagcagctcgttcaaaagtcagcgcaaattttatctgatttaacgagtttaacgtctattgtgctaggaccaaaagcggtcagccataagttaaaacagctgcagattttacctttaacggctcagtcagctgttgccattattgtgaccgatacaggacacgttgaaagtcggacgattacgctgccgagcagtattcaaccttccgatattgaaaaaatggttaacattttaaacgaaaagctcatcggcgttcgcattactgatttacatgataaaatgtacaaagaagtagcgacgctcttaaaaagccatattcaagggtatgagcagacgatggatatactcaatgatgcattaaagctcaacatgaatggcaaattagtagttggcggcaaaacgaatatgtttgctcagccggaatttcatgatcttaataaaattcgcgggctgtttaacattattgaacatgaacagcagttttataagctgttaagcccaaatgaagctggcatacatgtgaaaattggtcatgaaaataaattgaatgaaatggtagggtgcagcttaattacagctagttattcctttggtcacgaacagctcggcacaattgctatactgggaccgacccgcatggaatatgcacgtgtaattagtttgcttacactgctgtcatcagatatgtctcaagtgttaacaaacttgtataaagaataaaggaatcgggtggaatatattacttccatcctttccctgtgataaaataaaaatcgttgtttaaaatgtgaaaatgtgtgtaaacatttaagggaggtgaatgaattgtcaaacgaaaagcaagtagaagaacaaaacgaagaagtggttgaagaagttcaaacagaggctgctgaagcaactgaagctgaagcgtctgaggaagtaaaccctcttcaacaagaaaatgatcaattaaagcaacagcttgaagaagaagagaatcgctacttacgtctacaagctgatttcgataatttccgtcgtcgttcacgtctcgacgcagaagctgctcaaaaataccgtgctcaatcattggttgcggatattttaccagcacttgataactttgaacgtgcattacaagttaacacagcggacgaacaaactaaatctgtgctgcaaggtgtagaaatggtataccgtcaattggtagaggcacttcaaaaagaaggtgttgaagcaattgagtcagttgggaaaacattcgatccatacgagcatcaggcagtgatgcaagtagaggacgatgaatacgaaccgaacacggtagtagaagagcttcaaaaaggttacaaattaaaagataaaatcatccgccctgcgatggttaaagtgaatcaataacactacatattatgaaggaggtcattgtcaatgagtaagatcattggtatcgatttaggtacaactaactcttgtgtcgctgtattagaaggcggcgaaccaaaagtaattccaaatccagaaggaaaccgtacaacgccatcagttgtggcattcaaaaacggtgagcgtcaagttggggaagtagcgaaacgtcaagctattacaaacccaaacacaattatttcagttaaacgtcatatgggtacagaccataaggttgaagctgaaggcaagcaatacacgcctcaagaaatgtcagctatcattcttcaacatttaaaaggttatgctgaagagtatttaggtgagcctgtaacaaaagctgttatcacggttcctgcttactttaatgatgctgagcgtcaagcaacaaaagatgctggtaaaattgctggtttagaagtagagcgtattattaacgagcctactgcagcagcacttgcatacggattagaaaaaacagatgaagatcaaacagttttagtttatgaccttggtggcggtacgtttgacgtatctattctagaacttggcgacggcgtatttgaagttcgcgcaactgcaggtgacaaccgccttggtggtgacgactttgaccaagtaatcatcgactatttagtcgctgaattcaaaaaagaaaacggcgttgatttaagcaaagataaaatggcgcttcaacgtttaaaagatgcggctgaaaaagcgaaaaaagatttatcgggcgtaacatctacacaaatttctttaccatttatcactgctggagaagctggtcctcttcacttagaggtatctttatcacgtgctaaatttgacgagttatcagcaggccttgtagagcgtacaatggctcctgtgcgtcaagctttaaaagatgcaggcctttctgcaagcgaacttgataaagtaatcttagttggtggttcaactcgtatcccagcggtacaagatgcaatcaaaaaagaaactggtcaagatcctcacaaaggtgtaaaccctgatgaagtagttgcacttggtgcagcaattcaaggtggcgtattaactggtgatgtaaaagacgttgtattactagacgtaacgcctttatcactaggtatcgaaacaatgggtggcgtatttacaaagctaattgagcgtaatacgacgattccaacaagtaaatcacaagtattctcaacggccgcagatagccaaacggctgtagatattcatgttcttcaaggtgagcgtccaatgtctgcagacaacaaaacgctaggtcgtttccagttaactgacattccacctgcaccacgcggagtacctcaaatcgaagtatcattcgatattgacaaaaacggtatcgtaaacgttcgtgcaaaagatttaggtacaaacaaagagcaagctattacaattaaatcttcaacaggtttatcagatgatgaaatcgaccgcatggtaaaagaagcggaagaaaacgcagatgctgataagcaacgtaaagaagaagtggaactacgcaatgaagcagatcaattagtgtttacaactgaaaaaacattaaaagatcttgaaggaaaagtagaagaagctgaagtaacaaaagctaacgaagcaaaagatgctttaaaagctgcgattgaaaagaatgaccttgaagaaatcaaagcgaaaaaagatgaacttcaagaaatcgttcaagcgttaactgtaaaattgtatgagcaagctcaacaagctcagcaagcaggtgaacaaggcgctcaaaatgatgatgttgtagatgcagagtttgaagaagtaaacgacgacaaaaaataatgcatcttgacgactaacgtgaatgacgccatggtgtcattcacatcttgttaaaaagtcaaagtcaagcttatttcttggctttgacttttttaacgtggaaaagcgaaagggaaagtttttcacttggctctctgcgtgcacgggagcaatagaaagtaacttttatgttgctatggaattattaataatgatacaattacgtttatgtgaaacgattcgggagtgagtattgatgagtaagcgagattactatgaagtactcggtatcagtaagagcgctacaaaagatgaaataaaaaaagcataccgcaagctttctaaacaatatcatccagatattaacaaagcggaagatgctgctgacaaatttaaagaagtaaaagaagcatatgaagtattgagtgatgaccaaaaaaaagcacaatacgatcaatttggtcatactgatccaaatcaaggctttggcggctttggtggaggcggctcagactttggcggcttcggctttgaagatattttcagctcgatctttggtggtggtggtcgcagacgtgaccctaatgctccgagacaaggtgccgatttacaatacacgatgacactttcttttgaagaagctgttttcggaaaagaaacaacaattgaaattccacgtgaagaaacgtgtgaaacatgtcacggttcaggtgcaaaacctggtacaaaagtcgatacatgttcgcactgtaatggttcaggtcagttaaacgttgaacaaaacacgccgtttggccgcgtggtaaatcgacgtgcgtgtcatcattgtaatggtacgggaaaaatcattaaagacaaatgtgcaacttgccatggtgacggtaaagtaacaaaacgacgtaaaattaatgttaaaattccagctggtgtagatgacggtcaacagctgcgcgttagtgctcaaggagaaccaggggtaaatggtggtcctccgggagatttatacgtagtgttccacgtgcgcactcatgaattctttgaacgtgatggagacgatatctactgcgaaatgcctttaacgtttgctcaggcagcgctaggtgatgaagtagaagtaccaactctacatggcaaggtgaagctgaagattcctgctggtacacaaacggggacgaaattccgtttaaaaggaaaaggtgtggcaaacgtacgagggtatggtcaaggagatcagcatattcacgttcgagttgtaactccaacaaaaatatcagaaaaacaaaaacaattattgcgtgagttcgctgaactgagcggtcaagaagccgttgatgagcagcatgattccttttttgcaaaagtaaaacgagcaattaaaggagaataattgtctttcatagtaaacagagacaggttggtaaaggtactttgccaacctgtcatctgtcatgttcatatttaaaatcctatattactgaaggcagaaaggatgaagttggtagcaatgaaatggtctgaaatttgtattcatacagcgcaagaagcaattgaacccatctctcatattttacatgaatcaggagctagcggggtagtcattgaagatcctgctgatttagtaaaggacagagatacaacttttggtgaaatctacgatttaaacgtagaagactatccagaagaaggtgtagtgattaaagcataccttccagttaacagctttttagcagaaactgtggatggtattaaaaaagaaattaatggactgcttgtttacgactttgatttaggagctaacaaagttacgatcagtgaagtgaacgaggaagagtgggccactgcttggaaaaaatattaccatcccgtgaaaatttcagagcgttttacgattgtaccaacttgggaaaactatgaaaaagtaagcacagatgaattgattatcgagcttgatcccggaatggcttttggtacaggtacgcatccaacgacggttatgtctcttcaagcattggaaagaacagtgaaagcaggagatactgttatcgacgtgggtacaggttcaggagtgctaagtattggcgcagctctgttaggagcaagtaatgtacaagctttagaccttgatgaagtagccgtacgttctgcccgcgaaaatattgaactgaatcaagttgggaacgtcgtaacagtaggtcaaaacaacttattgcaaggtatagaaggaccggttgacattgttgtggcgaatattctagctgaagtaatcgttcgttttgtagacgatgctgcaaaggtattaaagccaggaggcatgttcattacatcaggtattattagtgcgaaaaaagaggatgtcaaaaaagcgttaacgggagcgggctttgttattcaagaagtaacgcttatggaagactgggtagcaattattgcgcaaaaacaagcttaacaagtgagaaggtgtcaagatgcaacgttattttctgccaaatgatcaatttcaagagcaaagtgtcatagtgacacatgatgatgcccatcatatctcacgtgtcatgagaatgaatgaaggatcacagtttattgcctgtaatgaacaggggcaagctgctttgtgtgaaattgaaaatatttccgctaacgaagtgaaagcatctattatagaatggataagcgaagaaaaagagcttccagtccatgttacaattgtgaacggtctgcctaaaggggataagctcgagcttattatccaaaaagggacagaacttggggcgtataagtttatcccttttattgcggctcgttcagttgttaaatgggatgataaaaagagtcaaaaaaaattagatcgctggaacaagattgctaaagaggctgcagaacaatctcatcgtacgattgtaccagcagtagaagccccaatttcttttaaaaaactagtagaaattagcggtgactatactcataaagttgtagcctatgaagaaagagcgaagcaaggagaaacatctcatctgcatgctgttctttcagctttaaaacccggcaattccgtgcttgtggttgtaggccccgagggtggtttgaccgagcaggaagtagaagtattagaagaaaatgaatttacaataagcggatttggtccgcgaattttacgagcagaaacagctcctttatatgcgctgtctgctatatcttatcaaactgagttaatgaggtgacgattatgtcaacagttgcttttcacacgctagggtgtaaagtaaatcactatgaaacagaagcaatttggcaattgttcaaaggccaaggctatgagcgtgttgaatatgaacaaactgccgatgtatatgtaattaatacatgtacggtaacaaatacaggagataaaaaaagccgtcaagttattcgtagagctgtgcgaaaaaatccagatgcggttatttgtgtaactgggtgttatgctcaaacttcgcctgctgaaattatggccattcctggtgttgatatcgtagtaggtacacaagatcgcgttaagatgcttgattatattgaacaatttaaaaaagagcgtcaaccgattaacggcgtaggaaatattatgaaaacacgcgtatatgaagagctagatgtaccggcttttacagaccgtacacgtgcttcgttaaagattcaagaaggctgtaacaacttctgtacattctgtattattccatgggcgcgcggtttaatgcgatcacgtgatcctaaagaagtagtagcacaagcacagcagctagtggatgcgggatataaagaaattgtgttaacaggtattcacactggcggatacggagaagacatgaaagattacaatcttgcccagcttcttcgtgatttagaatctcaagtaaaagggctaaaacgtattcgtatttcgtcaatcgaggcaagccaaattacggacgaagtgattgaggtactagatcaatcagaaatggttgtacgtcatttgcatattcctcttcaatcaggttcaaatacggtattgaagcgcatgcgtcgtaagtatacaatggagttctttggtgagcgcttaaaccgtctgaaagaagctcttcctggattagcgattacatcagatgttattgttggcttcccaggtgagacagaagaagagtttatggagacgtataactttattaaagagcacggtttttcagagcttcacgtattcccgtattctaaacgtacaggtacgccagcagctcgtatgaccgaccaaattgatgaagaagtaaaaaatgaacgtgtgcatcgtttaatcgaactttcaaatcaattggcaaaagaatatgcttcaacgtttgaaggagaagtactagaagtaattccggaagaaaaatataaagaagatcctgaaagtggtttatatgtaggatatactgataactacttaaaggttgtgtttaaagcgtctgaagagatggttggaaagcttgtaaaagttaaaatttcaaaagctggatatccttataatgaaggtgagtttgttcgcgtgctagatgaggttcatcttcaagatcaggtgaaaatgagctcataacacttattggaaagctgcgtgtatacgcagcttttttcatacgtataaaaaagctgaacgagtaatgttttatcaagaaagttcataaaataaagggggaataactgcattactttatgtaaagcggttgaccttaaggaatcattatattataattgcaaaagacatgtctaacatgtcatttcattatgatgttagtggttttgttcggagggagggaattagaatgtcaagaacagttgttcgtaaaaacgaatcgcttgaagatgctcttcgtcgcttcaaacgttcagtttcaaaaactggtacgttacaagaagcaagaaagcgcgaattctatgaaaagcctagcgtaaagcgtaagaagaaatctgaagctgctagaaaacgcaagttctaataagagggtggatttatgagtcttctcgagcgtttaaatagtgatatgaaacaagcgatgaaaaacaaagagaaagagaagcttggggtcattcgtatggtcaaagcatctcttcaaaacgaagccattaagttaggaactgacctaactgaagcagacgagttgacggttatttctcgcgaattcaaacaacgtaaagactccctccatgaatttgagaaagcaggtcgtcaagatcttgttgataaaattcattctgaattagcggttttagaagtttacgctcctaaacagctaactgaagaagagttatctgaaattattaaaacgacgattgaagaaacgcagtcttcctctaaagctgatatggggaaagttatgggagcgcttatgccgaaagtaaaaggcaaagcggatggctctcttgttaataagcttgtccttcaacacttatcataaaaaacaccttaccttgtgtaaggtgttttttatatgaataataaacgaacgtatgttttgtttttctagtgtgaagaataaaatagataaattttaaaaaatttgaaactattgttaaagttattcgtatatacagatacatactcatactatctatggaaggagggaagtgtattcggtgaaaaccttattttctttcgtgtgctttcttatcttagccactgggttattccccactattagcaccgctgacgtgaagcgcgtacacgttattcctgtaaataaaacggtagaaaatggactgctttcttttctaaacagatccattgaagatgcggaaaatgacggtgcagatttgattatattggacatagatactcctggaggagctgtagatgcagcttctgaaatagctaaaagcttaacctcaacacctattcctaccgctgcttttgtcgataaaaaagcattatcagccggagcgtatattgcacttaacgctgatcaaatttatatgacacccggttctacaatgggatcggcagctgtgattgaccaacagggaaatgcagcaggaaaaaaagctcagtcctactggttatcggctatgaagagcgcagcagaacaaaataaccgaaaccctaaatatgcagaagcgatggcaaatacaaagatggtaatacctgagctcaacttaaaaggaaacgaattgctgacgctcactccgaagcaagccgagcaagttggttattcagaagggactgtaaaaaatttagacgatctcctaagcgtacttggctatgaagatgctaaactgacgtatgcaaaaatgagtgtaagtgaacaaattgctcgttttcttacccatccgcttgttgttcccattttattatccattggtgctttaggaattgtaattgaattgtttacgccttcatttggtattgcgggctctattggaatagcttcacttcttttatttttctatggtcatatggtagcaggattagctggaatggaagcgctcgttttatttatagcaggaattatattgcttctgttagagattgtagtaccgggcggagttttaggactactagggcttggggctatcattttaagtttttttatgtcaacagataataatgtcgaaatgggaatttctcttgtaattgcaatagtggtggcactgggaggtgcgtttgtgatgatgaaattttttaaaagaaagcttacacctttcaaaaaaatggtgcttaatgattcacttaataccgaatctggctatgtgtcgaatcaaaatcgttatgaattaataggaaaacaaggtaaaacaacaacaccgctacgtccttcaggtaccgtgctcatcgatgaagagtatgtggatgtagtcactgaaggcggatatttagacaaagatgtgttagtaaatattataaaagtagagggatcaagggttgtggtgcggaagcttacagagcctttgaaaaaggaggaccttaattaatggaagtaggtagcgtattattttttgtagttattggtctagcaattattgctttagctgtttttttcacttttgtaccgattatgctatggatttcagcattagcagcaggcgttcgtattagtattttcacactggtcggaatgagacttcgtcgagtgataccatctcgcgttgtgaacccgttaattaaagcaagtaaagcaggtttaggtattaccattaatcaattagaaagccactatttagcaggcggtaacgttgaccgcgtggtaaatgcgttgattgcagcgcaccgagcaaatattgagttaacatttgagcgcggagcagctatcgacttagcgggccgtgatgtgctagaagctgtacaaatgagcgttaatccaaaagttattgaaacaccttttattgcaggggtggctatggatggaatcgaagtcaaagcaaaagctcgaattactgttcgtgcaaacattgatcgactagtagggggagctggagaagaaacgattattgctcgtgttggcgaggggattgtttctacaatcggttcgcaaaaagatcacaaaaaagtattggaaaatcccgatatgatttctcaaacggtgttaggaaaagggctggattcaggaacagcgtttgaaatcttatccattgatattgctgacatcgatattggtaaaaatattggggcagttcttcaaacagaccaagcggaagcagataaaaatattgcacaagcaaaagccgaagaacgtcgtgctatggccgttgctcaagaacaagaaatgcgtgcaaaagtagaagaaatgcgtgcaaaagtagtagaagcagaagcagaagtaccgttagcgatggcagaagcactgcgctctggcaatattggcgtcatggattatatgaatattcaaaacttgactgctgatacggatatgcgtgattcaattggaaaaatgtctaaagaagacgatgagaaataatgaatcagcttaacaaggaggttttctcctaatgaatatcgttgaaacgcttattaaactaattattaataatgctttcatttttgtcatcattggagggattatttttaacgttgtgcagcgttttatggctcagtcaaaagaggaagaacagcagcgttctaaaagagctcctatgcctcctgtaaacaatccttcaaggcgggaaagacctagatatcgacctgtcaaagaagagccaaaaacagctcgtatggagccggaaactgttccttcagcagaaacaaatcctttgcaagaaaaattggaagagctaaaaaatcgttcgtatcatgaaccgtctattcaaaagaaaatcacagttgacaaaccaaaaattacgggtgagaaaaacgttttcaagcccatttctcgtaaagaagctgttcaaggagtgatatggtccgaaattctagggccgccaaaatcgaaacaacgtaaatataaacgataaatagatgtgatacattaaccccctttctcataaacatgagatgaaagggggttctttttatgagcaaaaagtggagacaccaaatgaaaagatggatgacaaaaacaatggaactacccgctgatgtactaatggatcttccccgtattacgttagttggacaaatacacatttatattgaaaatcataaaggtttattagccttttctgatactgaaatacgcgtgttactaaaacagggacaaatgttaattcgaggtgaaggactggtcattaaagtaatactgccagaagaactggttttagaaggtaaaatcaatcaagttctttatttagaacaataacacaaggaggaaaaaaatgaagaatggatggacaaactttgttattggtaccgtacgtattcgaattgttggaaaaggaattgaacgttttttaaataattgtgtgagacaacagattatgatttcgaatgtccataaagttgacggtcagctagcgacagcaacgatattattgaaagatgtaaagaaaattcgtatactaattcgcaacgcagattgtaaaatttattttataagaggcagaggttttccttttttaacaaaacgagtgatcaaaaatagtggatttgctttaggttttctttctttttttattattcttggtttgctttccaacatggtgtggaaagtggaaattagcggtgcagaaccacaaacagaacatcaaatgactaagcaacttgccaaaataggtgtaaaaagaggagagtttcaatttctgttagagagtcctgaaaaaattcagcgctatttaacggataatatgaacaatattacctgggtgggagtagaagtgcgcggcacttcttatcacttccaagtggttgaaaaaaatgagcccaagcctcagcaaaaaacaccttaccaacatttaattgctaaaaagaaagccattattacgaatttgtttgtcgaaaaaggacaacctttagtcaaggttaatgattttgtcaatgaaggcgaggtcctagtttccggtattattggaaacgaaaaaaataaaaaagtagtagctgctaaagggaaagtctacggtgaaacatggtataagtctgaggtggaagtgcctttaaaaactgattttcaggtattaacgggtaatggatatacgaagcactatttagattttcaagcttttaaaatgcctctttgggcttttaacaaagaaaaatacggctcaaaggtgacagaaaaagtggagcatccactctattttttaaaatggaaattacctctgtcgtatgagaaagttactgtacgagaagaacagaactcgcagcgcgtctattctaaacaagaggcggtggaaaaagctttggaaatcggtcgaaaaaaattactatcaactttaggtgaggatgctaaaataaaaggtgaaaaagttttgcaccaagaacaggacaatggtaaagttagattatcaatacattaccaagttatagaaaatattgcgaacactcaaccaattattcaaggagattgatgaatgtcagaacagctagtaacaattaacgtacaacttgatgattcaaacgaagccatttcattatttggcgtacaagatgcgaatttaaagcgaattgaagaagaaatgcaggtctctatcatttcaagaggtgagactgttgtagtctccggaagtacagaaaatgttcagctagtggaagaaatgcttaaaaagttactgaacattatccgaaaaaatatttccatatctgaacgagatgttgtgtatgcgattcaattagctaagaaaaattctctcgagttttttgaagatgtatatgaagaagagattggtaaaaatgtaaaaggtaagactattcgtgttaagacattaggacaaagtcaatacatttctgctattaagaaaaatgatttggtatttggaattgggcctgctggtaccggtaaaacgtatttagccgttgtcatggctgttaatgctcttaaaaatggtcacgtacagcgtattattttaacacgtcctgctgttgaagcaggtgaaagtcttggcttcttgccaggagatttgaaagaaaaagtagatccgtacttgcggcctctgtacgatgcattacatgatgtattaggaacagaacatacgcaacgcctaatcgaacgcggagttattgaaatagcacccctggcttatatgcgaggtcgtacactagatgatgcgtttgttatcttagacgaagcgcaaaacaccacgatggcgcaaatgaagatgtttttaacacgactaggatttgggtctaaaatggtgattacaggagatatttcacaaattgatttaccaaaaggagctcagtctggtctagcggctgtctcgaaaatcctgaccaatgttaaaggtatttcgtttgttcatctagaacagtcagatgttgtgcgccatccacttgtgggacgcatcattcaagcgtacgaacaagctgaccaaaagaccctttcttaatagggtctattttttgtaaaagggggtacgtttgtgtcaacgtttcggataatcaagcaaacaatggcacagatcgagcgattacggttaattcaaattgggttatatgccttgttaggtgtaatgatgtttgcgtctatgtatagcaatgtaaagccgcaggaattagatctcagattactatctatttctccgcaaaccatttactcacccgttaccattgaagataaagagagcacagagaaaaaacgggcagaggcagaacaagccgttgaagatgtgtatacacaaaaaacagaatacgcacagaaccaagtcgatcttgttgcatctatttttgatgcgatgatggaagttaatacagaatatgaaaaagaagatcatgaagataacagtatcgatgccgtattaaaaaccaaacaaaaaatgctagaggacaagcttcctaaagacattcaaaaaaacttgccaaaggatactattaagcagctgcttcagtcttctaacagtgatttatcgattgcgaaagatgctgtagtcacggccgttcatcatgtgatgaaagatcaagtgaagattagcgatgtagaagagaaaaaagaccaagtagaaagtcagcttgtttacaccaatgtcagcaattccctaaaggattcaatgaatgcaattgctaaattcgctatcattccaaatgtgatttatgatccacaaaaaacagctgaaaaccgtcaagcagctgtggaaaaagtggagcctgtccgaatcaaacaaggccagattattgtagaagaaaatcagcttattaatcctgatatatatcgtcagcttcagctcgcgggattgttgaataataaaggatctattcagccttttgcgggattagctttgctgattgtaatgatgatagcgggcctcctttactatttgcgtgaatttcaccccaagacatatcagcccttgctgttgtatgtattggtagcaaccattacgattggcctcatgaaaatcttaagcttgtttcaacaaattgatttatcggaaattggtttcttagctcctgttgcggtgggaggtttgctgattcgaattttaatggatgaacgcattgctattttatcaagcgttgtatttgctatttgtggaagcattatttttaatggtgaattgacaacctcgtttaatatgaacattgggatctactttttaattagcaatattgctgctattttatttttaagtaggcagcacagacgttcacggattttgcaggcaggtctatttgtggctatggtaaacgtaattatcagctttgctattatttttattaaaaatggccaaatcggcactgtagagcttggctattacagcatgatgtcaattgcatctggtgttatcgcttccgttttaactataggtttgcttccgttttttgaaagtggatttggcattttatctacgatgaagctgattgaattatcgagtcctaatcatccgctattacgcaaaatcttaaccgaaacacctggaacataccatcacagcgtaatggtggcaaacttatctgaagcggcgtgcgaaacgataggagctaacggtttattagcgagagtcggggcttattaccacgatattggtaaaacgaagcgaccgcagtattttattgaaaatcaaatgaatattactaatccgcatgataaactaagtcctaagactagtaaaaatattataatcgcacatgctacagatggagctaccattttgcgaaatcacaagtttccaaaagagattgtagatattgcagagcagcatcacggaacgactctgcttaagtttttctatcataaggcacttgaacaaacagaagaaaaaattgatgaaaaagaatatcgctatcctggaccaaagcctcagtcgaaagaagcagcggttatttgcatagctgatagtgtagaagcagccgtaaggtcaatgtccaatccgactcctgaaaaaattgagaacttggtgcgaaatattattaaagatcgcttgcaggatgagcagcttagcgagtgtaacgtaacgctcaaagagctagagttaattcgccaagcactatgtgaaactttaaatgggatttttcattcccgaatcgaatatccagagataaaaaaagagaaggtgaaggtatgagtttagttattgattttattgatgaaacaaacgaagtaagtgaagaacagcaaaaagagcttgaaaagctgcttgaagccgctgctatatatgaaaatctgcaagaggatgcagaagtgtccgttacatttgtggataatgatcgaattcaagaaatcaatcatcaataccgtcataaaaatcagccaacagatgtaatatcgtttgcgctagaagaaatgggcgaagatgaaatgcaaattatcggagatgagatgccaagagtcctaggggacattgtcatttcgattccaaaagctcatgagcaagcagaagaatacaatcactcgtttatgagggagctaggattcttaacggttcacggtttcttgcacttgcttggatatgaccatgaaacatcagaagatgaaaaagagatgtttacacgtcaaaaagatattttagaacaatatggactctcgcgataaaaaggggatagctaaagttgtcagtagctttggttatgcaatagaagggtttatctatgtttgtaaaacacagagaaatatgcaaattcacgtagcagcttctttcattgtccttttcttaggcaccgtgctgtcaattacagctggtgaatggacggttgtgctgcttctgattgcaggcatgttcagcttggagttaatgaatacagcagttgaaaaagttgtcgatttagtttctcctgaatatcacatactagcaaaacacgcaaaagatgcagccgcagccgcggtgttggtctatgcgtgttttgctgtccttataggaggaattattttcttaaagtatttgttttaaaaaggattctttttggttctttacacccccgtggtataataaaaaaggacaagttaaaagacatgtagaagcgcaaaaggagagcggataaatggataagaccggactgattgatgaggcaaaaaaagctcgtgaaatggcttatgtaccgtattcaaaatttaaagttggtgcagctttattgacgaaagatggaaaggtttatcgcggctgcaatattgaaaatgcagcttatagcatgtgcaattgtgctgagcgtacggctttatttaaagcctattcagaaggagataaagagtatgcagcacttgttgtagtagctgatactgatcgccctgtttctccgtgtggagcatgcagacaagtaatctctgagctttgtccaaaagaaatgaaagttatattaaccaatttaaaaaatgacatacaagaattaactgtggaagaattacttccaggagcattttcatcggaggatttacatgagtaataatgaatttaagtcaggttttgtttcaattattggaagaccaaacgtagggaaatcaacttttttgaaccgagtaattggtcaaaagattgcgattatgagtgacaaaccgcaaacaactagaaataaaattcagggtgtgtacacggaagatcaggcgcagattgtgtttattgatacaccaggaattcataaacctaagcataaattaggcgactttatgatgaaggtagcgcaaaatacgcttaaagaagtagatttaattttatttatgattaacgcaacagaaggcttaggtcgaggcgatgaatttattatcgagcgtttaaaggatacaaaaacgcctgttttccttgtgattaataaaattgatgaaattcatccagacgaattgttttcaattatcacgaattataaagacttatatccttttgctgaaattgtgccaatttcggctttacaaggaaataacgtggagcgtttgcttgatcaaattaagcagcgattgccggaaggtccgcaatattatccggcagatcaagtaacagatcacccagagcgctttattattacagaattaattcgtgaaaaagtactgcatgcaacgagggaagaaatacctcattctattgccgttgtgatggattctatgcaaagacgagataatggtgctgtttacgtgggcgctacaattatcgtcgaaagagattcacaaaaaggcatcgtaattggaaagcaaggaaagatgttaaaagaggtaggaagaaaagcaagagcagacattgaagcccttttaggttcaaaagtatttttagaactatgggtaaaagtgcaaaaagattggcgaaaccgagcgtcgcatctccgtgactttggatttagagaagacgaatattaatcatttgagttcttgtttgcgtcgatttatatcccttcataaaagaaggtaatttgtaaaaaattgtgttacatgattttacgtcggaaggctattctaaacataaggaattgaaatatgtatctgatctttatggttagaaaggtgggagttctatgttgaattttacttggaacattttttcacaaacaggtagcattgatacttatctcatttttaaggaacttgaaaatgaagtgaaagaaagacccgaaacatatgaggacaacagcgaaagtctcaattctcccttgtcttagccttctgtaagatggcggtgatgatgattgtttaaaaagtgtgaaggaattgtcattcgaacgaatgattacggtgaatcaaataaaattgtcaccatttattcacgtgaactcggaaaagtgggtctcatggcaagaggggcaaaaaagcccagtagtcgcttagcttccgtcacacaattatttacgtatggatacttttttatacaagcaggttcaggaatgggtactctccatcaaggagaagttatctcatctatgagaagcatacgcgaagatatcttcacaacagcgtatgcttcttatattcttgaattaacagataaagctactgagaacaataaaccaaatccatttctatttgaactgctgcaccaaaccattcattatatgaacgaagagtatgatgcagagatcttaacatttatttatgaaatgaaaatgttaaacgttctaggtcttcatcctacattaaatgaatgtgcagtctgccatcgaggtgaaggaacatttcatttttccattcgagaaggcgggtttatttgtcatcgatgcttagaaaaagatccttatcatttgaaaattagttcgatgacggttaaactattaaggctattttattacattgatttaaagcgattaggttctatttctgttaagcccgaaacaaaaaaacaattaaagtttgtaattgatcaatattacgaagaatattcaggattgtttttaaaaacaaagcggtttttgaatcagatggagtctttaaaacaatcgctctctgatgagaaatagaaaagataatcagtgatatgcaaagaattgctgtcgctagggtgcctcgcagtgtgtaggggacaccctttttactgtggagcgaaggggtagcttcgcttgttgtaagcgtaatgcctgctttttttgagaagccgtggtaaaataaacggcattctaaaaagataaaatgctaaaattaataagttatagcttttacttttgcttaaaaagtatataatgttttataaatagtatgtcacatttaatgattaggtggtgagtacaatcgaactgaacaaacgacaagaacaaattttgcaaattgtcaaagacgaaggccctattacaggcgagcatattgcagatcagcttagccttacgcgggcaacgctaagaccggacttggctattttaacaatggctggttatttagaagcgcgaccgcgcgtaggttacttttacacaggtaaaacaggagcacagcttcttacagataaaataaaaaaaatacaggtgcaagaatatcagtctatcccggtggtcgtgaacgaaaatgtgtcggtatatgatgctatttgtacaatgtttctagaagacgtggggaccctttttgtagtggatgagaaatcccagctagtgggagtactgtcgcgtaaagatttattgcgcgcgagtatcggaaagcaagagctcacatctattcctgttcatattatcatgacgagaatgcccaacattacatattgctatcgcgaagatttgttaattgatattgctaagatcttaattgaaaaacagattgatgctatgcccgttattaaagagggagacggcaattttgaagtggtgggacgcattaccaaaacaaatattacaaaattactagtagcattagcaaatgatgaagtattataagtgaaaaaggattaaaaaggggatgcacaaaatatgaacaacccatgtctttatgtcatttcggattctgtaggtgagacagctgaactagttgtaaaggctgcatcaagtcagttcaatatgacggactttgtaattaaaagagtaccttacgtagaggacatcgcaacactttcagaagtggtttcagtagcgaagttgaacaacgctattattggctttacgctagtaaagcccgaaatgagagaatttttaattcaagaagcgtccaagaacggggtagaggtatttgatattattggaccattaattgataaaattcaatcttcttatcaactttctcctcgctatgagcctggaatggctagaaaattagacgaagattattttaagaaagtagaagcgattgaatttgcagtgaaatatgatgatgggcgtgatccgagaggcattcttagagcggatatcgtattaatcggtgtatcaagaacatctaaaacacctctttctcaatttttagcacacaagcgtttgaaagtagccaatgttccaattgtacctgaggtagatccaccagaagagctgtttcacgtatcacctgagaagtgtataggacttactattagtcctgaaaaattaaatgatattcgtaaagagcgtttaaagtctcttgggctaaacgataaagcaatttatgctaatattggccgtattaaagaagaacttgaatttttccaagggattgtagataagattggctgtgaagtggttgacgtatccaacagagccgtagaagaaacagctggtatcattcttaataccatcaaaaagaaataaacgatggatctcctctgtgcgtgacagaaaggagattgctttcttatgtttgtatgctgtaagcctaagaaaatataccaaagatgaatatgacagaacttttaaaaacaagtgactttggtatagaaaatataggttgtttatattataataaaaaattgtgataaaaaagaatagttttaggtttagactttgttaagaacgaataaactatttatataaaagtcaagtcaaaatcgaaaaaagtattcgacaaatgccatctacaggaaataacaaattgttagaaggaatctctggagggatgtagaatacagagttatagcaaaagaaaaagtaaagtttttgtcgatgctgatgcatgccctgttaaagcagaaatcgttgaacttacacatacatatgacatcgatcttgtgtttgttgcttcctatgctcacatgcaaacaaatcctacaccaggaaaatgggtctatgtggatgcagaaaaggaagccgcagatttatatattttaaatcacgcagtcaagcaggatattgtcgtaactcaagatactggcttagcaagcatgttagtaagtcgaggggtttacgcactgtctcctcgtggaaagtactataatgacgacgaaatgaatacggtgcttttctttcgttatgtttctgcaaaagaacgacggtcaggccgtcatactaaaggcccaaaggcatttagtgaagaagatcgccagcatttcattcaagcttttgaaaaaatgttgtcgaaacttgcaggaatttagcacttagtgaagaatattatatgaaatacggagctgttactatggcaaatcgaattcctgatgaagtaatcgaccgtattcggcattcagtagatattgtcgacgtcataagcgattatgtacaactaaaaaaacaagggcgcaattattttggactctgtccgtttcatggggaaagcacaccgtctttttcagtatcgcctgataaacaaatttatcattgctttggatgcggtgcaggagggaattcattttcattcataatggaattagaaggactgtccttcacggaagcagctcagcagcttgctgaaaaaggagatattcctttcgaacatgagatacatcctcatgaagaagataatcaaaagcctagcaataaaatgattgaagcacacgagcttttaaagaaattttaccatcatttattggtaaatacaaaagaaggccaagatgcttatgattatttaataaatcgagggttttcacgagaaattatcgatgaatttgagataggttttgctttagattcgtgggaatttgtaagtaagttcttaacaaaacgtgggtttaatccgcaagagatggaacatgcaggtttaatcattaaacgcaaccaagatgaaacgtactttgatcgttttcgtgatcgaattatgtttcctattgctgacttgcaaggcaaaacaattgcattttcagggcgcctgctaaaagagataaaagggcagcctaaatatttaaacagtcccgaaacttctatttttaacaaaagtcgcacactctacaactttcaccgcgctaaaaaacatatacgcaaaaatcagcaggttattttatttgaaggatttgcagatgttatttcggctgttaaagcggggtgcccgaacgcaattgcaacaatgggaactgccttaacagaagaacaagccaagattattcgccgaaatgtagagtccgttatcatttgctatgatgcagattctgccggaattgaagcagcgcacaaagcaactgctatcttaacaaacgtgggttgtaccgttaagattgctgtgatgccggatggttatgacccggatgattatattaaagaatacggggcagagaagtttcaaaatgatgttattaatagtagcttgacctttatggcatttcaaatgaggtacctccgccgaaaacgaaatctacaaaatgaatctgaacgtatgcaatacattgaagacgttttgaaagaaataagcctccttacgaaagctgtagagcgagatcattatttacgccaattggcacaagagttttccatttcattagatgcgcttaaagaacagcagtatcaagtgtatcgaactgaaaaaaagaaaaaggataatgattctccaaatcgaaataatataaatagacaaccagtcgtaaagagaagcttattaccggcttatcaaaatgcagaacgttttttgatcgctcatatgttgaaagataaagatgtagcatttagaattcaagaccgacttcaaggtcagttcaatgttgaggaacatcgtgcgcttgttctatatttgtatgcttattacgaggaaggacacgagcctaatccgagcggatttatcgaacggttgcctgagtcttcgttgtctagtctagcttcagaattggcgatgctgtcaatcaatgatgaattgtcggagcaagctttgaatgattatatccaaacgatattgatttacccacaaagggtagcgatagaaaaaaaagaagcagaaaagcaagaagcagagcgtcaaaaagattatttaaaagctgcgacaatagcaatggaaattttacagttaaaaaaaactttaaaataaacgatattgcgtattagtcccacttttagaaggttttccttaaaattttggaaggaggggatctgatggctgaaaaatcagctcaatcaaaacaacttgattcagatttaacaattgaacaagtaaaagatcaattgaccgaaatcggaaaaaaacgtggtgtgctcacatacgaagaaattgcagagcgtatggcgaacttcgaaattgaatccgatcaaatggatgaatattatgaataccttggagaacaaggtgttgaagtaatgagtgaatctgaagcaaatgatgacgatgccgatcccgatattcaagaactgtcaaaagaagaagagtttgatttaaatgatttaagtgtacctcctggtgtaaaaattaacgatccagttcgtatgtacttaaaagaaatcggacgcgttgacttattgtcagcagaggaagaaatcaatttagcaaaacgtattgaagaaggcgatgaagaagcgaaacgtcgtcttgctgaagcaaacttacgtcttgttgtaagtatcgctaaacgctatgtcgggcgcggtatgctgtttcttgatttaattcaagaaggaaacatgggtcttattaaagcggtagaaaaatttgattatcgcaaaggttataaattcagtacgtatgcgacatggtggattcgtcaagctattactcgtgcaattgctgaccaagcaagaacgattcgtattcccgttcatatggttgaaacgattaacaagctaattcgtgttcaacgtcagcttctacaagatttaggtcgcgaaccatctcctgaagaaattgcagaagatatggacttaacaccagaaaaagttcgtgaaatcttaaaaattgctcaagagccggtttcccttgaaacaccaattggtgaggaagatgattctcatttaggtgacttcattgaagaccaggatgcaacatcaccttctgaacatgctgcatatgaattattaaaagagcagttagaagacgtccttgatacgttaacagatcgcgaagaaaatgttcttagactccgctttggtctggatgatggacgtacgcgtacgcttgaagaagtaggaaaagtatttggcgtaacgcgtgagcgtattcgtcaaattgaagctaaagcgcttcgtaagcttcgtcaccctagccgaagcaaacgcttaaaagatttcttagaatagataaaagcgtaaataacgcttatgagatagcttctttcctaaaggaaaggggctatctattttttatggaataaatttcataaaaacgcattttgaagaagtatattgatttttttaccaacttttcttctttcatatattttactgaattgtccttcgttttgcaaatgctcctttatattcttttgttacaagagcgtaagctgttcaaattccttttagacatccgaaaaatggaatcgctatcattttattcatgctttgattagtactcttatattataacacgaaaaaattaaaacgttttaaaagttgagaaaatttacaaaaatgaattataattaaataatgtaagcgtatacatttttttagggggaataaaaatgaattttgaattaaccaatgaacaaaagatgattcaacgaacgctcagagagttttcagaggcggaagtagcaccgaatgcactagagcgcgatcgaagtaagcaatttccgcttgacgtctttaaaaagttaggtgagcttggtgtaatgggtcttccttttcctgaagagtatggaggcggaggagcagatacggttagttttgctattgtcgtagaggaattaagtaaagcttgtggctctacaggaattacatactcagctcatgtttcgctcgggggggcacctatttatttattcggaacaaaggagcaaaaagaacagtacctacctgctttatgctctggggaatcttttggagcgtttggtttaaccgaaccgaacgcaggaagtgacgcggggggaacggagaccgaagcagtgttaaaggatggaacatttaggattaatggaagtaaatgctatattacgaatgccagctatgcaaagtttttagctttaacggctgttacaaatcgtacagaaggtaaaaaagaaatttcagctattatcgtgcctacagaagctcgaggttttactgtaatagacaattacgagaaaatgggtctacatgcttcaaatacaactgaactcgttttagaggatgttgaagtgcctgaagagaatttactcggtgtaagaggagaaggctttaaacaatttctaatgacgcttgacgggggaagaattggaattggagcaatggccgttggaattgctcaagcggcttatgaaaaagcactgtcatatgcgcaggaaagaaagcaatttgggaaagctatttcatcgtttcaagcgattcagtttaaattagctgatatggccatgaaaattgagttagcaagaaatatggtgtataaagcagcgtggttaaaagaccaaggaaagccatttacgaaagaagctgctatgtgtaaactgtatgcttctgaaatttgtatggaagtagccagtcaagctgttcagattcatggaggatacggctacatgaaggagtatcacgtggagcggtatttacgagatgccaagcttttagaaattggagaaggaacttcagaaattcagcgctcggttattgcaaggcaaattggctgttaagataagtaataagaaattagttaattatgtaaataaaaccctttcacttatgagcattttcaagtaaaataaaagtgcttatactattttgttatttctagggatgggaatacataaagggggtatagtgagtgaagcgaaatccgctaataccatttttattaattgcggtaattgggattgctttaatgttaacgctttcgttcaacggattaaacaatgcaaaagaaatcgcggctgaaaaagaaggcggtggcgcggaacagcaggcttcagctaaaccagaagaaatttatcaaaaaacttgtattggttgtcacggtgatcagtatcaaggtggagtaggtccttcgttaaaaggaattgggaaaaaagtttctcaagacgaaattgcagatattgttgtaaacggtaaaggaaacatgccgcctgggctggttcctccggaaaaagcgaaggaaatggctaaatgggtatcagaaattaaatagagttcagaaacatgattttctggaaagccgctcatttataaagcaggctttttttttatggtttttttataagcattcggctaaaaggaaaacatgaagagaaataggaatcatgcagctatctatgttaaaataatgaacagtaatcacatagagaataggtgacaaaatgaatgaattaaacttatcaataagacttgaagaagtagtaaagtcgattcctttgggagcaaagatagcagacattggctcagatcatgcatacttgccgtgttttgcttatttaaatggatatattagcggtgccgtagcaggagaaattacagaaggtcctcttcaatctgctattcagcaggtgaaaaaaacaagcttaacggacgttattgacgtgagaaaaggaaacggcctagaagtaatatcaccgaatgaagtagactgtattacaatctgcggaatgggcggaacgcttattacgatgattttagaagaaggaaaggcgaaactagaaggagtaaaaagacttgtacttcagccgaatattggttcacatcatattcgcagctggctgattgaacacaactgggaaatcattgatgaaaaaatcatcgaagaagacggtcgtatgtatgaagtcatcgtcgctgaacctggaaacgccttagctccttataacggtgaagtggaagccggtatgttaatgggccctattttaaaagaaaagcgctcttctgcttttacgacaaagtggacgcatgaactaaatcatcttaaacaaattgtcagccaaatggagcaggctcagtccgaggaaagcaaagcaaaacttcaaaaacttacccaagacatctcattaattgaggaggcgttaaaatgagtaaaatccctaacggatttcaagtaattgaagcatttgaatcattttctcccaagcatttagcggttgaaggagataaaattggtttacagattggaacattaaacaagcctgtaaaaaaagtaatggtaacgttagatgttcttgaaacggtcgtagacgaagcgattgaaaaacaagtggatttgattattgctcatcatcctcctatttttaaacctctaaaacaagtggttacagatcgtcctgaagggcgtattttagagaaatgcatcaaacatgatattgctgtatatgctgctcatacaaatttagatatagctaaaggtggagtaaatgacttgttggccgaagcattggggctacaagagacaaaagtgctggttccaacaacgtctattcagctgaaaaagcttgctgtatttgtaccttcaaatcatggtgaagcagtgcgcacagctatttgtgatgcgggagctggacatgtgggtctttacagcgactgtacgttttcaactgaaggggaaggcacatttaaaccttcttcagaagccaatccatacattggctcaaaaggagagttagaacgtgtaaatgaaacaaaagttgaaactatttttgaagcgggtcaacaaaataaaattattcgtgccatgctcagttctcatccttacgaagaagtagcctatgacatttatccagtggaacaaacgggcgagacgcttggacttggacgaattggtaagttaaaagaagagatgacgttaaaacagtttgccgctcatgttaaacaagcattggatgtggatggtgttagagtagtagggtctatggatgccacagtgaaaaaagtagctgttcttggcggagatggaaacaaatatattacaaacgcaaaatttagcggagcagatgcctatgtaacaggtgatttgtatttccacgttgcgcatgatgcaatggcaatgggattaaacgttgtagatcctggtcatcatgttgaaaaagtcatgagacaaggtgtaacgcgtgtattaaccagtttttttgatgcgaaaaactttgagtgtgaagtatttgattcaaaagtagacacaaacccatttacgtttatgtaacaaagaaagaaggtgttgacgaatgtcaacaccttcttttgcgtctattaagacgatttttttgttcgaacttttggtaaaatctttgaaagaggcacgcttttttcacgtgtccatgttgtttcatcttccggatcgaactgatctagaaaattgatgacctcttttgtgattggagtaggggtagatgcgcctgccgtaacagctacggttttcgcgttcatcaaccattcgatctgaagctctgagatgtcaccgatacgatatgcctcagtgccggcaatctccattgatacttgagctaaacggtttgaattgttacttttaggatctcctactacaattgtaacatctgcttcacctgcttgctcggctacagcttcttggcgaacttgtgtagctaaacaaatttccttgtgaacttcagcgtgcggatatttttcttttaccttttccattacttctgcaacgtcccactgactcattgttgtctgatttgttacaatgattttttcacgttgaatatttaaatgggctacgtcttctgctttttcaattaaatgaacgatatctggcgcgataccaagtgcaccttctggctcaggatgatttcgttttccgatataaataacgtcataaccttctttttctttttggcgaataaggtcatgggtttttgtaacatccggacatgtagcatcgattgttgttaagcctttttcttttgctcgttcttttacttctggagatactccgtgcgcagtaaaaataacggttccttcatttatttggtctaagatttccaggcgattagcaccgtccagtgtgataatgccgtcctcttcaaacgcatctgtaacgtgtttattatgaacaatcattcctaagatatagattggtcgaggcaatgatttatctaaagcggcgtttcgtgcaatgaccattgcgtctactacaccataacaatagccgcgcggtgcaattttaataactttcatttcaatttcctcctcatcataatcctgacgagcaattcaactcgcttctattatataaaagaggaaggaagaatacaaagatattctttttttgctcactgtattttcttaaggaatcagcagatttatcaaatataaagttttggtttagacacccgatctctggatgaatgttcaatttcttcttcaaagaaatccagctcatcatcggatgaatccgtgctttctgcgcctgctgataaaaccttactgtctttactttcatcagtttcagaaacctctgttccttctgcttcgagtacttcatctgtgtcatcacttgagcgcaaggcctgatagattttccacagagaaggagcatttttgacaagaggtccgtattgttgaatcataggtcccatcgtttccgctgcttttagtactcgctgaacattccccatcatggagctcaagttagcagggttcgttaacccttgcaaacctccaagcagggaagaagagttagtcgctcctgcagcaccttgggctcctgaaagtccagaaaacaaagaacctcgaggagcagctgcagctgcttgttgaaatggtatgtttctatttccgcctcttcggaataggcgagttaagaagttacctcctccacggttcaggccttgctgattcgggtaaaatgattgttgagcatttgtttgctgggcaaagttgcgaaactgctgtaatggattaaattggccaaagttaccaggttgttgcccaaagccgttttgcggtggcattcctggcatcattcttctttgcataccgggtggaaatggtggtcttcgctgtagcaaaggacgcacctcctttagtaaagtagattttcttttactatcgtatgcaactcgcgataaaatgtttttgaaacaggtaataagttttagtaatatgaatgagaagtagtcacagaaggaaaaatcgattataatcatatattgtgccttaaaagatgaacgtgaatgtaaaaaaggagactattatggaaaaaacaaactttgaacgttttgagtttcaaccatttttaatagaagcaattaaacaattaggtttttatcagcctacagagattcaggagcgcttaattccttccgttttaaaaggggaaagtgtaattggtcagtcgcaaacagggacgggcaaaacacacgcttatttattgcctttacttgaaaaggtagaccctaaaaaagaagaagtacaagttgtgattaccgctccaactcgtgagcttgcttctcaaatttatcaagaagtattaaagctaacaaaacacagtgctgaaggagaagaaatttcagcaaaatgttttatcggcggtacagataagcagcgtacaatcgacaaattaaagaagcagcctcaagttgttgtaggaacaccggctcgtttgtttgatttagtaaatgaaaaagcgttagttgtgtatacaacaaaggctttagtagtagacgaagctgatttaatgcttgatatgggatttttagaagatgtggaccgtttggcaagcaatatgcctgaaaaattacagatgcttgttttttcagcaactattcctgaaaaattaaagccattcttaaaaaaatacatggaaaatccaaaatttacgcatgtttcgccgaagcaagcagcagcagctaaattagagcatgtattagttccactgcgtcaccgtaacaagtttaagctgctgcatgatatgcttatttcgtataatccttatttagctatcgtctttacaaatacaaagaaaatggcggacgaagtagcagatgacctgctgtctaaaggcttaaaggtaggaagaattcacggagacttatcgcctcgtgaccgtaagaaaatgatgaagcaaattaataatttagaatttcaatacgtagtagcgacagatttagcagctcgcggtattgatattgaaggaatttcacacgtcattaactttgagcttccttcagatctagatttctacattcaccgcgtaggacgtacagctcgtgccggtcattctggaattgctgctacaatcttcgatgtggaagatgaagatgcagtaaataagctggagaaaatgggaatcgagtttgtaaacaaagatcttcaaaagcaagaatgggtttccatcgatgaccgtaaccgccgtaaaaagcgtgtgaagaaagcggatgaagtgggagaagaggcacatcgctttattcaaaagccgaagaaagtaaagcctggctacaagaaaaaacgtgctcgtgaaattacaaagtatgtgcaaaagaaaaagcgtagtgaaagacgcaacaatcgttaatcgcaataggttagaggtgtaaaaagtaatgttgaaaattggttctcacgtatcaatgagcggcaaaaagatgcttttaggagcaagtgaagaggcagcttcttacggagcaaatacgtttatgatctatacaggcgctccacaaaatactcgtcgcaaaaagattgaagagcttaatattgaagctggtcttttgcatatgaaagagcatggaatgaaagatattgttgtacatgctccctatatcattaatttaggaaatacaacaaagcccgaaacatttgagcttggagtagatttcttaacgtctgaaattcagcgcactcatgctcttggtgcaaagcaaattgttcttcatccaggggctcacgtgggcgctggagcagatgccggtattcagcaaattatcaaaggtctaaacgaagtgttggcagctgatcaagaagttcaaattgcgcttgagacaatggctggaaaaggaacagagtgtggaagaagctttgaagaaattgcccaaattattaatggcgtgacgcacaatgaaaagctctctgtttgttttgacacatgtcacgttcatgacgctggttatgatatcgttcaagactttgacggtgtattaaatgaatttgacaaaaccgtaggaatacagcggattaaagtgcttcacatcaatgatagtaaaaatgtacgcggtgctcgaaaagaccgccatgaaaacattggatttggtgaaatcggatttgatgcactgaattatattgttcatcacccagcgtttaaagaagttcctaaaattctagaaactccttatgtaggagaagataagaaaaataaaaaagcgccatatcagttggaaattgatatgattcgtgcacaaagctttgattcagagctaaaacaaaagcttatgtaatttcatatgtgattgaaagaggtcatgtctatagacatgacctcttcttttacatcaactgctgaaataattcgttcactcgtctggcagtttcacgatctgttacttgagcaatttgtttgattaaatttcggcgctcttcaaggttataaatatttacgggctgctgtctaatgacggatacaagggtgtgtgcctgctgatctgtaatggggatgttgtattgtttgctatactttaaaagctctttcggggtaatgttatttactttcttattgacaatctgctgtacaattttcatatgattacctcctcgtcatatacagtttatgaataaaaaagaaagatgtgactatattgtgtaataaaacaacattttgagtcggatgaacttacggaggcaagaaagcgaaggagtgaaacggcttagtttacaaataaaagacaatcctgtatactacattaatgactaaatcgtaatgattctgagaaagtaaatgggtaacggagtatacgatagaaaccgtgccctcttttgtatggagaaatataaaaaaagaatggtgaggcgcatatgaatacacctgatatcattgaaattgatcatttatcatttcaatatgatggagtgaatgtattagaagatataagtttttcaattccaaagggagcttttttgggtctcgttggtccaaatggctctgggaaatcaacgctaatcaaatgtttgcttggtttgcaaaaaccatctcaaggtgcaattcgtttatttggaaaagatcagagaaggtttaaagaacgaagtaaaattggatatgtatcgcaaaaagcgaatagtttcaacagcggctttcctgctaccgtttttgaagtggtttccacgggtcttacttcaaaattaggtttgtttcgctttatgaatgcttctcataaacaaaaagtgaaagaagcggtagaagcagtggggatgagcgaatttttaaatcgaaacataggagaactatccggtggccagcagcagcgaatttttattgcgcgcgcgcttgtaagtgaacccgagctgttaattttagatgagccaacagtcggagtggatgcacaaaatgtgtacactttttatgagcttcttgaaaagttaaacaaagaaaaaggaattacgcttgtgcttgttactcacgatattggcactgtctcagaaaaagtaacccacgttgcttgtttaaataaatttctacactttcatgggaatgccaaagaattcgaacagctttgtgaacatgacgtatctatgttttatggtcataatgttcatgtgttaacccatgatcatcatcatggagggcagcacgtatgataagcagtttatttcaatttgagtttttacgaaatgcatttttaaccggtatgattattggcgtcttagctcctttattgggcacgttcatcgtagtaagacgtctttctttaattgcagatgcgttaagtcacgtgacgctggcggggatttctgcgagcttgcttcttagtcagaaaatagggtttatgcaaggagtgaaccccgtctatttagggatggtatcttccgttacaggcgctctttttattgaaaaacttcgaagcgtctacaagcattaccaagagctggccattccgattattttatcgggcggaattggtattagtgcaatttgtatctcgctagcggacggttttaataatgatttaatgaactatttgtttggaagcgtaagtgcggtgagtcgttcggatctttggacagttgttgtcatagccgtatttgttatagctattgtctttttcttatataaagaattgtttattttatcttttgacgaggagcacgcttctgcttctgggattaaatcgaagtggatgcactttttatttattgtgatggttgctcttgtcattgctgtatcgatgcgtatcgtcggtatcttattagtgtcatctcttatgactcttcctgtagcagcaagcattcgcttagctagaggctttaaacaaacgattctgctttcggtgatttttggtgaaatatctgttttaggcggattattttcagcgtactacttggatttagcaccaggcggtacaattgttgtcattgctgttgttattttaatcatatctattatgattaataaaggacggaaggggaaacaaaaatgaatttaactgaagccattcatttattaaaagatcaaggatataaacatacaggaaaacgtgaagaaatgcttgccctgttttcaaaatcaaataagtacttaacggcaaaagatgtattagagtacatgaagcctgattatcctggtctgagttttgatacaatctaccgtaatttatcattgtttgtggagttaggcgtccttgaaatgacggagctttcgagcgaaaagcactttcggtttaaatgtgcaaccgcccatcatcaccaccacttcatttgtttagattgtggaaaaacaaaagaaattgaagcttgtccgatggagtatgtagacgaggatttgcgagggtacaatattacaggccataaatttgaaatttacggtcaatgtatagaatgtaatcaataaaaaagagagggcgttatgcacctctcttttttatttttgctgttcttttaaccagccggctacccactgatctgcttctagccaattgtatacgcgaactactccttttggaacaggtaagcgattataaggagtatcaaataagataacggggatattgcattcttcactgatttcacaagcattatcatgtttgtcttcaaaaaagatatcaacatcatatcgttttgctgtctcaactttaaaatgagagccgactaactcaatgtgatgaaacgatagttcatttttttgaaaccattcttccgtgacgtccaatagcttatcgtgccttgcactaataaagaataattcgtgcttttgatgccatttttgcaaaaccgcttttgcatcgtctgcaagtggagaggtttcataaatagagcgttcatttgctttaaaccatttcccgagttcagcaggtgatacatttacaaaaggactgaaatcatattctgtaatgtcttcaagtgttaaatttaagttaaaggctttatttaaatgaggaacaaaagtttcaggagaagtaacagttccatcaatgtcaattccaaactttttcgtcaactacgtgcactcctttaatacgtttattctacttagatgcttgattattcttgtctagtgtaacataaagcccaaagagaaacagtaatactttttatacgcctttggcgaaacgtaatgatcactgcatggcctggtgattgcgtctatacctatttcttgtaagagagtgagcggttgtataagattgacacttataatttttcctcgcattcagatactataaatgctccttatttacgaaagcgagggattaagcatggagaatgaagaacaaaggcgtagaaaagatgtatatgaagctgatttcatggaagaaactgcagctgaagtgggcgttccttaccgagtaggagagcctcatgcagagcgtgaagttatagatattgatcgcaatcgcaatcatgaagtcgctggacgaggagaaggaacgggatacggtcgtttcgcactcgtactttcgattctttcactattctttttaccaattattcttggtgccgctgggattattctagggtttatcgcacgcagaaaaggagcacttacgctaggagcatgggcaatagggatcggagttgtatcgattattgtcggtacgtttatattaccgttcttttcataaaaaaaacgaggcgcatatgcgcctcgcttttttttggttatgatttagcggcagctttttcagcttcttgctttgcgtgatattcagcagcaattttatcaatttctttttttagttcctcaaccattgtttcttcaggaactttgcgtacgatttcgcctttgcggaatagtagaccttcaccgcgtgctcctgcaatcccgatatcagcttcacgagcttcaccaggaccgtttacagcgcagccaagtaccgctactttaatcggtgcttttacagttgaaatgtactcttcaacttcattagcaatgctaattaaatcaatttcaatacgtccgcaagttgggcaagaaataagagttgcagcattggaagctaaaccgaatgattttagcaattcgcgcgcaacttttacttcttctacaggatccgcacttaaagaaatacgtaatgtatttccgattcctttagataaaatagcgccaagacctgctgcactttttacagttcctgcaaataatgtacccgattctgtaattcctaagtgaagagggtagtcaaatgcttgagcagctttttcataagcttcaattgccaagttgacatccgatgctttcattgaaacgatgatgtcatggaaatcaaggtcttctaaaattttaatgtgatgaagtgcactttctaccatgccatctgctgtcggatagccgtatttatctaaaatacgtttttcaagtgaaccagcgttaactccaatacgaattggaatatttttagcttttgcagcatttacaacagcttcaactttttcacggcgaccgatattaccagggttgatacggattttatccgctccgccttcaattgcttttaatgctaagcggtagtcaaaatgaatatccacaactaatggaatgttaatgcgttttttaatttcagggattgcatctgctgcgcgctcgtctggacaagcaacacgaacaacttggcatcctgcttcttctaaacgtttaatttctgcaaccgttgcttcaacatcatgtgtcttagtggttgtcatactttgaataactaactcgttgctgcctccgattgttaaatctccaactttaaccgggcgtgtttttgtacgatgtataatttcactcacgtgataatctctccttcaaaatgaaatcaagaatttgaattcattaatagaataactctttatgaacaaaataactagtagaaagtactaccttagctattttaacaatgactatcccatcttgacaagaagaatgctgtcattacttgtaaatagggaacttatacgtttttccaatttgaatatcctcaggcgctataccgttatttaactttttgaagtctgtaatcatttggttcatagaaaccggtatcgatttttttgtaagctcctcaatgacggacaaaactgtatcgcctggcttaatttttatttttgtataggtggaagaagggctggaggcttttgtttctgcaggctgcgctttgctgacttgaactgcttcagtagcagtggggatggtcccgtatttaatgtcgtagtgacaaatatatccgataaaagcgaaagcggctaatgcacatagctttttcattatgctcctccttcattcttttgcttatgtgtaaagcctatgcttgtcttacttaaatatgattggagaacgaaaattgaaagaaaaattaatgattgtttcattaggcttattgcctttaatcatggtgctgggaaattccatgctcattcctctgctgccaagcattcaaaagtcacttcatttaagcggagttcaaaccagtttgatactgagtgcattttcgattccagccgcattgtgtatccctgcagtagggattttatcagaccggtatgggcgtaaaaagttaatcatatattcactcgtcatgatgataataggcagtgtcgtcgctgctagtagtgcttcattctcttctggaagctttgctgtgttaatggcaggcagagtccttcaaggggttggagctgcaggtactacaacgttggcaatggcattaactggagatgtatttacaggggaaaaaagagcaaaagtcctcgggattttagaagtgtataacggagttggaaaagtggttgcaccgataattggagcatcggcagcactcgtcgtatggtatgccgcgttttttgtctatcctttagctgcaggtgctgctttagtaggtatagtgatgtatgtgagagaagggaaaacaggttcggattcagtatctgttcaagaatatttaaagagggccattgggattgtctatgataaaagaaaatcgctttttcctttattctttgtcgggggattggggttgtttttattatttggcattttatattacttatcttttctaatagaggaaacgtatcatatagacggtttttttaaaggaaccgcttttttatttcctcttggtgcgatgacgctcgtttcttattggaccggtcaacgcatcaaaacagatgtagagctcatgaaaaaattaatgatagtagggataactcttttattcctgatgtttggagtattaacgattatttatacgcttcctgtgctgatgttttgtttgacagtcgcctttggcggcttaggatttgttcttccgtgtattaatatgatgattacttcagcggcttcagacgaagaaagagggtttattatatccatttatggaacggtgagatttttaggcgtagcgttgggacctgttgtttttgaagtgtggatgcatgctgaaaggctgatgtttgtttatagctttattctgctcgcagcaggaggtttgtgggttttgtatcagttaaaaattctttcttctgcaatgggaagaagaaaagttgtaccgaaataaagaggctgagacttaactaaatcactccaatcaccagctagaagcagccacatacatgaaacctgcgttcaccatatcaataaaaaaatccgaacgagttggattctctatcaagaatctagattcctcgtttggattttccttcaactaaaatacgtttgtcccagcatctttattaggttttaccttttttcttataggaacccttgtgacgagcaacaagtaaatgaagaatgttcctatccagtaaagagagctatgtgttgctagagacaaagaaaaagcttcaaaaagcgtataaagcagcgtgaaggctaccgtactataagcgctcagtgcccatagctgcttgaaaggaagctgctttttagtaatgagtccaatcagttttccaagataagcaaggcaggtaatagaaaggaagtttagtccagatgttaatacgtacagtaaaagcatagcggtagggacaagtatgtataaagaaaatttttgttcgtgcagcaagtttaacagttcatttttatctttatggtgccagtttagcaactcatatgaatacgtttgtgtttgtgaattagtcgtgatgtaaattccatcctttaaaaaaccaattgcatgagcaggggaatgaaaccgttcaatagactgtgaggggtttaagataaaagcggtaccgtttactttttttgtgaaaggttgacttgacgtaagctgtgagtttgaaatagaaaaagaagaaacagatttcggaagatctgtagtagcgatatgatagccgtttacaatcgtcaaagtcataaagaaaaatgtaggcagcaaagaaataaatgttaaaaacagcacaaagccaattgttttattcgtatgctcaaagcgaagcgatcttatttttttgaaggaagtaaaactccatgccatctttttcagcatgctcattgtaaagcctcctcttattgaagattctgattataccttattttatagcgaaaatttaaggtttacaatagattttagaaaccgttaccaattacaatgatgcggtggagcgttttgtcacaagcacatcttatgcgtatatgtacaggttttgccgtcattgtttttggggatattacgggcagcttgaggaccgtgctattaatattgcaaaggtacactcgaaaatcattatttgaagaggtatttgaaagtaaaataaaggaaggactcgtcgtgcaaggtctttctttataggagtgattattgtatgataaatagtaataataaaaaggataggtgcgagcatggctattttatgttgggcattaattatcattagctttgttgtatcgtttgttgggttggtttatcccatcatcccaagcgtgctatttgtagctctaggatttgttatatacggtttattttatgattttagctcctatagctggttattttgggtgatacaaggattgttagttgtcgcactttttttagcagactatatagctaatattattggtgtgaaaaaattcggaggcactaaagcaggtgtttggggaagtacagttgggctgcttgtgggtccgtttgtcattccgggatttggaattattttagggccgtttatcggagcgattgtaggagaactgattgttcatcggaccacaattagcaacgcagtaaaaattggagtaggttcggttattggcttttttagtggcgctatttcaaaaggatttattcaactgttgatgattgcctattttttatacgctgttttaaaataatatattgactttaggctagaaacatggtaaatttttaatgtcgctagtaaatgttatattgttccacagtagctcagtggtagagctatcggctgttaaccgatcggtcgtaggttcgagtcctacctgtggagccatggcggtgtagctcagctggctagagcgtacggttcatacccgtgaggtcgggggttcgatcccctccgccgctattttccaatttacgtttgtgacatacataattcatattgttccacagtagctcagtggtagagctatcggctgttaaccgatcggtcgtaggttcgagtcctacctgtggagccatgtggacccttagctcagctggttagagcagacggctcataaccgtccggtcgcaggttcgagtcctgcagggtccaccatttatagggttggaggaatacccaagtccggctgaagggatcggtcttgaaaaccgacaggggtgttaaagcccgcgggggttcgaatccctcttcctccgccatactattgtctattcaaagcttcttttgagaaaaagaagctttttttatgtttaaaagaatagcgaatgggaattaggtaaatataaatcatggattaggaactttttatttgaaacagtagggtaaatttgctaatctaaatgtatatggtgcttttgcgccaaaatgcttacatattttgaaggaggaattattcatggcttacaaattaccagaactaccttatgcatacgatgcactggaaccacatatcgacaaagaaacaatgaatattcaccacacaaaacatcacaacacatatgttacaaatctaaacgctgctgttgaaggcaaagcggatttagaaagcaaaagtattgaagacttaatttcaaacttagatgctgttcctgaagatatccgtacagcagtacgcaataacggtggcggtcatgcgaaccactcattattttggacaatcctttgccctaacggcggcggtgctccaactggtgaattagcagacgctatcgctagcaaattcggcagctttgatcaattcaaagaagaatttgcaaatgcagctaaaactcgcttcggttctggctgggcttggttagttgtaaacaacggcgaattagaagtaacaagcacaccaaaccaagatagcccattaatggaaggcaaaacgccaattcttggtctagacgtttgggagcacgcttactacttaaattaccaaaaccgccgtccagattacatttcagcattctttaatgttgtaaaatgggacgaagttgctaagcgttacgacgctgcaaaataagctgaagacgtatttaagagccagtaaagtaattattacctttactggcttttttgttttccaattcttttacatatctccttttctttttcacacactaggtgtagaagagaaaaggagttttttgatatgcctttattaaaaaaagtagttggagatgtagaagttagtaaagatttacttttgcttttaattataggcggtctttatgccttggctatttcaatttccaattcgtttgttaacatttatctgtggaaacaatcaggcgaattttcggatctcgctatttataatttagcggtagtggtgcttcagccgcttacgtttattttagcaggtaaatgggccaaacgaattgaccgggttgtggttttaaggttaggtgtatcttttttagccgttttttatatcgctgtattagtcagtggagctaacgcagccgagtatttagtattgcttggtggactgctgggtataggatacggcttttattggctagcttttaatgtgctaacttttgaaattacagaacctgatacaagagacttttttaacggatttttagggatcttaaactcttttgcagggatgattggtcctttaggagcgggttttgttatttccgctttgtatgaatcacttgggtataaaattgtgtttggtgtatcgctgctattgtttatcggtgccgttgtgcttagtttttttattacaagacgcgcagcggaaggagtatacaaatttaaagaagtatgggctgaacgaaaagtcaataaagactggaatcgaatattgcaggctcatttctttcaagggttgcgtgaaggtacgttcatttttgttgtatccgtcatggtatttattacgacgggaagtgaattagctttaggaacatatggactggtgaattcagcggttgcgtttgtaggatactatgttgcctcaaggtttattaagcaaaaaaatcgccttcggtttatcttcacagggggcctccttctctatggagcagtctttttgcttatctttaacttatcgtatccaaagttaattatatatgctgtttgtattgccattgcctatcctattttgttggttccattcatttctctaacgtacgatgtgattggacgagcaaaagacgttgtttcaaaaagaattgaatacattgttgtcagagaagtatttctgaatatcgggcgcgtcgtttccatatctttatttttaatagctgtactattttttgatgaagcaaaaagtattcccattttattagctattgttggagcagggcatacgatcatttatttttgtgtgagacatatctcacagcctctgcacaaaaaagaaacgactgttactcctccggtattaaatgaaggagacggagagtctccagcttagagtgttgtcagctccttcatttgtactatggaaaatgcttcgcttttcttttagaataaatacgttgtgtaaataggcacctgccaggtgtctatttatttgctaaatgtctgattttatggtgttatggtatatatgttttataaagtgtaggtgttggtatgaaaaagagaaaaagaagaaaaagtcacgtgccttttcgtgtgaacttacttttcttgaccgtatttgccctattttccgtattaattttgcggttgggacttgttcaaattgtgtacggtgagaattacgaacgagaagtcgaaaaaacacaggacgttacggtcagtacgcctgttcctcgagggaaaatgtacgatcgttataaccgcgtaattgtagataatacctctttaaatacgattacatatactcgttttcaaggaaatacagctgaagaaaggctgcgcatcgctaaaaagttagccactatgatcgatgttccttacaccacaaatgtgattgatattccagaaaataaaaagaataaagatgctaaaaatgtggtaaaaattacagaacgcgatatgaaggattattggattatgcttcaccctaaagaagcggaacagaaaattacgcaagctgatcgcaaaaaagttcaagatggtgaaatgactgatgacgaactgtatcaacgtcagttagaccgcatctctaaaaaagatttagaaagtctaaagagtgatttagaagttctcgctattaagcgccaaatggaggcaggttactctaacaccccgcaaattgttaagagcggtgtgacaaatgaagagtatgccgttgtaagtgagcacttagatgaacttccaggtgttgatacaacaacgtattgggatcgctcatacccagaaaacagtactctccgtactttgcttggaaatgtatcatctgccaacgaaggactgcccaaagataaagtacagtattacttgtcaagaggctatagccgaaatgaccaagttgggacgagctatttagagaagcaatacgaagcccagctcagcggtcaaaaagaaaaagttcaatatgtaacagataaaaaaggaaatctccttgatacaattcaagtgtctaaaggtgaacgcggcagtgatttggttttaactattgatatggagcttcaaaaagcagtagaaaaacaaattacggaccagcttttagccaaaaagcaaatgaaaggaacgcaatttttagaccgtgcttttgttattatgatggatcctcacacaggagaaatcttaacaatggcaggtaaaaaatacaccattgataagaagactggagcgcctaaaatagaagattttgcattaggaaatatttcaacatcttatacaatgggctctgttgtaaaaggagcaacggttttagccggcttagattcaggagctattaagccaaacacagtgttcgttgatgaaccgttaaaaattaaaggaacaccggttaaaaaatcagctgaggctgaagggttaggacccttaacgtattcatctgcgttaaaatattcatccaacgtatttatgtttaaaacggtaatggctatggctgggttacagtatcataaaaacatgactttaccgattaagcctgatacattcagcgaactgcgttcttactacagtcagttcggcttaggcgtatcaacaggcatagaccttgataacgaatcaacaggtgtccaaggcggaagcgatgttccaggtacggcgcttgatttaggaattggtcagtatgatacgtacacgccgctgcagcttgttcaatatacttctgcaatagctaatggagggtatcgcattaagccgcagctagtaaaagaaatccgaaaaccaacgattaaaaccgatgaaattggcggtacgcagcattcatttgagcctgatgtgttaaatcgtatcacgatgaaagaagaatacattaaagatgttcaaagtggctttaagcgcgttacgcaagaacaaggcggtacagggtatgcagctttccatacagcgaactataatcctgctggtaaatcaggaacggcacaagcctatgagaaaaacccaagcggaggggatccaattaaagttaataattcaaactttgtggcctttgctccggcaaataatcctgaaattgcagtagctgtcgtggtaccatcggcatttgtgccaagtgcaccaaataccattacaaaagagcttgctcgttctgcgctcgatacgtattttgatttaaagaaaaaaggtgaacaagaagtaaaagaccaagaagagaatcaacaggctgtcattgcaaacgacgcgaattaaagaggctgggacaaaagcatattagttgaagttaagatccgaacaaagttgattaagaatcaactttgttcggattttttatttgtagggtgaacgtagatttcgtgtatgtaggtgcttttagcggttgattggagggcaaggtgaagactcctgcaggaaaagcgaagcgacgaggagactcaccggccgcccctggaaagggaagccttgcacgaaaatcaacagcggtgtcggaagtaattcatactggcttatttatctaatttacccatctttagattgacttgatttagttatgtctctacctcttctttttttgttagaaatctttacatatatggttttttattgaatttaagggccgtaagaactagttttttacctaaaaaacacgcagatagaccttcgtttacaaaagctttacattgagttaaaacacaattaatagtcggctattattctgtaagtgtaaggattaatagaaatgatcaaaataaggggaagcgtttcggcttctcgtatttatttacactgatagtaaacaatagatattaaatagacatagagagacttttattgtgctcaaaacggttaaagacgatgaaggaggattatccaatggcaataacaatggaattgactaacaaagaaaaagtaaatactccgcaaacaaaagaaattgtatataaaacaaaaggtttgaatttatggtatggcaacacacatgccttaaaaaatattgatttagacattcatgctaacgaagttaccgcgatcatcggtccatcaggctgcggaaaatcaacatatattaaaacgttaaatcgtatggtagaaatgactccaattgtccgtacatcaggtgagattgagtatagagggaaaaatatttttgataaatcgtaccacgtggaagagctgcgcacgcaagtaggaatggttttccaaaagccaaatccgttcccgaaatctatttatgataatattgcgtacggtccaagaattcatggtgttcgcaacaagaaaaaactagatgaaattgttgaaaaaagtttacgaggagcagctatttgggacgaagttaaagatcgtttgaatcaaaatgcaaatgggttgtcaggtggacaacagcagcgtatctgtattgcgcgctgcttggcaattgaacctgacgttattttaatggatgagcctacttctgcgctcgatccaatttcaacattaaaagtagaagagttagtacaagaattaaagaaagacttcagcattattattgttacccacaatatgcagcaagcggcacgtatttcagataaaacagcatttttcttaaatggagaagtggtagagtacgcagaaacagataaaatcttctcaatgccatctgataaacgcacagaagattatattacaggtcgtttcggttaagacatacaaggagatgggatgagtggttgtacgcgaaaagtttcatggtgatttaaagatattacgtgaaaaattattagaaatagggcgcttaacgcatgaggcgctatcaaaatcaattgaagcgttgcaaacaagcaacgttgagctggcgctagaaattatcgacggcgattcatacgtggatgacttagaagaagaaattaatgacctagctatcttactgatcgcaaagcagcagccggtggctatcgatttaagacgtatcattgtggcaattaaaattgcttcggatgttgagcgtatggcagattttgcggttaacgtagcaaaatcagctatacgaattggaaacgaagaattaattaagccgttagaacacgtaaagaaaatgcacgatatttcgattgaaatgttgagcctttcgttaaaagcttatcacgaggaagatcttgtgctggctaaaaaagtagcggaaatggacgatcaagtggatgagctttacggaataacaatcaaagaacttttaagtcttgctaaagaaaagcaggaggctatgaaccaaattacgcagcttttatttgtagcccgctatttagagcgtatggctgatcataccactaacgtagcagaaagcgtattttaccttgtaaaaggcaaacgctacgacttaaacgaatagtagaaaaacctcttctaataagcgaagaggtttttttgttagtaaattataattactatgttaacctgaatttttaacacaaatcgacaaattgcgtttattgtggcaactttttctgaatggtaagatgttaataagtttatacggcacttatatgtagaaaaaacattctaagaaacgaagtgataaaacagtggctgctaatcttattcaaaacttaaatgtgtgtatagctactcagcttgactcatctcgtatttatgttcactggtcgttttctgagcatattcgagagatggtagaaagtatgttttcgacacggtgggaagaattgaatctagctatgtgtacgtatgatataacaggtcttcattttaacggccatgaatcaaaccgctattatatgaagggtcttactcctaagcaagacttcatgtttatgaacagcttggaaagtgagcgcacgtatgtaatagatattggtattcaagataaagaaggaagttttttttcccttcttcgttcgaatccagtttatttgatgaaagaaaaatatgaacaagtgaatgtaacttcgttaggctggatgtacgaacctgtaaaagttcaccagggtgttcaaaatgaatttagcacatattccttatattcaaatgacttggagcaggtgaagaagcaatatgaatagtgatgactgtattcttttaacttatatgcattgtccgttgctacatgtacttcaaacagagagtgagtatccgctgtttgaacaagtaacgaacgagttcatcccttttttagatcaaattgagtctaagaaattgataggtgcaacagctgtgatgtcttgtgtgtttttgaacgcgttaaacgacgaggagtttaacactcgttacgctcaatatttacaccagttttcaagccggcagcatcagaaagcactcacttttttaaaaaagtggaacggaagcttgttctcagcctgcaaatatttctttcagcatgacatgatggaatgtattcctactaccgtaacgaacgcgttcgtttccacccttaaaaccgaacaaacattaaatctccaaattacagaagcaatacgtgtttttcaacagttttttgaaaaaaagcccgttggtttttttatacagcaaggagagtatactcatcaagtagatatgctcctaaaatctcatcaaatgcgctatacctttgtgaagtcatcaacagatgaactaaaaaagtcgcctgctggcattatcttgtttccatatcctaagcaaggaaaacaagttgaggaaggaacaatgaataaagcgagcgctgttttggatttgaaggctaaggacacgcttggctttcagcgaatgcaagcagcaagcggtatatttcaatatcctttagattacgcgagggatatacagtttcatcaaaacgaaactcttgcactctacggtgcaacaaaaagcgccgaatttgtcagtgagaacaatcaattgtttatttcaaccgtacagaagtcagaggcgatgctagatgttatcgattctaaacatcctagcgtggtgaatgctatctaccgacagtggctccttttaagtagcagtgattggctttataattttgaaaaagtcagagatgaatacgaaaggcaagtaaaactatttgattttctttgtcacgaagagaatccaaggatggatagcgaaaacagttttcttccaggaagttcttttttatacccgacaaaagagatagagccggcggctttatcagtaaatcaatataaaggcggtctctccattttaatgcttgcatgggaattccctcctctagttatcggaggacttgcacgacatgtatttgatttatccagagcgttagcaaaggcgggccatcatgttagtgtattaacaacgtatgtagaggggctgccggaatatgagcgtttatacggtgttcatgtttaccgagttaaaagcctgcagcctcatcatccggattttttgacatgggtaaacagtttgaacgtggctatggctcttagaggactgcagttaggctacaagctgtcttttgacgttattcatgctcatgactggcttgttgcctccgctgcaaaatgtttagcagataaaacggatagaccgctaattacgaccattcatgcgacagaacatgggcgcaataatggtattcataatgacatgcagcaaaaaattcacttgcaagaagaggagctgattcgacaatcaagctcaatcattgtctgcagcgactatatgaagaaagaattaatcactttatttcacgtagagcaagataaaattgctatatttccaaatggaattgacaagcagctggtagtcgacgcagtaaatgagcggttaaaagaaagtttacaaaagaaatataattttagaaaggcccctattattttttcaattggacgaattgtatatgaaaaaggatttcagctatttattgaagcagcggaactatttaagaaaaaacaaatagatgttcaattcgttgtagcaggaaaagggcctttacttcatgagtttcgaacacaggtaagtgaaaagcaactagacaaatacgtgtattttattggatacattaccgataacgaacgaaatcagcttcttcaagcttgcaaaatggttgtttttccaagtctatatgaaccttttggaattgtggctttagaggggatggtagccaagaagccaactatcgttgccgatacaggaggtctaagcgatattgtttcacatttcgacacaggcctgacgtttgcccgaggagatacgctcgaattaatcaactgtattgaatttttgttaaaaaatgaaaaaacggctgcaaaaatcagcgaaaatgggtatagaaaagcaacaactatgtttagctgggaaaaaatcgctattgatacaagtaagctgtttcaacatcacatttgccaggataaaaaaaggagggaggcaaaaaattgaaagccattatacttgctggcggtaaaggaacaagactgcagcccttgacctatacgattccaaagcctatgctgccgctttacgataaacctgtgatggaatatagcattgaactgcttaagaaacatggaattacagagattgggattacgctgcagtataggcatgaacaaattattgaatactttggggatggctctcagtggggagtgacgcttacttattttatcgaaaaagagcctcttggaacagcgggcggaattaagcgagcagaggcctttattgaggaagactgtattattattagtggagatgccttaacagaaattaatcttcaagacgttattcattttcattatgaacaaaaaagcgaaatgaccattgttacaaaagaagtaaacgacgtgcggggttatggagtggtgacgatagatgaagggcatcgagtcacggaatttgtagagaaaccgacctacgaacaggccaatagccgattgattaatacgggagtgtatgtgatcaaaaaatccgttcttgattacgtgaattcttatggtcctacagattttagctttgacattatcccgcttcttttggaatataatcatactgtgtgcagttttgtaacggaagattattggattgatattgggcaaatccaccattatcgtcaagcacactatgatttgtggaggaagtggtttggcaatagacaggaaagtattgtctcagatgacgcgcttatagaagaaggggtgattatttacgatccggtttacgtaggagaaaatgtggtgattagaaaaggtgcttcaattggtccttacacgattatcggaaccaatagtatcatagaagcacatgctgcaatcgataaaacgattttgcttcaaaacgtaacggtgggggcagaatcgtttttatacaacgctacgataggtccctatgtaaatgttcaagcaatgactacgtatgtccaagatacagtagctgaaaatcaagtgctacctcaactttctgtaaaaccagatgtttctatcttcaaaaacggtcgcctgtatgtacattcatctgttgatcgagaaagactatacaatgcgttattacttgtatgcaaacaccaagggtcgttctgtctagcaagcgatgataaaggagaagccattcaacttcgcaaagaatgcttttcttttttacggagtaatcattcagctgtgtatgatattaaaaaagaagctcttccggtatttcgatattacatgatgacttcacaagcgagcattggtatttatattggtgtggatagcaaaaacagcggcctctttttagaaatatatgacaagaaagggcaattagttaatcagcttattgaaaaaaagattgagcggatgtaccttcaagctaaaaaagcaaacataacaacttctgtttcacttaaagaaacaagcataggaaatatcagggaagaatattgtgatgctttagtaaaatcaattaatcagcatgttttattagaagacagtacgaggattggcgtgatttgttcgccgtttatacaggaagttgtcgaattattatgtaagcgtcttcgtgtccacgttttatttttaaacaaatgggagaaaacagaagaaatcaaacgaataattaaacgaaataagctgtctttttgtattcagattaaagaagatggagaaacatttgctctatatgatgaaaaaggctgcagcgtaaatgactcagaaattatgtcgctttatatttatagcgtatacatgacaaaaaaagtagcattcgttcctattcctatacactattcatccacactagaaacatttgctcaatctctcaatcaatcatttatgaggacaaaagcaaaaaaacgtgatttgcttagtcttttggggcccgttcaatttcagttagatgccatgtacgctttatgtcagctgatcgaattaattatggtgcaacagcggaaaatttctgaaatgattcaatatgtcccgcacgcttatatgaactggcggtatatttcatgtccgctagaaattcaagaacaagtgatgaagaaactattagaagaagcaatcggtaaacaagtgtatgtcattgatggcttaaagatttaccatgatccccatgaatggacgcttattttaccagatggtcacttgcctgtattaaatatttattcagaggcgttaaacactcagactgccaagaagctgtcggcatattttgtagaaaaaatacaagagtatcaaagagtgtaaataatggcttttattcaaaagaaaggaagtacgcctctcataaaaagagttccgcttatttcaagaagcttcatctatatataaggcgtagcagagaaggagcttagggctctaagaggaaagaaaaagtgaagaaatgaaattaaatgactttcttcaaaaaaacagactggcatttcctttcgaaaaatgatattatattaaagtctgatttatgtttataatgtttggagggaaaatagatgcgcgtaaacgttacattagcttgcactgaaactggtgaccgtaattacattacaactaaaaacaagcgtaataacccagatcgtcttgagttaaaaaaatacagcccaagacttaaaaaagttacacttcatcgtgaaacaaagtaagcagtaggagtacaatcctgctgttttttttatagggggaattaaaatgaaatctcatctgcgcaaagagatgaagcgcgttcttaatttaatttctgaagagcagcacgaggcacattcaacaagcatagcaaatgcactgtatgaaacttgtttatggaaagaagctagagtcattgcagctacggtttcaagaaataaagaagttaatacgaaagccatcattgaacgtgcttggaaagatggaaagaaagtagctgttccaaaatgcaaccccacaacatctcaaatggttttctacgagatcacgaatttttcacagcttgaaacagtgtactacgggttagcggagccaattgttgaagaaactgttcccgtttcaaaatcttcaattgatttactccttgtgcctggcgtggtatatagcaaaaatggatatcgtatcggctatggagggggctattacgatcgttatctaacagattataccggacagaagctaagccttgcgtttgattgtcaagtcgtttcagaggtcccatatgaatctcatgatattcccgttgaatatattttgacagagaaggagcttatttgctgtgaatccgtttgatgctgtcatgataattgtaatattactcatggcaggagcaggctacatagcaaaagcactgacagtatcgggagcctgcatgtcttttatcgtaggagcgagcgtttatatcggtttttcgcttcaaggttttttactcttactcttattttttagcacttctacgttgtgtagtaagtacaaaaaagaaaaaaaacgcgcattagaagaaaagctagagaagcacgacaggcgagattatattcaagtccttgctaatggaggtgtagctgctgcttgcggtttgttatatgctgcaacagcttttcctgtttacatgtggatgtttatgatcagtatctcagctgctaatgcggacacatgggcatctgaaatagggtctctaagtaagaagccgccgttttacctttggacattaaagagagtagaagcgggtacctcaggagccgtttcacttttaggtacagcagccggagcagccggagcttttcttattgctgccgcttgttattttgcttttccattcgtatcgctaagtagtatattgctagtcgggtgctttggttttattggaaacgctatagacactcttcttggagcaagtgtgcaagttcgctttcgctgtcaaagctgcggtattgaaacggaacggaaagatcattgccgtaagccaacggtaaaagagaaaggaataactttctttaacaatgatgttgtgaatcttgccgctattttgcttgctgcttttacaggcggaatccttatcctgcttttacctatataagagcataaaatgttcgtcataggtgcaaagtaaacgtaaggaggcttgaaaatgagacatattgtattagtacttacgcttttagttgttggaacgctgggctatcaaatgagataccgtgttttaaattcgctgtttggaaattcatttatccgcagtctagctgttcgttcattttttaatttgccgtttgttcgggatcgtttaatgaagcaggtcttccgctaagagcgaaagatacataaaagacaccttacagacctgtaaggtgtttttttgtagaaaaagaaaaagggaaaatcgttgcttttttcctggctttctgccatctttacatatagagagtatgaggaggtgactatttgtctaggcaagatttttattatttgcagctggcacagcaattgcttggccattcttcatatgagctgatttcgatgaaagctgatgcttcagagctatggtttcaatcttcgcatcgcaaagaaaagtcaattgtccgcatagtccgccggaattttaaatcagccgttgagcagcaaaaagatgtattgtatgcattacaaagagctgataatgtgcgaaagcagagaggtaaatcaacgcttactcttaacacgatttactttgctgattttgatcctttttatacagagcagtccttagaaagtgcgccaagtccctctaaagtgaatagttacgttgaacaattaacgtcagagaaagcaagcgtttatgaacctctattcgaacggctgggtcttacattagaaagcgcagacaatttctcttccgaagaagaagcacagcgaatagaacagtggaaacataaaattgtgctttttgtacagaaaaaacaaagtgaagaacagcaaatagctggatacgggaagcctatttttacatatatatttttagcgctgcaaatcttaatgtttctatttctggagtggaagagcagtacacaaaatactctcactctaattcaatacggagctaaatacaatcccttaattatggaaggcgaatggtggcgtttttttacacctataattttgcatataggacttctgcatgtgcttatgaatagtgtagccctgtattatttaggaacgcttgtagagaggatatatggcagcgggcgttttgtctttatttatatatttgccgggtttgcaggatctctaggaagttttatatggaatacgtctatttccgcaggagcctcaggggccattttcggttgctttggagctttactgtttttagcaagaataaatccacgcttcttttttcgaacaatgggatcgagtttcattgtcatcattgtgattaacttgatttttggatttgttgcgccgaacgtcgataatgcagggcatattggcggtttggttggcggatttttagctgcgagcatcgttagtttaccgaaacaaaaaaagctgtatattcagattccggctttcatttgcacgcttttattagtaggaagtctgcttttttatggatatcatgagcgttctgtttatcaagatgagccctatgcactcagcgtagcggctacgtatcttcagcagaagcagtatgaagaagcaaaagatgccattaagctttttgttgaaaaaggaacaggaaacagtagcgtgtatttcgtcagtgctagcgcagaattttatcttgaaaattataaagaagctaaacagcaattgaatcaggctgtaaagtatgattcaacttttcgtgaggcgtattacgagttagctctggtgaatatgaaactgaatgatattccagcggccacacaaaatatcgataaagcaattgcgcttgaaccgcaaaatgaaaaatacgaaaagctgaagcaagagctaggaaattaaaactgttgaatgacgaatttaatattttatactttactattgtgagaacgtttactagaatattaatatgtagacctagcagtgggcgttaaatacggccgctgtttatgactgaatgactgttgagttatctcaaaataaatgaatcatatcacctagaaaataggataaaggtgacagaatgaatacgttatatgatgtacaacaattattaaagtccttcggcatttttatatacgtgggcgatcgtattgctgatttagagctgatggaagcggaagtaaaagagttatatcagtctaacttgattgatgtacgtgattaccaaatggcaattcttttgcttcgtcgagagttaaaacaacaaaaagagaaaaaggatgaatgaacatggatgacaaatggttagttggagttgatttaggcggtacaacaataaaaatggcctttattaatcattatggagaaatcattcacaagtgggaaattaatacggatgtgagcgagcaaggccgtaaaattccaacggatattgcaaaagcaattgataaaaagttaaacgatcttggagaagtaaaatcaaggttagtaggaattggtattggtgcaccggggcctgtcaactttgcaaacggttcgattgaagtagctgtcaatttaggttgggaaaaattccctatcaaagatatcttggaagtagaaacttctcttcctgttgtagtagacaatgatgcaaacattgcagcgattggagaaatgtggaagggtgctggagacggagcaaaagatttactttgcgttacgcttggcacaggcgttggcggtggcgtcattgcaaacggtgaaattgtacaaggcgtaaatggagccgctggtgagatcgggcacattacttctattcctgaaggcggggcaccgtgtaactgcggcaaaaccggctgtttagaaacaattgcttcagcaactggaattgtacgtttaacaatggaagaattaacggaaacggacaaaccaagtgagcttcgcacagtgttagaacaaaatggacaagttacatctaaagatgtatttgatgcagctcgttcaaaagacgagttagctatgcatgttgtagataaagttgcctttcatttaggtctagcactagcaaactctgctaatgcattaaaccccgagaagatcgttctaggcggcggtgtgtctcgcgcaggcgaggtattacttgcaccggtaagagattatttcaaacgttttgcatttcctcgcgtagcgcaaggtgctgaactagcaatcgctactttaggaaacgatgcgggaattattggaggagcttggttagttaaatcttattttgaataataagcaagaatctaactgagataaaaaagcgctttgacatttagtcaaagcgcttttttatcatgcatcttttcaatctttacatatacatagtgtaaaggagtgaagattatgcaaattgtagatatccaaaagccctacgattacacgcgaacaatacaagatatccaaacacttttgacgtactacccctatggttctcttgaatggatagggtgcagcgtgcttggaaagccgattcctcatattttaattggaaacggagaaagaaaagttcatattaatgcgtcttttcatgccaatgaatggattacgacaaatgttcttctacagtttgttgaagattatttagctgctcttcattacgaccaggcgttgaacgggcaggaagcaagagctctttttaatcaaattacgctttctgcggttccaattgttaatccagacggagtagatctggtcttaaaaggtcctgctgtaagtgaaccttatgcgtcttttctttctcaaataggaagagattttcctgattttcaaagctggaaagcaaatatccgaggggtagacttaaacaatcagtttccggcttattgggaaattgaaaaaaagcgcaaagaacctaaagctccgcattatcgggactttccaggctatgaatctctgtctgaacctgaagcgcaggcaatggtaaaactcgttgagcgtcatgattttgattgcgtgattgctttacatacccaaggagaagaattttactgggggtatatgaatgaagagccgaaggaagcggaggaaatagccagttattttgaaagggtaagcggttataaagcagtcaaaacgattgatagtcacgctggatttaaggattggtttatcttagaaaagaaaaagctagggttcaccttagaactggggaaaggaattaatccgctgcctctatctcaaatatcacgcgtatataatccgaccaaagctattttagttgcggcaatggaatatctatctatttgaaaagccacgcaaagcatatgctttgcgtggcttttttaatgatgtaccgccggataaccgtgatgtataatggtcatcacggtaaaccatccgaataccccgaatgttagtaccgaaaaaccaatgcctaatatgtttttatttctaaaagatgaaatagctgcaaatacgcctagcaatgttgttagtgcaaaaataatcataagacccactcgaagaaacctcctttaggcaacttaaaattaaagcgctatcattagcttatccctttaattgtaaaacttttctaaccgtttgtcgagatgaaaaccaatctttctttcgccttattagcttagaaaggtccttactttcatttataagatgatgtgtgtatgataatgcatataacggaaataaattttacaaggaggatacattatgaactatcatcgtataccgctaggacctattcaaacgaattgttatgtcgttgctaacgaaaaaaaagagtgtttagtttttgacccaggagctcagggaaaacagctcgttgaatttctagaaaaacaaacgtataaaccgttggctattttgctgacacacgctcattttgatcacattggaggagtagatgaagtgatgaatcactactctatcccgctttatgtacataaaaatgaaaaagaatggcttcataatagtgatttaaacggttcgaaattttttgatttaggagaaattacggctccagatgcaaccgatattatttcagtcgaaggcaatttaacaattggctcatttcaatttgaggtgtacgaaacgcctggtcattctcctggcagcgtttcatattatttcaaaccgggtaactttgtagtatctggtgacgcgctttttgcaggcggcattggacgcacagatttacctgaaggcaatcaagctcagctgttagaaagcatcgaatcgaaattgctgtcccttccagaagatacgcttgtactaagcggtcacggacctgaaacaactgtgggacacgaaatggatcaaaatccttttctaaatggtttttaagaatacaaaaagcgatggaagcccatcgcttttctctttactgtcctggtgtcatcataaaagttgaccagtacgtgaaccccacaaaaaagacggtcaaatatgctccgaaaacgtaaatgtacattctttcagacagctttaaataactaagaattacaaaaaaacctgtttgagctaaaaagagtaaagaagtcttatgcatgtgaccgaggtaaaacattacagtgaaaattgctgtccagaaccccattacacggtacattcgttccacgtccatttcctcctttatcaaacttagttagtgtcatgatgaatgtcatcgctgtgtaagcactagaaagcacttataaaactatatcgatacttttccattataatacatcctttcttccctgaaaacgctatcttttccttgaaatacgacagaagaaaaaaagttatacaaaacatgtgcaaaatactatacaaaggttatacaaaatgtgtacaatgtatataaacaatctataactaaaaaacgggagggtttcatatggaagaaattaaattttatacgtacccgagctgtacatcttgtcgtaaaacgaaaaagtggctagtgaaggaagatgtaaattttaaagagcgtcatttatttagagaaacacctactcataaagaaatgcttgaacttctttctatgacaacagaagggatggatgaacttcttgctaaaagaagtcaagaatataaaaagttaaatgttgatgtggatagcatgacgctatcagaagtagtcaacctattaattgaacatcctcgtttgcttcgccgaccaattttaacagatggcaaaaagcttgtagtaggctataacgaatctgctcttaaaaatttagtcaagaaaaaaacaagtcttgcttctttagttgtgtaagcctacatgatgaagaagctcaattcagtaaataacgaataaaacgacagcgtagggttttacatcacgttgtctttttttatgtagtcgtttagaggtgtacagaagttgtacatcgtgtacaaggactgaagcgaagaaaagaagcgtatactaaaaaattataaaaaatgaaaaaagaaggagggaaatctcgaaaaaggtcgaaattactgtttctagatgttttaccaatcatcttgattacaaataaaggagtgatgatcgtttgaccgaaattgaacagtttgcaacttacattatacgagatgcatgtgagtgccgaagttctgatgtgcatattgtgccccgaaagaaagatgctgtgattcagctgcgaattgaccaggagcttattttaaagagggttatttcaaaggaaatgtctgaacggctcatttcgcattttaaatttttagggggaatggatattggcgagcgcaggaaacctcaaaatggtgcattgaccacttccattgatcactatcaagtaaatttgcgtttatcaactcttcctacttctcatgatgaaagtcttgttattcggcttttgcctcatcaacaatctacatctctcaaacatttatctctttttcctgaacacactaaaaagcttatttctctcttgaaattctctcatggattaattatttttaccggtcctacaggatcaggtaaaaccactactctatatactcttttacacgaagtaaagcacctttttaatcgaaatgttattacactagaagaccctattgaaaaaccgagtgaaaccgtgcttcaagtacaggtgaatgaacgggcggggattacgtacacgactggtttaaaagctatattgcgccatgacccagacattattatggtgggagaaataagagatagtgagactgccaaaattgctgtgagagcagcgcttaccggacacttggttttgacaacgatgcatactaaagatacaaaaggatctttgtacaggctgcttgagtttggcgttagctttcaagaaatggagcagactcttgtagcagtagctgcacagcgccttgtagaaattcgctgtccgctgtgttccggaaaatgccaccccgcttgtaaaaaaatgaggaagcatcgtcagtccagcatatacgaattgctttatggcaaggagcttagcgcagtgatgagagaagtgaaaggaggaaatgcggattatgattataagacgctccgagatgttattctaaaaggaatcgcgctaggctatttatatccgcattcgctagacggatgggggtaaagacaaatagacaaaaaaggtggtctcttgctcagcaagcgaaaattcttaagcaggtctctaagctcttagaaaaaggctacactctttctcaagctctttcgtttttgacgtttcaagtatctaacaaagaaaaaacggatattgaaaaatgtcttgagcagttaaaacgaggagaatctttgcacgatgcttttgttaaacttcagtttcaccgtgatattttaagctatttatattttgcggaacagcatggaaaccttcaatttgctttaaaagaaagcagctcaatgattgaagaaaaagtaaggcatcgtaaaaaatttcaaaagcttgttcaatatcccgtattgctactgctgtttattctttccattttatttgttttaagtacggttttacttccacagtttgaagctctgtacttatcctttggaaacaagcagtcttcgtttatcctcttatttatgcaggcgatgtcgttctttccttttgtgttgcctgcactcatcagtatgccaatcatcctgtatttgttttatgtgatttacattaaaaaattgcctccagtagttcaaatgcagctttttatgagagttcccgttatccgaacgttcacacggctatttaactcgtactttttttctgttcatatgagcaatttactaaatggtggtttatctatttatgaatgctttgctctttttcaaaagcaagagcatcatccgttttttcaagtggaagcttttgcttttacagatcaactttcctcaggaatgcgattagatcatatcgtttcaggtaaatctcattatgaaaaagacttggctcacgttattgtgcatggccagcagaacggtgagctttctcaagaactgtatgattacagtctatttatgatggaaagaatggaacagtttatttttcgtattttaaaatatgtacagccgcttacattcttattcatcggaattgtcattctgcttatgtatatgtccgttatgcttccgatgttagaagtgatgtcgagcttgtagaaaggtgaaagaatatgattttaaaaggtgataaaggatttacccttattgaaatgctcattgttatgctcgttattaccgtgcttttgctcattatgattccaaatgtattaaagcataatacggttattaacaacaaaggctgctcagctcttgtcaaaaccgtagaggctgaggtacaagtatacgaacttgaaaatggcgaaaaaccaagtctagaagagcttgaagcaggaggctacttaaaagaaggcaccgtatgtccaaatggccaagctattcaaattgacggtaccggaaaggttacagctagtggttcttcttaagcaaaaaggatttaccctcattgagatgctgatggttttatttattgtgcaagtgatgatgttttccattatcgtagccattcggccgcttgtggaatattacaaaatcacattatttttgcgacagctgcaaagcgacacgttttatgtacagcagacagccatgaaccgagaatctccaattaaaattaacttcgcaccgaagggaacagaatatattgtttctgattctcgtgccgttctttataagcgcgcctatgactccaccattcatatcacgtttggaagcggcaattccacgatacaatacaacaaaaacggcaatatttctcaagcgaagaccatttttatcagcaatcaaaaatttaaatataaagttacttttcaaataggcagagggcgtttttatgtggacaagatgtaagggtcagcagggctacaccttgttagaaatgcttgtttcatttagcatgcttttactcctaaccggtacaattattcctttgtatgttcagatgaaggaagcggaaaagaagcaatatgtttcgtatcaagctgatgctatcttgcacgaagagctattgaaatataaatatgaagcaggatataaacggcgagaaaaaatcgtaaaagaaaacgttgcgttttatctgaagtggaacggagaaagtgctcaaaagctttgtgtagaatggacagattccgctgagaaaatgaaaaagaagtgtgatgtgatgttgaagtgaaaagggaaaaaggctttacccttgtagagatgttagtcagttttactctttttttgatcattgtttcatttttccccattatcattccgctagctaagcaaacatataatccggactttagtatgaatgaaatggagtgggaaatttttgtgaatcaacttgctatggaatatcgagaagcaaaagaagtgggaattcatgcgactacgcttacgttgaaaatggaaaataatcagatcatcacttatgaacgctacgaagacaagataagaagacgagtggatgaaagcggtcatgaagttgtgctgcagcacattaagaatattatgtatgaacagcaaaaagaaaggctgttgatttgttcaacagacggtgttaacaaagttagagaagaaaccattacgacgtttttgatgcttgctcatgaaacataatgagcaaggatttattctcccggttgttttggcattttgtgcgctttttcttctgttagtagctcagcaaaccacttattttgtgacgaaaagttcattttatcaagaagtagagcagaaaaatcgtctgcagcatcttttagaaaacgcagttgtacatgtaaaaaaagaaataaaagaacataatacatctccatctgcatctttagtattagaaactggtacggtttcatacgaagtagtaagtgaagatgaacagatgattattctgaaaataaagtgtcaaacattgcaaggaagagcattgacggaaacggcatatattcaaaaaaaggatcagcacattgtgaaatggacggattaagtctctttctctccggatataatagtgctgaggagatgattatatgaaaacgaatgattatgtaaaatatatgactcagcaatttgtacaatatatggatcagccaaaagaagagaggaaaacgaaaaagattcaaaaaaaagaagagcgagcaccttttgcaaacagatggtttggaatgattccgctgtcgtttatgctgtggtatcgaaagaaaaaagaaagatgagcatatcatatgctcatcttttttttaaccggcttgtgttttattaaattgacgagacatcgtttcaggcgatatgtagaataagccaccgtttataaacttaaataagatagtcggctcgtacagttcttgaagcgctgttttttcggtcatatatatttctggcagctcttctgctgtttcgtaaaaatgatcaagaagcgctaagtcttcataccatctctcctgggctttttcagcccattcagttggctgagctttaacgtagtcagtcacatatgatgtgagtcgtgcgatggcacttttcggtttaataaaaggtgagagagtaaagcaatagtctgagattttagatgacaaattttgattaatgattaattcatgaaatgattcaataatctgtccattgattaaattaatgccaagcgacaagagttcatcttttttacgatcgcatttgtacgagactttaatatttaatgcaagccaagggtgtaaaggttgatttgttggctgagctgatgcaacttgttcatacaagtgaataaacccgcctagtttttgagtagaagcgaaaatttggtgcagcctaggtgaaccgaaatgaattcgttctccttgaacggaatcgtcttcaaatgctggatctgtaatgaaagtgagcgaagcaggagttgcttctcctcccgtcttttcaatatagtgccaataaaatggacgattcatcaattctttatcgagttcaatcgttaattgaaccgtcaggtaagacgatgtttctgtgacaatagaacaattattagctaaaaaataacgctttaaaaattgatgaatatcagtttgctgcatgctgatcctcctcgctgtcttcgtattgaataatagacgtcaagttctccattttgatttttatttctccttcactccgtgaatgaaataaaatatcctgaatatgttcttcgatattttttaaatcaagctttgttaaaatatcatctagctctccaacaactcgttcaaaaaggtttattttttcgtataacaattttaaaatatgttcttcgaccgtatgttgaatggctaaattgtaaatgtgaacattatgtttttgacctaaacgatggacccttccaatccgctgttctagacgcattggattccatggcagatcatagttaatgatatgatgacaaaactgaagattgattccttctccgcctgcttcagtggcaataaatacttgcgcgtggctttcaaaaagctgcttcatccagtcttttttacctcgcttaaatccgcctctaaaaggtacagaggtaattccatgctgttttaaataccactgtaaatacagttgagttgctctgtactcagtaaaaataatgactttatcatcaattttctgaacgagctctagcactttttctgcttttgcattttgcggcacttgctgaagtagttccattaacggagtaatcatatgttccgttaatgcgctgtttggatcttcctgacgttccagcatgttttttaatgtcatatacaccgcttcacggctgctgcaggcctctcgctgcagggttaaaattgaaaaagcgcttgaagggtggagtccgtttcctttaaaagaagtaatcgcatcgtatagctcccgttcttttggcgagaattcaacaggaatggtttgaacaattcgcttcgtccattcgatacccgtatcgtggcggcgatttcgaatcataactttgttaacaagctcttttaagtgttcatcgttttgcaaagagcgttttttagcggaaaataattcttcgaaataatctttattgccgaggtggccaggctttaaaagagagaccaagttaaaaatttcttcaattcgattttgaatcggtgttgcggttagcaacagacaaaatttcttttttagactttgcacaaattcatagttttttgttttgttgtttttaagtttatgagcttcatcaatgatgatgaggtcgtagtcttgttctagcacaatttctcgatgaggagaacgttttgctgtatcaattgaagacacaacgatgtcacactgatcccacacatatgattttctttgagggactgcgggaatataaaatttttgattcaattccataacccactgtgaaacaagcgaagctggaactaaaatgagaacttttttaacaagtccgcgaatcatatattccttcaaaattaaccctgcttcaatcgttttccccagtcctacttcatctgctaaaatggctttcccattcattgtttcaactacttgtttggctacttcgagctgatgaggaagcggcgttaaatcggctagatgttttgggctttgtagtccttcaaattctgagataagcgtttggtcttctatttcataggcaagtttatacaaatcccatgcagaccaagggccgtcttgctccaatttagttgaaaaggctgcttcccatgtttcatcgatgtttaatttcactttcatgataaaaatgctcctttgtaaaaaatttttattgaacaaatgataagaatcaggtaggataaaaatatatttagaaaatttgaaaaagaaaatagattagcactttacaaatgattgtgtgaataaagataaatacatctttcagtagtatgcccaactttaccaactttatagaagcgaatgacgacacggggagagactacttgaatgtagcgccgaaggagcaagcaataaaattgtgaatctctcaggcaaaaagactcttgtttgacgcagctctggagagtgtctatgcgtttatagaccacccacgaggcaaacctatttatttataggtaaactttcaggtgaaaaggacagagacttcctactaaatacagtagggggttttctgtccttttttgtttggatacatagtgatccccacactatttgaaaactccccgttatgaaaagtttcacgtgaaaaagaggaggacataaatatgacaacagaattacacaaaacgccgctttatgatacctatcaaaaatatggtgccaaaacaattgattttggaggatgggctcttcccgttcaattttcttctattaaagaagagcataaagctgtacgtacaaaggcaggcctttttgatgtctctcatatgggagaaattcttgtaaaaggagctgatagcttagcttttcttcagcacacgatgacaaatgacgtttctacccttgtagacggaaaagcgcagtatacggctatgtgttacgaagacggaggcacggtagatgatttgctgatttataaaaaagcagatcaagagtatttgctagtcgtaaacgctgctaatattcaaaaagactatgagtggctgttgtctcacaaacaaggagatgtaacgctcgttaatcagtctgatgaaactgcgcagctagctttacaaggtcctgtagcagaaaaagttttacaaacgttaacgaacgaaaatttatctttattaaagccatttacatttgctgatgatgtagaagtagcgaatgtaaaagctctcgtttcacgtactgggtacaccggggaagatggctttgaaatttattgttcttcagctgacgcctctcacttgtggacggctattttagaagcaggcagtgatgaaggtgtgttgccttgcggattaggagctcgcgatacgcttcgttttgaagctactttggctttatatggccaagagctttcaaaagatattacgcccattgaagctcgaattggatttgcagtaaaaacgaacaaagacagctttattggaaaagaagtgttaaaagaacagcgtgaaagcggggcacctcgtaagctggtaggaattgaaatgattgataaaggtataccacgacacggttacgaagtatttgcagatgaagaacaaattggatttgtgacaacaggtacacagtcaccgacattaaagaaaaacatcggtctagcactattgtcagcagagtattcagagcttggtcaagaagtggaagtgcaggttcgaaaaaaacgcttaaaagcaaaagtggtttcaacacctttttataaacgttcaaagtaagctttggggaggaatttaacatgttacatcgctatttaccaatgacagaacaagatcagcagcaaatgttagcagcaattggtgtttcatctgttgatgatttattttcagatattccgcagcgcgttcgttttcaaggagaatacaatattaaaaaagcggcttcagagcctcagctgttaaaagaattaaatagtatggctgctaaaaatgctcatttaaaagactatgcttcttttttaggagcaggagtttacgatcattacatgccggtgattgttgatcatgttatttctcgttcggaattttatacggcctatactccgtatcagccagaaatttctcaaggagaacttcaggccatctttgaatttcaaacgatgatttgtgagttaacggggatggacgtggctaattcttctatgtatgacggaggaactgctttagcagaagccgctatgcttagtgcgggtcaaacaaaaaagaaaaaagtacttgtctctgcggctgttcaccctgagtcaaaagatgtgttaaaaacgtatgcgaagggtcaatacattgaagtggtagaaatccctgcagcagacggagtaacagatatgattgcattagaaaaagagatggggagtgacgtggcagctgttattgtccaatacccaaatttctacggacaaatcgagccgttaaaagaaattgaagaaattactcatcaagaaaaatgcatgtttgtggtttcaagcaatcctttatcattaggtttacttacgcctcctggagaattcggagctgatattgtcattggagatgcacagccatttggtattccaagtcaatttggaggaccgcactgcggatactttgcaactacgtctaagcttatgcggaaaatcccaggacgattagtagggcaaacggtagatgaaaacggtaagcgagggtttgttttaacccttcaagcgcgtgaacagcatatacgccgcgataaagcgacgtctaacatttgttcaaatcaagcgttaaatgctttagcggcatcagttgcaatgacagctttaggcaagcaaggtgtaaaagaaatggcgctgcaaaacttatcaaaaacgcattatgcatatgaagcgttaaaggcaaaaggggtaaatgtagcatttgaaggaccgttttttaacgaattagtcgtgaagcttccggtttcggtaacagaagcaaacaatcatttattagcatcaaaaataattggcggttatgatcttagccgtgataaccaagcgcttgaaaatcacatgctgcttgcttttacagagctccgtacaaaagaggaaattgaccaacttgtaaatgaattgggggatcttcatgcttaatcaaaatcaatcacttatttttgaaagcagtaaagaaggacgaatcggctattcattgccagagttagatgtgccgcaagtaaatgctgaagaactgcttggaaaagcgtatgtgcgtaccaaagctcctgagcttcctgaagtatcagaactcgatattatgcgtcattacaccgcgctttcaaaacgaaatcacggagtggactcagggttttatccgcttggttcatgtacgatgaaatataatccgaaagtgaatgaacaagcagcacgcattgctggatttgcgcatattcatccgcttcaagatgagcaaacggttcaaggtgctctcgaacttttatatgatttacaagagcatttaacagaaattacaggaatggatgaagtaacacttcagccagcagcaggtgctcacggcgagtggaccgggcttatgatgattcgtgcctatcatgaagcaaatggtgagacgcagcgaacaaaagtcattgttccagactcagctcacggaacgaacccggcttcggcaacagttgcgggatttgaaacggtaacggtaaaatcaaacgaacatggtttagtggacttagaggatttacgccgcgtagtaggagaagatacagccgctttaatgttaacaaacccaaatacgctagggttatttgaagaagatattttagaaatggctgaaattgttcacgcagcaggtggaaagctttattatgatggtgcaaatttaaacgcagtattaagtaaagcccgtcctggagatatggggtttgacgttgtgcatttaaaccttcataaaacgtttacaggccctcatggaggaggcggtcctggctctggtccggtaggggtaaaagcagatttaattccgtatttgcctaaaccagtgcttgtgaaaacagaacaaggctatcactttgactataaccgccctcagtcaattggacgtgtaaagccgttttacggcaacttcggtatcaacgttcgcgcttatacgtatattcgttcaatgggtccagacggcttaaaagccgtgacggaaaacgctgtgctaaatgccaactatatgatgcgtcgtttagcagaacactatgagcttccgtttgaccgtcactgtaagcacgaatttgttttatcaggaaaacgtcagaaaaagcttggcgtgcgcacattggatattgcgaaacgactgcttgattttggctatcatccgccgactatctacttcccgcttatcgtagaagagtgcatgatgatcgaaccaacggaaacggagtcgaaagaaacgctagatgcgtttatcgatgcgatgattcaaattgcaaaagaagcagaagaaacgcctgaagtcgtacaggaagctccgcatacaacggttgtgaagcgccttgatgaaacgctggcagcgagaaagccagttcttcgctatcagaaagaacaggctgttcaaaacgtctaacaaaaaacctcgcccaaaggcgaggtttttctatatacataccattattttttcttttttactttaccgttccacattttgaagccgccttttaaatcatagatttcttgaacaccgtggcgacgaagcatttgtgctgcacgtcctgtgcgcattccgctttgacaatagatgtagacaggctgatctggacgaaattctttaatgcgcatacggaactgtgaaagaggaatatttcgtgcgcctaaaatatgtccgttttcaaattcattcggttcacgaatatcaactagctgtgccttgcggtagccggtgcggaattcttcttcagttaacgttttcataatgcgacgttggtaaaagaacataacgacagagtatatgatgattactccaagtaaaatgagtactgctgtaattggtgacatgctgattcttcctttcttcgacaaaatccatactcttattatataagtgaatgaaattagaagtaaagcgattttgccttgaatctagcggatttcttcccggaaatgaaaaaactaccacatttgaattcacagttttatgttgctctttgcttttccttagctcaatcttttggtagactaaaaaacggatttattttttatattacatatagctgaggatgaggtagatgaaagcaaagtggagatttattgattccaacaaccgttcgccttattacaatatggcgttagatgaagcgttattagaatggcatagtaaaggagaaattccacctacgattcgtttttacggatggaaccctccaacgctgtcaatcggttattttcaaaaagctgaaaaagaaattaactttgataaagtaaaagaattagggctaggctttgtaagacgtccaacgggcggcaggggcgtgcttcacgatgaagagcttacttacagcgtaattgtatctgaagagtatcctaacatgcctaagacagttacagaagcatatcgcgtaatctctgaaggtttactggaaggatttcgttcgttagggctcgaggcttattttgctattcctcgttcagaagaagaaaaaaatagcctaaaaaaccctcgttcgtccgtatgctttgatgctccttcttggtatgaactagttgtagagggccgcaaaattgctggaagtgcccaaactagacaaaagggagttattctacagcacggctctattctgttagagattgatgaagataaattattcagcgtgtttaattatccaaatgatcgcgtgaaagaaagaatgcagcgtgcatttcgttctaaagcggtagccatcaatgcaattgctggccgcaaaatctctattgaagaagcaaaagaagcgttttataaaggatttgcttcggctcttgatatcgatttagaaccgtatacactgtctgaagaagaggaagcatacgtagaagaactagcgcgcacaaagtacggatcggatgaatggaactttaagcgctaaacggatgccgatgggaaatagataaaagtgcaacttcttataagttgcactttttattggaatttttagaaataatccttggctaatagaatacatagggaagaaaagtcaaacactttttttatgaaaaaaaaaatatttcacttgacacccttctatatgtagatgtttggataagtgtcaaatactatatattgaattcgtccaagccctgtggtaagttattgatagttgattgaaaaactctttttcctttaaaaggaaaaagagttaataaatttatagatgttcgataggtaaggagttgtgagaatgactgttttgttaaatcaaaaagtgaatatgaatgttgaaaagctcaattcagatattgaacgctttccgcaagtacatccgattacaccggatatgaagttgactcataaaggtgtttcaagattggtaatgttagaccgctatgcttttaaagatacggaaaaattgacgttatcagaaggagattttgttgttctaactgtaaaagaagatccgaaatttccagcacgaggacttggctatgtggaaagcattaattttgagcaaaagaccgctattgtcaaggtagaagatgagtttagaggtgctttatcgcctgaagaagcagaaaatgggttaattactcgttcgctggacgtcattgaaaagcctctagaggtcttctacgagcaaattgcaaaacgtaatgcaacaggcttagcttctgtggaaaaaacagaagaaaagcgtaaagagtggtttgaaaagttctatcaagagcttgttcagctaaactttgtaccagctggccgcgttctttacggtgcaggtgctgacacagacgtaacgtacttcaactgttatgtaatgccttatgtaaaagattcacgtgaaggtatttcagaacaccgcaaacaagtaatggaaatcatgagccgtggaggcggtgttggaacgaatggttcaactcttcgcccgcgcaacacgctggctcgcggtgtaaatggcaaatcatctggttcggtttcatggttagatgatattgctaaactgacgcatcttgttgagcaaggtgggtcgcgtcgttaacaaaccggcgacgtaatctcgtgaattgctggaacacccttagagctttcttcaccacaacgtgatcggcaacgatgagcgtgatggttagaaaagaggaaagattgggcaatcagcagccaagtgtctttggaaacgaagaaaaaggttcaacgactattgaaacttcctaaaagttctaatgtaataaaactttagtgaataaagtaggtgttatgatggaagcaaaggaaggagtaaaccatagcaaacggcaacgtggctatggggcacgagacaaaggaattttcttctttgatgatatagtctgatcttacatgaaagtgtaagagtacggcagaaatgaccgtacccttcttaacgaagagtaacaaattgggggcccaaatgatcatgcttgccgactggcatcctgacattgtagagtttatcatttctaaaatgcaaaaccctcgcattttacgtttcttaattgaaaacacaaatgacgaaatgattaaaaaacatgcacaagataaattgaagttcacgccgctaacagagtctgaagaagcgatgtaccaaggaatcattaactataaacaaattcctggtcttggtgggttcagtgaaaaaatcattaaagatgcagaagaaaagctgcaaacaggcggaacgtacagcgttcataactcagagtttttaacaggagcaaacatttctgtatgcttaacaaaagattttatggatgctgttgaaaacgacggtgaatatgaacttcgcttcccagacgtagaaagctattcaaaagaagaaatggctaactacaatgaaaactggcacgaagtaggcgatgtgcgcgaatgggcaaaacaaggaaacaaagttcgtacgtaccgtactatccgtgcgaaagagctatggaacttaattaatatttgtgcaacgtactcagctgaaccaggcattttcttctttgacaatgctaatgatatgacaaatgctcaagcatatggtcagcacgttgttgcaacaaatccatgtggtgaacaaccacttgcaccattctctgtctgcaacttagctgctgttaacttagcgcaaatggcagataaagaaacgaaaactgttaactttgaaaagttacgtcaaacggttgaaacgggcgttagaatgcaagataacgttattgatgcaactccttatttcttagaagaaaaccaaaagcaagcgcttggcgaacgccgcgttggccttggtgtaatgggtcttcacgatcttcttatttattgtgaaacagagtacggctctgacaaaggcaatgagttagtagataaagtgtttgaaacaattgcaacgacggcttaccgcgcgtctgtagagcttggaaaagaaaaaggaagcttcccgttcttagtgggcgaaacagatgctgaaacggcttctttacgtgaagcattcacaaatacaggcttcatgaaaaaaatgcctgaagatattcgtgaaaacattaaagagaacggtatccgaaactctcatttattaacagtagcgccaacaggcagtactggaacaatggttggagtatcaacgggtcttgaaccttatttctcattctcatacttccgaagcggccgtttaggtaaatttattgaagtaaaagctgatatcgttcaagagtatttagatcagcatccagaagcagatccaaacaaccttcctgaatggttcatttcagctatggaacttgcaccacaagctcacgcggacgtgcaatgtgtgattcagcgctggattgacagttcaattagtaaaacagtaaacgctcctcgcggttacacagtagagcaagttcaaaaagtgtacgagcgtctgtataaaggcggagcaaaaggcggtacggtgtacgtagacggcagccgtgatgcacaagtcttaacgctaaaagcagaagaaaatacgtttgatgaagaaattgaagcgccaaaagaagaaacgaaaccgcacgttgtgttagttgatacaattaatgaaattcgttcaactgatgtaacaattggttctgaagtaggtaatacttgtccggtttgccgtcaaggaacggtagaagaaatgggcggatgcaacacatgtacaaactgtggtgcacagctgaaatgcggcctttaattttgaacataattgactagtaaaagctgactcaaacgagtcagcttttattatgtataaaaatggggcataaataagaagcgggatcgaacggttcttgtatttgaataagcattgtagtatgattttaattgaatgtcttttatccagttttatcttatgacatcgctttatttacacgttttattcacatagattatcaaacatgaacacgatatcactataagaaacagacatttatgacttattattagcaatacataatattaattgggggagatttcatgcctacaccgagtatggaagattatattgaacaaatatatatgctaattgaagataaaggatacgctcgagtgtctgatattgctgatgcattggcggttcacccctcatctgtaacgaagatggttcaaaagctagacaaagatgagtacttaatttatgaaaaatatcgaggccttgttttaacagctaaggggcagaagattggaaaacgtcttgtttatcgccacgagcttttagagcagctgctgcgcatcattggcgtagatgagaaaaatatttatgatgacgtagaaggaattgaacatcatttaagctggaattccattgatcgaattggagatttggttcaatactttgaagaaaatcataaccgtattcaagatcttcgcaatgtacaaaaacgaaatgaagaagagcaaaaattataagaaaaaagcagcggccaatagcgtcactgctttttttctttttatcataacttgttgctgagtcgactacaaatgtagagtgggtagtttggaggagaggctgtgtacgtcgacggagtgttttcaggtggcggtattaaagggcttgcactgattggtgcgttacaagctctagaagaaaaaggcttgatctttcggcggttagctggaacgagtgcgggttccattatttgtgcatttgtagcagccggttatacaagtgaagaaattgttgaaatgatgaatgaaattgagttatcgtcttttttagatcaaagaatgtcttttttaccatcaagcttgacaaagtggctgtttttatattggaaaatgggattatataaaggagaaaggctcgaaaagtggattgctgagaaattgcggagcagaggaattcgtacattcgctgatttgcctgatcagtcgctacgtattattgcgtcagatttgaccaacagtacgatgcttgttcttccagatgatttgcctaaatatcaaatcgacccgaatcgcttttctgtagcaagagccgttcgaatgagctgcagcattccatatttttttgagccggttaaattaaaatctaccccaagcagtttaatagtcgacgggggcgtgttaagcaactttccaatttttctgtttgatgatgataaaagtcttaagaaacgaccggtaattggtgtgaagctgagcccgaaggacgaagaaagggaacggaataaaattaaaaatgccgttggtttattcagcgcgctttttgagacgatgaaagatgcgcacgatgcaagacatatttcaaaacgtcacgaaaaaaatattatctttttacctgttaatcaagtttttgcgacagaatttaccctcacagaagaacggaaggaagagctgattgcgtttggaaaaaagcgtacaagggcatttttgaaaaaatggtgctattaaaaaaacaaggaggcttttctccttgttttttaaaagaatgctctatttttcttttttccttttttaccttcgatgacggtcaagtgtgagttgtttttctttttctttagcggtttcgttgatttggataccgggcgcttatttgagcttcgataagtatgcatatcaactttgttgcttcctcgctctttttctttttgacgcagttttgattgttttactgctcgcacatagcctctatcttgaccttttgtctgagaagggcggagaataaaccgataaactaagtaaaacaaaatgataaacagaaaaatataacctgcttgacgtaataaaacagctggatctgtaatcaacgtaaatgcaaagccaatgactcctaacccgattagaccatatacaagtggtttcacgaatggacgtctcattttgttcacctcctaaaatagtaaaaaaagaaagcaaaacggtgtggattagacaacttgttcgtcattggtagaagaaagttcattttcaacgcgtaaaagttctttaaatgaagcaatcgcaacttcaacttgatcatcttttggttctttggttgttaaaagctgaagccataaaccgggataacctaaaaagcgaagaagagggacatgacgaactttattggttaactgtaacacttcaaatgataaaccaaggacaactggaattaatgcaaggcgatccacaattcgtaaccaaagaggatccgttggaacgagtaggtagacaaacattcctacaactacggtaaagaggataaagctacttccgcagcgataatgaagtcgagattgtgcttgcacggcttctaccgtaagttcagcattgttttcatatgcattaatgaccttgtgttctgctccatgatattgaaacacccgtttaataagtggcgtttgtgaaatcacataaatatagccaaggagcaataatagtttaaatactccttcaataaaaacctgagctacacttgaagtgaaaacaggacgtgtcaattgtgctaaaaacacaggaatcaatgtaaagagtactttcccgaaaagaaaggatattacaccaatagttgcaacgccaaatattaaagatagttttgattcttttttctctttttgttgttcttctgctacttgagcatcatcttctggattcacgtcatagcgttcagaggaaaagttcaagtgctgcgtaccgtttgcactggcttcaacaatagcagcaattcctcgtaaaaaaggaatttttttaaaagcagtgagtacggaatttgattttctttttgaatgaaaataatcaatagattgatctttgcggcgaatagccgtcaccatcatacgtttgccaccgaacatgacaccttctataacggcttgaccaccatacgcaggtttttgtaatttagacatttcaggcaccaacctaacttaactagactagacttcttagtattttatattctacagcaaaatcaaataaacctctaggcggatgcatgttatctagtttagccaatatttttcatctccacacccttcttatgaatttttttcctttcacttataaaatttgtttatgaaactctgtgcgaagtagttttaaaatgtctctttgatatcaggctcccttcttgcgtataggaagagtaataaacgtaaaaacttagaaatgagtcagtaggagatgaaaaaaagttcatactacatcaagaggtgattaatatgtcagaacctaaagaacagcatgaaaaaaaacaggataaccaccctacgcataaacaggaaatgtcttttttatttaaagccatctttatttccttttttggagggattttctggagctttattggctatttaaattatctgttcagctttagtgttatcaatccaaatatgcttttagatccatgggcattaggtgattggaaggataaaggaataggtgttatcgtcagtatttttcttataggggtattatctattgttgtcgggttgttatactacgtcctattaaagaagtttaaaacaatttggataggttttgcttacggcttattatggtgggcaattgtattcgttgttttgaatccgctctttcccaacttaaaaacaattggagagcttcctgctaacacgattatttcatccctctgtatttatattttatatggtgtattcatcggatattccatttcttttgaagctgcagagcttcaaacaaaagatgaatccacagattttcaaacggcgaataagtagtgtgaatgttccaacgtatgctaatatattctatataatgattttttaaaaaataaagtgcaaattcacataagtgagctgcataaagggttcgtagtaggggagagtgttgaataaagatgaataagattttagtaataaacggtcctaatttaaatcgtttaggcgtacgcgaaccagcggtatatgggacagataatcttcaaaatcttgaagagaagcttcagcgagcaggcagagaccatggggtagaagttgagtgcgtacagtctaatcacgaaggtgtaattatcgactggattcatgaagcggatgagaaatttgatgggattatgatcaatcctggtgcttttactcactacagttatgccattcgagatgcgattgctagtatatctgttcctgttattgaagtgcatatttcgaacgtacataagcgtgaagagtttcgccatcattcggtgacggcacctgttacacatggtcaaattgtcgggttaggtttatacggatacgagcttgccctgcaggcacttttacaattaagggggaaataaaatgaaaatcgaaaaactacgcgaacagttttcaaagttgaatgtggacggtgttgtaattacaagtgaatataacagacgctatatgaccaatttcacaggatctgctggtgtcgttatcatttctgaagacaaagcggcatttgtaacagattttcgttatgttgaacaagcaactagtcaaacagaaggttttgatatcgttcagcacaagggtcctattgtagaagaagtagcgaatgtagtgaaacaatttggaattaaaaagcttggttttgaacagaattatgttacatatggacagcatcaattatttgataagcatatcggcgcggaacttgttccaatctcgcacgcaatcgaaaacttacgcttgataaagagtgactcagagattaagatattaaaggaagctgcaaaaatagcagatgcagcatatgaacatattttaacctttgttcgtcctggtttaacagagcttcaagtatctaatgaactggagttctttatgagaaaacaaggcgcaacatcttcatcttttgatacaattgttgcttcagggcatcgcggggctttaccgcatggtgttgcttctgacaaagtaattgaaaaaggcgaacttgtaacgcttgattttggcgcatactataatggttactgttcagatatcacacgaacatttgccgtcggtgaagtaagtgataagctaaaagaaatttataatgtcgtactgcaagcgcagcttaacggaatgagcggcatcaaagcaggtatgacgggtaaagaagcagatgcgctaacgcgtgattatattacagaacacggatacggccagtattttggacattcgaccggtcacggcgtagggttagaagtacatgaaggcccatcactttctgtgaaatctacagatgtactgcagccaggtatgattgtaaccgttgaaccaggtatttacataccagacttagggggcgttcgtattgaagatgatacgatcgtcacagcagaaggtaatgaggcattatcgcactcatcaaaagagttcattattttataaaatgtaggaggatttcttcatgatttcagtaaatgattttcgtacaggtttgacagtagaagtagacggaggtatttggcgtgtaatggatttccaacacgtaaagcctggtaaaggcgctgcattcgttcgctcaaaactacgtaaccttcgtacaggagctgtgcaagaaaaaacgttccgtgcaggtgaaaaagtaggaaaagcccaaattgataaccgtaaaatgcaatatctatatgcaagcggcgatcagcatgtattcatggacaaccagtcttatgagcaattagagcttccggcaagtgcaattgaatatgagctaaaattcttaaaagagaatatggaagtagcaattatgatgtaccaaggtgagacattaggtgttgaacttccaaacacagttgagcttaaagtaacagaaactgaaccaggtattaaaggtgacacagcttctggcggtacaaaaccggcaactgtggaaactggcttaacagtaaacgttccgttcttcgtaaacgaaggcgacgtattaattatcaacacaacagatagcagctacgtatcacgcgcgtaattggatcgtgtaagcaagctgcaaacatacaaaaaaggcagagaatcattctctgccttttttgtgtgtttttttgtgctaactcttctttattttgcataggttgtactaaacaacgcagaggtataggaggggcttatgaagcagtggttggatcatttaaacggtacggtattaacgatggcgtgccttcgatttatttcttcatttattgagtttattgccgctattttaattgtcacaaacaatgatgtgaaaaaagcgttaatgattaatggaatgttagcgcttgtgggtccgattgtaatggtgagttcttttaccataggtttagtgtccgtagccgatcaattatcttttgggaaattaatcatgattgtagtaggagtgctcttcattttaatcggtgtttttaaataaaaggtaggcataaaatggtcaagcttataatacattgaagtgagttcaaatatgaggggatgaatatgttaaacgaaatacttgcaatctttccgcctaatttaaaaaagactgttgaattttatgtcacaaaccattctcatgtactagaagaaattcgagtgcgcataggaagacctgtcgaatttacaatcaacaatcagccatatttcgaatcgtatcttccaagtgcagaagatgctttatttatcttaaataaattaagccagttttcgatttatatgattgaagaagaattgaaaaaaggatatgtcaccattgaaggcgggcaccgggttgggctagcgggaaaagttgtaacggaaaatggacaggttcgtgtgattcgagatgtatcatcctttaatatccggattgctaaacaaaagattggtatttcgaatcagcttattccttttttatacaatggctattggcaaagtacggtcattataggacctcctcaaacaggaaaaacaaccatgattcgcgatttagccagagtaataagtactggcatagagcgctctaagattcctccgtttaaagtgggaattgtagatgaacgatcagaaattgctggggctgttaaaggggttcctcagcatacattcggatctagaatggatttattagatagctgtccgaaagctgaaggcatgatgatgatgattcgctccatgagccccgatgtgctgatcgtggatgaagtgggaagtgaagaagattgtaaggccgtacttgaagcggttaatgctggcgttcgtgtcattatgactgttcatggttatgacattgacgatttaatgaagcgtcccactttgcaagctttaatgaaacttcacgtattcaaaaggtatgttgtgctatcgaacagccgaggtcctggaacacttcaggctatctacgatgagcactataattccatgaaaacgtccgctgaaaagtcgcttattgaaaatagtaaagggtgatggtgtatgaaactgtttggtgccatctttatcttatttgcttccacttacacaggatttgagtttgcaaagcagcttagtgcaagacctaggcagctcaggcaattaaaaacggctctgaggtcgttagaagcagaaattatgtacagcaatcggcctcttcaagaagttgctcatttgttatctctacagcttcctaatcctttggcttctttatttaatgagttttcaatgaaattaaaagaaggtactgaaagtgtcaaggaagcttgggaaaagacgttggaccaattttggaaacaaaccgcacttaaaacgggagaactagaaatcttaaaacaatttggtgaaacgcttggtcagcatgatcgttattcgcagcaaaagcatatcttactgacgctgaatcatcttgaacgcgaagaacaagatgcagttgataagcagaatcgctatgaaaaaatggttaaaagtttaggctttctatctgggttgctactggtcattctattgatgtagcgatggaggaggattgaatgtgggaattgatatgaacaccatttttcagattgctgggattggtatcgtcgtagcttttttagtcaccgtactcgaacagatgggaaaaaaagattacgcgaactgggttaccctcatcggttttatttatattttatttatggttgcttcgattgtagaggacttatttcaaaaaatcaaatcggtttttttatttcaagggtagaggggtgagttgccattgaaatgcttcaaattgtgggcttaggattagtagctacgtttttggctcttattttaaaagaacataaatcacctattgcttttttacttgttgtattcgtgggatccgtgatctttctttttttaattgatcaaatctacgaaattattaagatggtcgagcggctgtcgattaatgcccacgttaacatgatttatgtggaaaccattttgaaaattattggtatcgcctatatcgccgaatttggtgctcaaattacgaaagatgcagggcaaggtgccattgcttctaaaattgaattaggtggaaaagtgctgattctctccatggcaattcctattttaacggtcattattgaaacaattatttcaatgctgcccaattaattttacttaattatgaggtgacgaaatgaagcggtggacgtttaaagtgaatatactcgctcttcttttgttcctcttttttttctttccagaaaatgtacaagcttccgaacccccgaagcagcaagaacttgtcaatgaacaaattgataagctcggtatcgatgaagtcaaacagttttgggacgatattattacccaatacggcggctttttacccgagagtcagaagggaagtttagtcgattttttaaaaggagaaaaagagttctctcttaaagaatggctaggaggtcttgtaaagtttttatttcatgaagtattagcgaatggaaagctcctcggtacactcattatgctaacggtttttagcgtgtttttacaaacgctccaaagtgcgtttaatcagcaaaccgtaagtaaagtagcgtatgcgcttgtatatatggttttgatcatcattgctcttaatagttttcaaattgctatctcttatgcaacgggagcgattgagaccatgaccaaattcattttagctctggtgccgctgctgcttgccttaatggcatcatcaggaggagttgtatcggcagccttttttcatccgatgattttgtttttaatgaacacaagcggcttgcttattcaatacgtagtgatgccgctgctttttctttcagcactgcttagcattgtgagtacgatttcagatgaacataaggttacacagcttgctcagctgttgagaaatataagcattggcgtgctcggaatattcctaactgtttttttaggagtgctatccgttcaaggggccacctcagctgttgccgacggtattacaattcgaacggcaaagtttgtcacagggaactttatacctgttgtaggacgtgtattcacagatgcggctgatacagtcatcagtgcctcgcttctattaaagaattcagtagggattgctggagtagcagtcttactgttaatcgtcgcgtttccggctattaaagtgttaacgcttgcttttatctataagctagcagcagctcttcttcaacccattggaggaggaccggttatttcctgcttgagcattatcagcaaaagcgtcatctatatttttgcggcgcttgcggttgtctcgcttatgtttttcttatgtttaacggtcatcattacagcgagcaacgtcacaatgatggtgaggtgaagaaattgcaggccttaacgacgtggattactaatatcgttctttttatcttattagctaccattattaatttactattgcccaattctagttttcaaaaatatacaaagctggtggttggacttcttttaatgctgatcattattacacccgtttttcaaattttcaaagtggatgttaatcaaatgctgaaatcacttagcttatcatctattcgatccgatcagcaggtagaaaattcaatagaaaatcagaaaaaagaaatacaagcttcacaacgtgcatatattttagaacaaatggctgtccaaatggaggcagatgtaaaagaggagttgatggatcagtatggtgtagcaattgatcgaattcacattgaaacaaaaaagccgaacgacgaacctaccgctgataatattaaatccatttcagttgccgtaagtaaaaaagcatcggatgattccgaagttgtttcagctgtgaaagttatttctattgatacctccacaccgatcgaaccaaacaaaccaacagaatccaagacattatccaactatttagcagcaaaatgggatgtaaaacaaggccaagttgttgtgaatatggaggagggagacacgaaatgagtcaaaagccagaaaaaggtgacccatcattttttcagcggttcttttcacttaaacagtcatcaactacgaagaaaccttcaaagttaatgtatataggtattttactagctgcaggcgttatctttatggtatttagcaactcactcacaacatctatgaattcaggcggattactaaagagtgcaagcaaagaaaccagcgcaccaccggtatcacaggatgttcccgcttttagctctaaaaagacaacaacaatgacaggttatgaagagcggtatgaggaagaattgaaagatattttggatcaagttagaggcgtaagtaaggtaaaagtaattgtgaacctagatgcaacagaatccaaaatatatgaaaaaaacagcgtcacaaaatcgcaaacgaccaacgaaacggaccgtgaaggagggactcgtaaagttgaagattcctcaacagacgaacagctggtcattgtaagaagtggagaacaagaaaagcctgttgtagttaaaaccgaaaagccaaaagtaagaggcgtgttagttgtcgctaaaggagctgataatatcgaggtaaagaaatctattattgaagccgtgacaagagcgctggatataccaagtcatagagtagcagtattagcgaaaaaaggatgagggggaaataaatatgttattaaaaaagcaaacggtttggttattaacaatgctaagtttagttgttgtgttatcggtgtactatatgacaacgccagaaaatcctcagagtaatgttgcgctagtagacaatgaaaaacaaagcgaaaagcaggctgatgacaaggctcctgcagaagatacaaaacaacaggcagatgagaaatcaggaacaaaagaagattcaaaaactgaaggctcagcagaagatgtaaagaaggaaacggctaaaaatgcaaaagaatcagcagttgtatcaagcacagatagcgacgagctatttacggcgcttcgtttggaattaaatgatgaaagaagtcaattaaaagaagagtatcaagaagtagcggcatcaaaaaatgtgacgcctgcggaagtaagcaaggcgatggataaaattgatgaattatcaaagcttggggaaaaagaagccacgctggaaacattaattaaagcaaaaggatacagtgacgcgctagtaagagcagacggaaagcaagtgcaaattacggttaagacagaaaaacactcaaaaacaaaagcaaatcaaatcattcagctagtcaaaaaagaaatgggtccaaaagaagtagcggtagagtttcagccaactaaataaagggaataaaagaagtgtgaaacagccgtaaattggggttgtttacacttctttttttatgaaatgactaaaatctaagcgagacggtaaaaattttaacatggctttctttttttacttcggttataataggtttcataatcttataatagtactaggtgacaaatgttttcataagtgttgtcatctgtaaagctatgtttccatttataaaacgataacgctaaaaagttattatagagtaagtggaacttctttttaatgtttgccaaacgaattgaatggctgtagccatctgtcgtattattaacattgtagagaattctattttcatgaggtaggagtgttcaatatgttaaaaattcaagagatccgtgagatcattaaactagttgatcaatcatcaatcgaggagttcacctatgagcacgaaggctccaaaatcaagatgaagaaaaaagacgcaattgtttccaaacaagcgcagcaagtagtggtttcggcacctgaacaagcggcagcacctgcaccgcaggcagcagcggctccagcgccagcagcacagtctgctcaaccaaaagaagaacaagcggccccagcggttgatgaaagcttacataaaattacatctccgatggtagggacattctatgcgtcatcatcgccagaatcagatgtatacgtgactcctggagataaagtacaaaaagattcggttgtatgtatcgtagaagcaatgaaattatttaatgaaatcgaagcagaagttaaaggtgaaatcgttgacgtattagttgaaagtggacaacttgtagaatacggtcaacctcttttcttagtaaagcctgaataaggagcggtaaatatgattaaaaagctattaattgcgaatcgaggagaaattgcggttcgaattattcgagcgtgtaaagagttaggtgtagaatcagtagctgttcattctcaagctgatcgcgattctttgcatgtacaattagcagacgaagcgtattgtattggaccaacgtcatctaaagacagctatttaaactttacaaacattatgagcgttgcgatgctaacgggctgtgacgccattcaccctggatacggctttttagctgaaaacgctgattttgcagagctatgcagagagtgtaacgttacatttgtaggaccaagtcctgaagccattaacaaaatgggaacaaaagacgtagcgagagaaacgatgcgtgaagccggtgtcccaattgttcctggttcaactggaattgtagagtcagtggaagacggtatgtcaatcgctaatgatattggctatcctgttattattaaagcaacggcaggaggcggaggaaaaggaatccgcgttgcgaaaaatgaacaagagcttattaaaggtattacaattacacagcaagaagctgctacagctttcggtaacccgggtgtgtacattgaaaagttcattgaggatttccgtcacgttgagatccaagtgttggctgattctcatgggaatactgtacatttaggagagcgtgattgctcgattcaacgccgtcttcaaaaattaattgaggaaacgccttctccagcgttagacgaaaaaacgcgtgaattaatgggcgacgctgctgttaaagctgctcaagccgttaattacacgggagccggaacagtggaattcatttatgattaccgtgaaaacaaattttacttcatggaaatgaatacgcgtatccaagtagaacaccctgttacagagatggtgacgggagttgacttaattaaagaacaaatcaaagtggcaaatggtgaaactttaccgtttacgcaagaagaagtgacatttaatggatgggcaattgagtgccgaatcaacgcagaaaacccagagaaaaactttatgccatcaccaggtacgattcaaatgtacttgccgccaggtggctacggagtgcgcgtagactctgctgcatacccgggctatgcaatcccgccttactatgattcaatggtggctaaattgattgttcatgcgccaactcgtgaggaagctattgaacgaatgaagcgcgcgttagatgaatttgttatcgacggcgttgcaaccactattccttttcaccaaaaactattaaatcatgaaaaatttgttagcggtgaattcaacacgaagtttcttgagctatatgacgtaatgaattcttagtataatataaactataggaggtgctgtacatgaatgaaaatcatgtattagaaatggaagaacacccaaattctcttggcaaagtagaaattgctcctgaggttattgaagtcattgcgggtattgctgcttctgaagtagaaggcgtttctgcaatgagaggaaattttgcagctggcgttgtggagaaactaggaaagaaaaaccacggtaaaggtgtaaaagtggacttaacagaaaacgggataaaagtagacgtattttgtatgatgaagtttggggtgtctattccaaacgtagcgcaacaagtacaagataacattcgtcaagcccttaaaaatatgacagctattgatctcgatgaagtaaacattcatatcgtagggattcagtttgatacgcaaaaaactgatattgaagaagttgaataaaacaaacgtttacctaacggctgttgctaaaatggaataacgtatgattacttgttccttttcaacacaagctatggtaaagtgaaaaagactgtctcgtcataaagacggtctttttcgtgttctataaacttcgtataagaacaatgaagtatcgtttcataaactatgctattatctaggtatactagttgaagaagataaataaaggagcaaaaataatgaaaagacatacagcacgccaaaaagcattacaagcactatttcagcatgatttagggcagaccgagccaatggaggcaatcggaaatgttgtacaaaatgaaaagtctgatcaatttttagaaagtctcgtgctaggtgtggttgaacatcagcaagaaattgatgaacttttacgcaatcatttggaaaaatggacgttagatcgtgtagctactgtagaccgcgttatcctacgtattgccgtatacgaaatgaagtatgaagaagaaattcctacgagcgttacgttaaatgaagcgattgaattagcgaaaacgtttggcgatgatcaatcaagcaagtttatcaatggcgtattgtctaaagtgttaacaactttatctaaataaaggttcatcttgccaaatcaagtgaccaaaatgcttctctcctttatataaaggggagagggtgactgcaaaggaggcaaaatgatgagtgaagtgcgttatctaaccgttacggctcttacacgatacattaagcgcaagtttgatgtagaccctcacatgcaagatgtatggattaaaggagaaatttctaactttaaacgtcatagtcggggacatatgtatttcaccttgaaagatcaaaatgctcgtatcgcagccgttatgtttgctgggcataaccggcagcttaattttcagcctgaagaaggaatgaatgtactcattcgagctgaaatttcggtttatgaaccaagcggaaattatcaaatgtacgtaaaagaaatgcagcctgacggcgttgggaacttatacttggcctacgaacagctgaaaaaaaagctggaaaaagaaggcttatttgatcctgctaggaaacgaaaactgccgaagtatccaacaacaataggtgttattacatctccaactggagcagccgtacgtgatattattacgacattaaagcgcagatataacgcgaacattattgttatgcccgctcttgttcaaggagtgaatgcggcaccgtctatcattaaggcaattgaagaagcaaaccgtcgtaaagaagcagacgtattaattgttggccgcggtggtgggtcaattgaagagctttgggcttttaacgaagaaagcgttgctcgtgcaattttcacttctactattcctgttatttcagcggttggacatgaaaccgattttacaattgcagattttgtagcagatcttcgcgctcctactccaacgggtgctgcggaattggctgtgcctcatatcagtgaaattacagaaagattgactcagcgaaatatccgtcttcttcgttcgatgaaagaaatgcttcagtctagtagccgcaggcttgaacgatcccagaaatcatatgcttttcgttatcctcaaaagttggtcgagcaaaaagagcagcagttagatcagttgatggagcgtttttatcgtgaaggcagaaggtacattgaacataaacggacgaactacgagcagctaacagccgctttgttgcgcaatcaccccgagcatcagttaacgaaagcggcggagcgtcaacagcagctgacgaaaatgctgaccaaagagatgcagcagctgctaaagcaaaaacagcttttatttgcaacggcaacgtcaaaattacatacgcttagtccattaaaaacaatggaaagaggctacagcttagtatacgataaagaaaaagagttaattaaatcaaccaaacaagtatccaaaggcgatgtggtaaacgttcgtttgaccgatggacagttgcagtgtgaagtttcgaaaatagaggagcgatgaaaaatggcgacaaataaagagtatacgtttgaagaggcgatggagcagttagaaaccatcgtaaacaagctagaagaaggcgacgtgcctttagaagaagcaattcaacaattccaagaaggaatgactctttcaaaattctgtcacgatcgtcttcagcatattgaaaagcaaatggaaactattttacgtgaagacggaacgcttgagccattctcggtgcaggaggaagagtgatggtgaatgaaatgaatttaaaagagtatatttcttttacaaaagatcgagtagaaacacgcttgcctgaagtggtaaaagcattacatgctccggttaacttaaaggaatccatgctttactcgcttacggcaggaggaaagcgacttcgcccagtgctgttgtttgcaacgctacatgcgtttggaaaagacgagagcatgggattagaaacagcatgtgcagtggaaatgattcatacatattctctcattcacgatgatttacctagcatggatgatgacgacttaagaagaggtaaaccgacgaatcacaaggtgtacggcgaagcaacggctatattagctggagatgctcttctaacaaatagctttcagctcatttctgaagcggcacatcctgagattacatcacatatgaagcttcagctcattacagaactggtaaaagcaagcggaacagaaggtatgatcagcggacaggttgcggatatggaaggcgaaaaaaagcagctcacgctagacgagcttgaatatattcaccttcacaaaacggggaagctgctagggttttgtgtaaaagcaggagctattctttcaaaagctacgcctctacagcaagaattattagaagaattcagtaagcatgtagggttagcgtttcaaattcaagatgatatcttggatgtggaagggtctgaagaaaaattaggaaagccaattggcagtgatacagaaaatgaaaaaacgacatatccttctttgttaggtatggaagcggccaaagaaaagttacagtatcatgttgaacaagcacttctctcgttacgtcaagctcaaattaagcacggattactagaagaaatttgtttatatatagcaaaacgtgatagttaatgacgatttctgtcaggttttttgagtgatacagtaaaataagattgagtcccaataggggctatgctataataattttactactgtataaaagcgtagtgcataggtttgaaagacatatacaatatcttggtggccgttatcacatttgtgttagcggctattttttcactgttttcctttgaatatcactggtttactgatagaatatcaaaggtattgtaagtaataaggaaatactaaaaattgactatacgtataaaacaatagacaatgtattaaggtaactttataacaagtacgaaagtgagtgatccaccttggatcttacaacgataaaaaatcctgagtttttaaagaaaatgtcagtaacacaattacaagaactaagtgaagagattcgtcgttttttaattacaaagctttctgcaactggtggtcatatagggccgaatttgggggttgttgagttaacgcttgcactccataaagtgttcgacagcccaaaagataaatttttatgggacgtcgggcatcagtcgtatgtccataaaattttaacaggacgagcgggagagtttgatacaatccgtcaatataaagggttatgcggttttccaaagcgtgacgaaagtgagcatgacgtatgggaaacgggacatagttctacatctctttcagccgcaatgggaatggctgctgcaagagatttgcaaaaaacaaaagctcatattgttcctatcattggtgacggagctttaacaggtggtatggctcttgaagcgcttaaccacatcgggcacgagcaaacggatatgaccgttattttaaatgacaatgaaatgtctatcgctcctaacgtgggggctgtacacagtattctaggacgtttgcgcacggcaggcaaatacaactgggtaaaagatgagcttgaagtcttgctgaaaaaagtgcctgcagtaggcggtaagcttgcggcaacggcagaacgtgtaaaagatggcctaaagtatatggtcgtgtcaggcatgttctttgaagaccttggctttacgtatttaggcccggttgacggccatagctatgatgatttattggaaacgttacaatatgcaaagaaaacaaaaggtccggtactgattcacgttattacgaaaaaagggaaagggtacttgccggcggaaagcgataaaagcggagcatggcatggtacaggcccttacaaaattgagtccggtgactttattaaagacaaaaatgttccgattgcttggagtaaactagtaagtgatacggtattgaagatggctagggaagatgatcgcattgtagccgtaacgccggcaatgcctgtgggttcaaaactcgaagcatttcaaaaagagtttccgcatcgcatgtttgatgttgggattgcagagcagcatgcaacaacaatggcagcgggtcttgcaactcaaaatatgaagccctttttagctatttattctacgtttttacagcgtgcatacgatcaagtggttcatgatatttgccgtcagaagctaaatgtatttattgggattgatcgcgctgggctagtaggtgctgatggtgaaacgcatcaaggcgtgtttgatattgcattcttacgtcatttgcctaaccttgttattatgatgccaaaagacgagaatgaaggccagcacatggttcacactgctttgacttatgaagaaggtccgattgctatgcgctatgctagaggaaacggattaggtgttgaactagattcagaactgaaaaacattccgatcggtacatgggacgtattaaaagaaggttcagatacaaccattttaacgtttggtacaacgatttcaatggcgatggatgcagcagcagaacttgagaagcaaggaatcagcgtcaaagtggtaaatgctcgttttattaaaccgctggatgaaaaaatgcttcatgagattttccaaactagtaagcctgtgattacggtagaagaagcggtacttcaaggcggttttggaagcgcggtgttagagtttgcatcagagcacggctattatgatacgcgcgttgaacgtatggggattccagatcgctttatcgagcacggcagcgtaacaaaacttttagaagaaattggcttaaccaaagaagagattataaatcgagttaaaaaactcgtaacaccaacacaaaagaggcttgaagttaagtgacaaaaaaagaacgagtagatgtattattagtagaacgaggtttgattgaaacaagagaaaaagcaaagcgtacagtgatggcaggacttgtttatgcgaatgaagtccgtttggataagccgggagagaaaattgaacgcgatacgccgctgacaattaaaggtgcagtgatgccttacgtcagcagaggcggctttaagcttgaaaaagcgattaaagaatttaatgtccatgtagcggataaaatcatgattgatattggttcttctactggaggctttactgattgtgcgcttcaaaatggagcgaagatgtcctatgcgctagacgtaggctataatcagctagcttggaagcttcgtcaagatgaacgagtagaagtaatggaacgaacaaatttccgttatgtgacgccagctgatttatcaagaggcttgcctgaattcgcttctattgatgtatcatttatttccttaagactcattcttcctgtgttaaaaacacttcttgttccacacagcgatgttgttgcgctcgttaagccacagtttgaggctggaagagagcaagttgggaaaaaaggaatcgtgcgtgattcaaaagtgcatgaagaagttcttcaaggcatggtggatttctcgcttcgtcaaggatacgatgtatataacatgtcgtattcaccgataacgggaggagatggaaatatcgaatttcttctccacctgggctggaaaggcgagcgtgaacttggtgaaaatcaagctccgcttactgtgcgcgaagtagtcgaagaagcacataagacgttaaaagagaaaaagtaataatggccaatgttaagcaaagacttagcattggcgatttgattatgactctttatacaaaaggtgcataatcaagttgaacacattatgatacttaattagtgaaagacttataaacaacaaaacaaaaagaagattacatattaatgtgaggtgccaacatgaataaagggcaaagacatattaaaattcgtgatattatcacgaataatgatattgaaacacaggatgaattggtagatattttaaaaaaccaaggttttaatgtaacacaggcaacaatctctcgtgatattaaagaactgcacttagtcaaagtgcctttgatggacggtcgatacaaatacagcttgcctgcagatcagcgttttaatcccttacaaaagttaaagcgctctcttatggacgcatttgtaaaaattgattcagccgggcatatgttggtgatgaaaacattaccgggaaatgcaaatgcgattggcgcattaattgatcatttggactgggatgaaatattaggaacaatttgtggagacgatacatgtttgattatttgccgtactcctgaagatacgcaaattatatcagaccgattcttagaaatgttataaaggtgagtgaagcaggttgttagctgaattatccattaaaaactttgcgattattgatgaactttctgtttcatttgaaaaaggcttaacggtattaacaggcgaaacaggagcggggaaatcgattattattgatgccatttcattgttagtaggtggaagaggctcttcggagtttgtacgccacggaacagacagagccgaaattgaaggacttttcttatttgatgaagaacagcatccgagtcacgaaaaagccaaacaagtcggtttggaagtggaagatggaatgattgtgcttcgccgagatatcactacaaatgggaaaagtatttgccgcatcaacggtaagctcgtaacgttagctatcctacgtgaagtcggacagacgttaattgatatacacggacagcacgagcaccaagatttaatgaatcaagatcgtcacttaactcttcttgatcaatatggaggagaaaaagtagaagaggctttaacggagtatcgagaggtattttctaggtatacatcgctaaaaaagcagctcgatcaattaactgaaaatgaacagcagatggcacatcgcctcgatcttattcaatttcaattagatgaaatcaaagcggcaaatttgcagctgaacgaagacgaggaactaaatgaagagcgtttgaagatttctaactttgaaaagatctatacgtcgctaaacgatgcctacaatgcgctgcacggtgaacatcaaggtttagattgggtgggcgtagcaatgaatcatacggaggatatttcgtcactggaaaaaaactatgccgaaatttctgagatcatttcatcgagcttctatcagctagaagacgcatcttataaaattcgtcagcagcttgatttattagaatttgatcccaaacgcttagactttattgaagcgcgtttaaatgaaattaatcacttaaagcgtaaatacggtcaaagtgtagatgaaattctagaatatgcagcgcaaattgaagatgaaattgatcgtattgaaaatcgagatacgcatgtgagcaagatcaaagaagagttaaacagtgtagcacaggatttattagtagaagctaataacgtttcagctattcgaaaaaaacttgctcaagagttaacggacagcatccatcatgagcttcaagaattgtatatggctaagaccgtatttcaaattaaattctctggtgtaaatgcaggtaaaaatgacgttgaattaaatggagaaagaataaaattcaccaaagacggcattgacaacgtagaattttatatttctaccaatcctggtgaacctttaaagcctcttgcaaaagtagcatcaggaggagaactgtcaagaattatgctggcgttaaaaagcatcttctctaagcatcaaggcgtgacgtccattatctttgatgaagttgatacaggcgtaagtggaagagtagctcaatcgatcggtgaaaaaatacatgctatttctgttgattcacaagttctctgtatatctcatctgcctcaggtagcagcgatggcagatactcatctctttattgctaaagagataaaaggtgatcgtacaacgacgtctgttcttccattaactgttgatgaaaaagtaaaagaaattggtcgaatgattgcaggagctgaaattacaagcttaacgaaggaacatgccaaagagcttttagatttagcggataagatgaagcacaccatttaaaaaaacaccttttaacacgtaacagtatgtgttaaaggtgtttttttatacaaaatggaggaactgaaaatgtttccttgcacttcttttcatttttctctgaacttctgttataaatgcgctctaagaaggctaaattaaatgtgtagccatttaggcgaggaagcgaggagagtgaaaacatgcaaaatcgatacagacatataattggtgcgattctccttgtttcgttcatttttgtaggatttattccagttgtgcaacaatatatacacattccaaaacaaatcgtcttatttgaacagcaaaaagaaaaaattaatacgacattaccgcttagcgtagaagcttcatcacctgtttacgatgtaacaagtaacaaggcgaagctgaccatagcaggaaaccaggtaggcaaagaagagttgatgcttcatttggccggtattcctgtaaagcgtgtagacgtgcaggtattatctgattttaaagtcattccaggtggacaatcaatcggtgtgaaattaaattcaaaaggtgttcttgttgtaggctatcatcaggtagatacagcaaaaggtaaaaaatctcctggcgaaattgcgggtattcaagttggagatatgattacgaagattaatggtaaaaccattgagaaaatgagtgatattacaccgtttattcagcaggcaggaaaaacgggtgaaccattaaatctgcatattttaagagaaaaaaagcagtttgacaccaagctgtatccgttaaaagataagcaagattatgcttatagaatcggtttatacatccgtgattcagctgcaggaattggcacaatgactttttatgatccaaaatctaaaaaatacggcgctttaggccatgttatttcggatatggatacaaaaaagccaatcgtagtagaagatggacaaattgtccgttcgaccgttacatcaattgaaaaaggttctaacggcgttcccggcgaaaagctagcaaggttttctgaagatagacaaatcattggaaatattacacgaaatagtccttttggtatttttggaaaattgtcttcaacgatggaaaacggaataatggataaagcaatgccaattgccctatctcatcaagtaaaagaaggaccggctaaaattctaacggtagtagatgatgatcaagtggaagaatttgatattgaaattatgagtactatacctcaaaagtttccggctactaaaggaatggttattaaaattacagatcctaaattgctaaagaaaacaggtggaattgttcaaggaatgagcgggagcccgattattcaaaacggtaaagtcgttggagcggttacccatgtttttgtaaatgatcctacctcgggttacggtgtccatattgaatggatgcttaacgaagcaggaatcgatatttataaaaataatcgaaaaaaagcgagctaatgttgtcattagttcgctttttttgataaaaattattgtcgtaaatgtaagagaaaaacgtcgaaaaacaaagaaaataagagaaaatcgaataaattccatttaaaagacttttttctaaaaaaataaaggaaataatgttgcattgtcgaatttgtcctttagaataaagaatagagacacgtaggaaacgacgtataacatacaggactgaggaggaagctgcattgaaaaaaattaaagtatgcttggttgatgataatcgggaactaattggtttgcttgaagattatatttcagagcaagaagacatggaagtaatcggagtagcttacaatggacaagagtgtttatccattttaaaagataaagatccggatgttcttgtattagacattattatgccgcatctagatggattagcagttttaggtcagttaaaagaaatgaaaaaagaaaattatccaaatgtcattatgctaacagcatttgggcaagaagacgtaacgaaaaaagcggttgatttaggagctgcttattttattctaaagccgtttgatatggaaaacttagtgaatcatattcgtcaagttagcggacaaacatcttcatttatgcaacgttcatcttcttccatgcgttcacatcgcgacagcaaaccagcaaatttagatgcaagcattacgagcatcattcacgaaattggtgtacctgctcatatcaaaggctatttgtatttgagagaagccatttcaatggtatataaggatattgagttgcttgggtcgattacaaaagtactgtatcctgatattgcaaaaaaatataatacaacggcaagccgcgttgagcgcgccattcgtcatgccattgaagtagcatggagccgaggaaacattgattccatttcttcattattcggatatactgtcagcatgtcaaaagcgaagccgacaaatagtgaatttatcgccatggttgcggataaattacgccttgaacataaagcgagttgaaagggataggactgctggaattacggggttttgagtgagctgataccttttgtaatacagagtacatgccgataaacttttggaatttacactagatagtaaactgaaaaccaataaactttttaatgcagggccaatgaattttaatcattcattggtctttttattttgttttaagaggtgaaaatattgaggttaatggaacgtgcatcttgtttttcttcatatccatagtggtttattttattgaaataatttatttaattgttatgagggttttgtacttgaaaaaagatttagaagatgcattaaaaaatttatctccatattttaaatgggatatggataagtaaattataaaaaaagcagccttcagaaaaggctgctttttttaatccattaatttagcaatcggttttgaaaggaacagaacaataattccaagtacaattgttacagctccgattaagctgaagatatcgaagtaacctaaagactgtgtataagatgcaagaacacccgctagcttattagcaacagcagagcttgccatccatacgcccattaaaagagaagcaagctttaatggagctagtctacttaccatagacaaccctactggcgaaatcataagctcagctagcgtgtgcaggaagtaagtgaaaatcatgaacaggatatttacttttaaagctgggtcattaccagtatacataacggctggaatcaaaattaagaatcctaatccgactgttacaagtcccatacccatttttgttggcgttttgaaatcaccgcgttttgaatttcctagcttgtaccaaactagcgacataattggtgctaaaatcatgataaacagcggattcaatgattggaaccactctgttggaaccgtgaaactacctatttgacgattaatttgatcttgagcatatagcgttaaagaacttccggcctgttcaaaagctgtccagaaagcaataacaacgaaggctagaataacgatagcaaccgttcttttcttttctcgtgctgtcagcggagcagttgatgtttgagatgccgctgcgtgaacttttcctgtaggctctttcccgatatcacctaagtagcgattagccagtaggttaaataaaatttgtccaacaaccattccgatagctgctgttaaaaatccgtatttgtaactcattaatccaacaactaacggtgcgaaaaatgcaccaaagttaatacccatataaaaaatggtaaaagcaccgtcacggcgaggatcattttcttcatacagatctccgaccaatgtggagatatttggtttgaaaaatccgtttccgataattaataaagcaagtccgatatacaaagcggctacgctttgatgaataaagatggaaaaattcccgagtgccataatcacaccaccgatagtaatggctagccttcttccgaggaagcggtctgttaaatatccgccaatcatcggcgtaatgtaaacagcactagtgaatgttccatataagctcagtgcagttgctttatctaccccgagtccaccttgagcagcggtagcagttaaataaagaaccagaatggctctcattccataataactaaatctttcccatgcctcagtagcgaataataagtacagtccaggagggtgttttttcctagactcatttggctgctgattttcgtgttgtacagctgcttgtataatgaagtccccctaaaatt

SEQ ID NO: 3 - DNA, 247394 bp, Priestia aryabhattai
  source 1..247394: mol_type = genomic DNA
ggcaaagcccatgtgctttttggttcataaacttagttagattttaatttttcaagctctactaagaatttgttgttaagaactttaatgtaagttcctttcattcctaaagaacgtgattcgataacgccagcactttctaatttacgtagcgcatttacgattactgaacgtgtaattccaacgcggtcagcaattttacttgctactaatagtccttcatttccatttaactcttcaaagatgtgctcaatagcttctaactcactgtatgataatgagctaattgccatttgtacaacagctttgctacgcgcttcttcttcaatttcttctgctttttcacgcagaatttccatacctactaccgttgcaccgtattcagcaaggattaaatcatcgtcttcgaactgacggtctaaacgagatagtacaagcgtacctagacgctctccgcctccgataattggaacgattgttgttagtcctgcatcaaataagtctttattttcaactgggaaagctgtatattgactttcaatgtttaagttagaagatgtttcttgaatgttaaataggctttgagtatattcttctgggaactggcgtgcttctaacatgtctttcatacgcgcattctcaatttgctgtttaacagcgattcctaataatttaccgcgacggcttactacgaatacgtttgattcgatcacttcgcaaagtgtttcagccatttctttaaagtttactggtttaccagctgctttttgtagcattgcattaatctttctagttttccctaataaatccattagtactcttcctcctgcgatttcagttctataaaataaattgactcaaatctttgtttttagcgattttttctaatttttcttccacgtactgcggagtaatcacaattttctctaatgttacttctggtgcttcaaacgataaatcctctagcaaacgttctaaaatcgtatgaagccttcttgcaccaatattgtctgtatcttgatttacctgatatgcaatttctgcaatcttacgtatagcatcgtcagaaaattcaatttgtataccttcagtttccaataatgccgcatattgctttaataacgcattatctggctctactaaaatgtttataaaatcttcaacggttagcttcgttaattcaacgcgaattgggaatcgaccttgcaattctggaattaaatccgacggttttgatacatggaaagcaccggctgctacaaataaaacatgatcagttttgactgcgccatattttgtaacaatcgttgatccttctacaattggtaaaatatctcgctgcacgccttcacgtgaaacatcagcggaagatgaattaccacttttctgagcaattttatcaatttcgtcaatgaaaataattccgtattgttctgcacgattcacagcttcttgcgtcacttcatccatatcaatcaatttttgcgcttcttcatttgttaatacttttcgtgcatctttaacagtaagcttgcgctttttttgttttttaggcataaaattacttaaggcatcctgcatgttcatgcccatttgttccatacccgaaccttgtaacatatcaaacatagaaggctgttgctcttctacttcaattgtgacataatgattttcaagctctcctaaagcaagctgatgagcaatctgcttgcgcttcgttgcaatattcgtttcctcatcttgatcaggatccgcatcgcttgactgtgtaccgtttgaaaaaatcatttcaaacggatttttaaacgattgctgcttctttttgcttggaacaagaagctctactatccgcttgtttgcattttcttctgcgcgatcacgcacgccgttcattttttcttctttcacaagtcgaactgacgtttccactaaatcacgaaccattgattctacatcgcgtcctacatatccaacttccgtaaattttgttgcctcaaccttaataaaaggtgcaccgacaagcttagctaagcggcgtgcaatctcggttttacccacacctgtaggaccaatcattaaaatgtttttcggcacaacttcatcacgtaaagattcgtctagcagaccgcgtcgatagcgatttcgcagcgcaacagcgaccgctttctttgccttcgtttgaccaataatatactgatcgagcttttctacaatttgtcgaggtgttaaatgagaattcataaaaaaatcccctttcctacagttcttctacaataatatgatcatttgtataaacacatatctcacttgctacatctaaagctgcttttgcaatttctttagctgttaaatgttcgcctgcatgttgttttaatgcacgtcccgctgataaagcataatttccgcctgatccaattgctaaaatgccgtcgtccggttcaataacttcacccgttcctgatactaacagtaagttatctttgttcataacaataagcattgcttctaactttcgcaatactttgtcacttctccattgtttagcaagctcaacggctgcacgctgaagatttccgttatactcttcaagcttcgtttcaaataattcaaaaagagtgaatgcatcagctactgaacctgcaaagccggcaagaacttgcccttgaaatagacgtcttacttttcgagcagtatgtttcatcacaacagcatttccgaacgttacttgtccgtccccagacatggcacattgaccgttatgctgaaccgcaaaaatcgtagtagcatggaaagtagacaaattaactcctccttttatgcgcgaggatggtgattcatataaactgcctttaaacgatccttcgtcacatgtgtgtatatttgagtggttgataaatgttcatgacctagcatttcttgaactgtacgtaaatctgccccttcatttaacatatgagtcgcaaaagtatgccgcaaaacgtgtggactaatatgtatattctcagcggtcttctttactaactgatcaatgactaagcgtatgcctcggtctgtcaacggtgtccccttataatttaaaaagagcgaatgagtatcagaaggagccttttttaaaagaagctttcttccattatctatatatactctaagagcgaccttggcataacagccaaatggcacgtaccgttgttttttccctttgccatatacgagcaaagtttgaagtgaaaaatctatatcgctaagcttaatagatgcacattcactcactcgtattccggtggcatacagcaattctaatagagactgattacgctgccctaacggagttgttaagtcattcatttgaaataatttcacaatctcctcttcatacaggaagcgaggatttcgctcttcctttttaggaagggtaacgagcgcaaatggattatcttctactaattcttctctatttaagtaacgataaaacgttctcaaacaagaaattttgcgtgacatcgatctttttgaatactgcttttcatataggcgtgttaaaaacagccttgcatcagcatatgtaacactttgtaggttttgtatttgctcttcctgcataaaagacatgaagatacctatgtctttttcatagcagtcaactgtatattttgaatagtttttctcaatttgtaaatattctagaaaggaatttaatacatctttaacaaattccaatgttatcacctcacaagggctactaaatattatcacaattaagtagcccttgcaaacaattttgattattttgttgtaaaattctgaatagtttccaatgctcttttagcaagcgtttcatttcgttcttgtttgtttttgattcgcacttccaattctttgaataagccaaagttggcattcatcggctggaagtttttagcgcttgtatgtgtgatatagtgagccatactgccaatcgccgtttcctgcggcaatacaaccaattcttcaccaagtacaagtcgagctgcgttcattcctgccattaatccgctcgccgctgattctacatatccttctactcccgtcatttgtccagcaaagaataagtcatcacgctcacgatattgatacgtaggctttaacaatttaggagaattaataaacgtatttctatgcataactccgtagcgtactacttctgcattttctaaacctgggattaagcttaatacttctttttgtgctccccattttaaatgtgtttggaaacctacgatattatatagtgtacctgctgcatcatcttgacgaagctgaacaactgcataaggtcgctttcctgttttcggatcttctaacccaactggtttcattggtccaaagagcattgttttttctccgcgtgaagccattacttcaattggcatacatccttcaaaataaatttctttctcaaattcttttaaaggaaccgtctctgcattgattaatgcttcatgaaaacgctggaattcttcttttgtcatcggacagtttaaataggcagcttcccctttgtcatagcgagatttaagatatactttatccatatcaatgctgtctttttcaataataggtgcagccgcatcgtaaaaatataaataatcttcacttgttaacgcacgcagcttttctgataaatcttttgacgttaacggacctgttgcaataacagttggtccttgtggaatttccgtaatctcttcattaacaaccgttacgtttggatggtttttaacgctttccgtcacacgagcggcaaattcgtgacggtcaacagccagtgctccacctgctggaaccgcacactcgtctgctgaacgaataattacagagtctaataatcgcatttcttcttttaacacaccaactgcatttgttaatgtattcgcacgcagtgaattactacatactaattcagcaaatttgtccgtatgatgagcaggtgtttgctttactggtctcatctcataaagacggactttcaaaccgcgctttgcgatttgccaagccgcttcacttccagcaagacctgctccgataacattaattacttgttcattcattgtaaatcctccaacttcatttctatcttttctatcattttccttattcattcacttgtcttttccttttttaacgggacaaagaaaatgcgacattactcaatgtcgctaataacgtttccattttagcacatgaagcaatgtcgccgcatcttatataactgctatttctaaatttaaagtgtgggaattcatcccattctcttttactgctgagcttcctctttataatcacaacttgtacagacgacttgagttccttttttctgtttcttctccacaagcagattttcacatttcggacattttcttgcaatcggcttatcccaagatacgaagtcacagcccgggaatcgatcacagccataaaatgtacgctttttcttcgattttcgctcaacgatatttccttcttcacatttcggacactttacaccaatctcttttacaattggttttgtgttgcggcagtcagggaaattagagcatgccataaattttccgtagcgtcccattttgtataccataggtgaaccgcattcttcacaatcttctccggcaggttcatctttaatctccacttcgcgcatttctttttcagcatgttctaagcgtttttcaaaatcactgtaaaattcgtcaataacacgcacccattgaacattaccatcttccacttcatccaaatcgttttccattttagctgtaaactctacatctaaaatttccgggaaaaactccaatacaagctctagtacaatttctccaagttctgttggaacaaaacgcttgttatcgagcgctacgtacccgcgcttttgaatcgtgtcaagtgttggagcatatgtagacggtcggccaatgcctagctcttctaatgtcttgactaaacgagcttcagtatatcttggcggcggctgtgtgaagtgctgcttttcatcgatgtccttagaataagctacttctccttcttctaagtctggaagaaggttttctttttcctccacttgatcatcattgccttcaacatacactttcataaagcctggaaatttaactttcgagccgtttgctctaaatgttacgtctccatttttcaaatctacagccattgtatccataattgcaggtgccatttgactagcaacgaagcgctcccatactagcttatacagtcgatactgatcacgcgataagaactcttttacctctcctggtttacgaagagctgaagttggacgaatcgcttcgtgggcatcttgcgcgttcgaatttttcttttctttacgcttttccgttgccacaaactgatttccgtatgcgttcgtaatgtaatctctagcttctgtttgagctgtttctgaaatacgagtagaatcggtacgcatatacgtgataagacctactgtaccttcttttcccaaatcaattccttcatataattgctgcgcaatcatcattgtttttttcgctcggaagttcagtttccgcgctgcctcttgctgtaatgaagacgtggtaaaagaaggagccgcattacgctttcgctcacgttttgttactttagaaattgaaaattcatttccatctaattgtttaacaatgttggttacatcattttcattcgatagctctacttttttcccttgatattcgatcaactggccttcaaattggtcgttccctttttgaaaagttgcttttaccgtccagtattcttctgggataaactttgcaatttctttttcacgatcaataattaaccgcactgcaattgattgaacccttccggcacttaatcctttttttacttttttccacagcaatggactgatgttgtagccaaccagcctgtcaagaatacggcgtgcttgttgagcatctactaaatccatattaattgctcgtggatgtttaaaagattccttaatcgcttcttttgtaatctcgttaaatactacgcgacagtccgatgcaatgtctacatccaaactgtgcgccaagtgccatgcaatcgcttctccttcacggtctggatcggctgctaggtaaatcttttttgcttttttagccgctgtttttagttcttttaaaaccgggcctttcccgcgaattgtaatatatttcggattgtaatcctgttcaatatcaattcccatttgacttttaggtaaatcgcgaacatgtcccatcgatgcttttactttatatttctttcctaaataacgttcaattgttttagcctttgcaggcgattctacaattactaggtagtcagacatctatttgttcctcctcaagaggtagaataaaatcttcattattattaaatatttggttcttgtttgtcaaatgtccaaaagataagtcgtacgattttactacgtatctcactagtatttcataccatgcaagaatatgactactttgaaacattcatcttatatacatcatttcatctgtaatatcagcagcgctttgcacaagttttgcccctaattggattaacttattcgttccacatgatgtttcttcaaaaatagaacccggtatggcaaatacttctcttccttgctgaagcgcctggtcggcggtaataaaagatccacttctttcttttgcttgcaccaccaacgtgcctcctgttaatccgctaatgattctgtttctgcgagggaaaaaccatttcgtcggcttcataaacggggcatattcagaaagcagcaaatgatgctgcgcaatttctcttgctaaattttggtttcctcttgggtaaatattataaaaccctccgcctaaaactgcaatcgttttagctttttcagcgatagccagttcatgagcagcctggtcaatccctaaggctagtccacttacaacgacaaattcttcatgcagcatcggcttaacaatatgagtcagagctgcagttccatatgaagtgggattccttgttcctacaatgcttaagctttctggagcgtgtagaagagaaacctttcctcttgcaaataatacccaaggcggatcataaatatggcgcaaaagttcaggatattcatcatctaggatggtgacacattgaatattctcagcgtcatatttatctagaatatctcgtattggaatagtttgcaaatctttttttatttgattagcacgttcaatcgagagagtcaatagtttttgaagctgtgatggagagtactcgtagagattttgtaatgaagaattctgttgaagtagcgtaaaaatttgtttccaattaacagatggacaatgtgctaaatgaattaatttttcccgtaaatcagacattctacaatctcctttttaaatggacaaaatagcccccggtcaaaggaggctatatgtcttctattaatgagtcttacactgctcgtaaatgccttgttcttttaacactttaataagtgtttctcccataacagatggtgtttcagctacttggataccgcactcattcattgttttaattttttcagacgctgtccctttaccacctgaaataatagcaccagcatggcccatacgttttcctggaggtgctgtttgaccgccaatgaagccgaccacaggttttgtcatatttgcttttacccattctgccgcttcttcttctgccgtaccgccgatttcaccaatcataattactgcatacgtatcttcatcttcattaaacgcttttaatacatcgataaagttcgtgccgttcactgggtcaccaccgataccaacagctgttgattggccaatgccagcttcagaaagttgatgaacagcttcatatgttaatgtaccagaacgtgaaactacacctacatgaccttttttgtgaatgtaccctggcataattccaattttacattcttccggtgtaataacacctgggcagttaggtcctacaaggcgcgtacgttttccttccatataacgctttacttttaccatatctaatactggaataccttccgtaatacaaataactaaatctaaatctgcgtcaactgcttcaataatggagtcagctgcgaatgctggcggaacatatacaacagaagccgttgcgcctgttttttcttttgcctcggcaaccgtattaaataccggaacaccttctacttctaagccgcctttacctggcgttacgccaccaacaatttttgttccgtattctaacatttgctgtgtatgaaaaaggccaactccgcctgtaattccttgtacaattacttttgtatcttgattaataaatacgctcattcctatcccccagcctttctatttcactagtgaaacgattttttgtgcgccgtctgccatagattcagcagctgtgatatttaagcctgatttttgtaaaatttcttttccaagttcaacgtttgttccttctaagcgaacaactaatggaagacttaatccaacttgtttcgttgcttcaacaacacctgttgcaataacatcacatttcataatcccgccgaaaatattaacgaaaataccttttacattttggtcagataaaataattttgaatgcttctgttactttttcagcagttgcgccgcccccaacatccaggaagttagcagggtcgcctccgtaatgtttaataatatccatcgttgccattgctaaacctgcaccgtttaccatacaaccgatattaccgtctagtgaaatgtagcttaagtcgtatttagatgcttcaatttctttagcatcttcctcttcaaggtcacgatattcaagaatatctttttgacgatacagcgcatttgaatcaaagtttaacttcgcatccaatgccataacgtccccgtcacctgttacaactagaggattaatctctgcgattgagcagtctttttcaacaaatactgtatataaacctgtcatgaatttaactgcttttccaactaattcttttggaatattaatattaaatgcaagtctgcgagcttggaatgcttgtaaaccaatcgcaggatctacatattctttaaagattttttcaggcgttttttccgccacttcttcaatttcagttccaccttcttcagaacccatcaatacaacttgagacgttgcacgatcaagaactaaaccgatgtagtattctttcttaatatcgcatccctcttcaactaacaagcgcttaacttcttttccttcagggcctgtttggtgcgttacgagggtctttcctaaaatatcttgtgcatatgtacgaacttcatctaagttttttgctactttgacaccgcccgctttaccgcgtccaccagcatggatttgtgctttcaccactgatacttgtgaacctaattcctttgctgcttcaactgcttcttcaacagtaaaagctactcgaccgtttggtactgcaaccccgtattttctgagtagttcttttccttgatactcatggatattcatttcccatcctcctaacataatcaaccacaaaactatactgcacaaaatagactgcgctttcattgtataaaaataattgtctaattgtctactattctagtgaaaaatattgaaataataagaaaattgatatttttatggagatagtacttaactataccttatgaagtcgatgaggctctgcggacgttaaacgtgtggttgatcatgtaaatcaaccttcacaactaaagcaaactgagaggtaaataatttacgaactccaccctctgcaatatctccacttaaataggctatattctttttgaacctaaaataccgcatgtgaaacatgcgctaaaaagcagagatatgctcgggtatcatgttctagtttacttggttttttatcggtgcaaaagatcggcggtgttctggcaaaattccatattgttcgattgcttctaaatgttgttttgttccatatcccatatgtttttcgaatccgtatgcaggatagcgttcaccaagttctttcatcattcgatctcgcgtcacttttgcaataacggaacttgcagcaatcgaaatgcttgtagcatcgcctttgatgattgactgctgcgaaataggcaccgacagcttcatcgcatcaataagcagttcatcaggctgaacagctagaagttcaattgcttcagtcattgccttttttgttgcttcataaatattaatagaatcaatgacctctgcgcctataatacctataccgatagcgacagcgcttttacaaatttcttcataaaacgcttctcgctttgcctctgataacttctttgaatctgtcagaccggggagaaaaaaatccggaggcaaaataacagcagccgctactaccggtcctgctaacggtcctcttcctacttcatctactccggcaatataggttgctccttgattgtataattcgttttcatatgccatcatttcatcaaattgtttcttcaagcgctcagcggcttcaaattgcctttgtttttgaataataacctgctgcacacctttacgctcatcttgcgcatatgccttaaataaagcatcttccgggcttctcacttgctttagttcttcttttatttccttaatactttttttcattagctccaccttctttatatcaacattttcacacggcacctttacataaaaaacgcctcatgctaaaaaggcagaggcgttttttgtttcagttcgcaatgtattgcttacagctgctgttcagcttcacttggatcatcaaatgtaaaggtgccaattttatccgttcgaatttctcgaagaacaagctcagctgttttatcgtaatccaccatgccgccacccattaaacagccgcggcgcgacccaattgcatcaaaaagctctacaatatcttcagggatttcatttaaatcataacgctgctttagttgttctgggtaatggctagataagaagcgcagcgcataaacagcgacatcttgcatatttaaaatggtatctttgatagcacccgttgtcgcaagcttatatccaactgtttcatcttcaaacttaggccacaaaatacctggcgtatcaagtagctccagctcatttcctaccttaatccactgctgtgcttgcgtcacacctggacgatctccggtcttggcgatttttttgctggcaaggcgattaatcagcgttgatttaccgacgttaggaatccctacaatcatcgctcggatggcgcggggttttttgactccttttgcgcgcatgcggtcaaacttctcttgaagaagttctttggaagacgaaacaatttgtttcattcctttacctgcttgtgcatcaatagctaaggcataaataccttgttgtttataataatctagccactgctgagtaacgcgcggatcagctttgtccactttattcagcaatacgattctcggcttgttcacgataatctcatcaatcattggatttcgcgatgattgcggaatgcgtgcatcaaccagttcgtatacaatatcaatcaattttagcttttcagttacttgtcttctggccttggccatatgaccaggaaaccattgaattgtcatattttactcaccttttatattttactttgcaaaacgcgcttctttaatcggccagtatacggcactcgttttaccaagcaccttgtccatgctcacaaagccaatctgacggctgtctttactgtagcgtcgattgtctcccatcacgaacaaatagccttctggcacggtctttttacccgttacgtcttctagtttaaaatcttcggttaaattaccgtcaatcacttcttttttatactgatctaagtagggctctttataagcttttccatttacatatagcgtatcatttcgatactcaatatgatcacccggcagtccgataatacgttttatgtaatctttttccgctgtagcatgaaaaacaataatatcaaagcgatcaggatcaccaatcttataggagaacttatttacaatcattcgattttggtcatgcagcgtaggcatcatagaaagtccatctactacaatcggtgcaaacaaaaaatagcgaattacaacagctaacagtacggcaatggcgattgcttttatccattcccacagttcatttttctttcgagccatcttcagtcctccaactcttatgtcatacctttattttaaacgataatgtttgaaacgcctaataaataaatagaataaaaaaatgatgacttgtacgtctattttttactgtcagagaacgaatcgttctaaaaaaacatttgaaaaaaggagcttgtataaacaagctcccctttactattatcgaatttctttaatacgcgcagctttaccacgtaattcacgtaggtaataaagtttcgcacggcgtactttaccgcggcgcattacttcgatttttgcaatttttggcgtatgaagtgggaatgtacgctctacacctacaccgtaagaaatcttacgtactgtaaatgtttcgctgataccaccgccacgacgcttaataacaacaccttcaaatacctgaacacgttcacgagtaccctcaacgatatttacgtgtacacgtacagtatcaccaggacggaacgtaggaagatctgtttttaattgttcttttgtaatctcttcgattaatttttgcatcgcgtgtttcaactccttccaacagacgctcataccaatgcttttcaatcattgcagcggaacatcgttataggtgaccagacatctgcccaagccacaaaatctatcttagcacactcttataccgtatgcaacagagtttatgcataaattttatggatttatgaaaggtggttttcctcttttaattgagctactagtttcttttgctcttccgttagctccatcttttcaagcatatccggtcttcgaagcaacgtgcgctttaaagactctttttggcgccactgttcaatttttttatgatttcctgacataagtacttcaggaactgttaagcctctaaaatcagcaggacgcgtatagtgggggtgctctagtaaacctgtactgtgtgagtcctgtacagctgaatgattattgccaagcacatcgggaagcagacgaacaacgctatcgatcacaaccattgcaccaagctctcctccagttaatacatagtcaccaattgaaatttcatcagttaccagctgctcacgaattcgttcatcatatccttcgtaatgaccgcaaatgaaaattaaatgctcttctgctgctagctcttctgcttttgcctgcgtataacgttcgccctgcggacaaagtaaaactacccggggcttcttagctgtttcagtcagcttttctacagcgtcaaaaataggctgcggcgtcaataccattccagcacctccgccgtaaggataatcgtccacattttgatgtttgttcgtagaatattctcggaaattaaccacattcagttcaaccgcatttttttcctgtgcttttttcaaaattgattcaccaaaaacaccgtcaaacatagaaggaaatagcgacagtacatcaattttcattagtccaataacccttccattaccgtaataacaatctctttttcatctatatcaatagattgtacaacgtcgtcgatgtaaggaataagaacttcttttccgccttttttaacaacccacacatcattagctcccggcgttaaaatttctttgaccgttcctacctctactccgtcttctgtttttactgtacagccaataatttcatggaaatagaattcaccgtcttctaaatccgttagctgctcctcagggattttcacttcgcagtttttgtaatgctcgacatcatttacgttgtgatagccttcgaatgtaagcagatcaaaatttttatgcctgcgatggcttgctaccgttacttctaccggctcgctttgcttctctttgaagatataaagtttatttcctttttcatagcgctcatcagcaaaatccgtagttgatacaatacgaacttctccttttacaccatgggtattcacaatttttccaaccttaaaccatttcatgcttcttcacctctatctaatctcaacaactttgctatcttttataataattgttttactttcttttatcttttcccaatcatcgccgatttttacctctactaaggcatccagttctgtttcaacgagttcgctccctaaaggaagcttttctaattgcgtcagctgaaagttcaacacttcaattttttcaaggcgagcggatttttctttttcaaactgactatgtaataaagaagaacctttattggctttttccatgtgctttaactgaaatttcagctgttccatttctttttcaagcgcctgcttgcggtttataaaacgattttcaagatcttgtttgcttgcttcagttaacacttgtttcacaaccactttttgaataatgttcaaaacgttccctccgccctcaagatagtgaccttgtgctttttacatgcatattgaaatagctgcctcttgctcgcaaaagacttactgtgatcaaaacgttcatcttatcataacataaaaaaagggcgaggttatccctctccctttttgattactcttgaattttcacatacacttttttaccttgctgtaatgctgctgcattcacaacagttcgaatcgcttttgcaacgcggccttgtttgccgattactttgccgacatcttcttggtgaacagtaaggatgtacgtcacttgacgttcatcttcttgctcctccactttaacatcagctggataatcaacaagcggctttacaattgtttcgattagtgatgtcatctcgagtgaaattattttcctaatttagcattatggaatttttccatgatgccttcgttagagaaaaggttacgaactgtatcagatggtttagcaccattttgtaaccatttaagagctagctcttcatcgattttaacttcagctggttgaactacaggattgtaagttccaactacttcgatgtaacgtccatcacgtggtgaacgagagtctgctgctacgatacgatagaaaggagattttttagctcccatacgttttaaacgaatttttactgccattttataaagcacctccgaatatgtttcaacaagataatataatatcaaataggtaaaatgtttgtaaaggtttttttcttaacactagaaaaatattttattttctttggtttttcagtccaaatcaagcgttttatcatgaaaagaatggaagtttcataccctttttcttgccttttgacatatttgtcatttgtttcatcatttttttcatgtcttcaaattgtttaagcaaacggtttacttcttgtacagaacgcccgcttccttttgcaatacgctttcttcgacttgcattaatgatttcagggtttgttttttccgctttcgtcatagaacgaatgattgcttctacatgattaatttgcttttcatcaacctgcaggtttttgagcccctttactttattggcgcccggaagcataccaattagctcatcaagcggtcccatttgacgcacctgagcaagttgatctaaaaagtcatcaaatgtaaatgactgcgtgcgcagcttagcttcaagctcttttgctttttcagcatctacatttgcctgagccttttcgataagcgtcagcacatcacccatacctaagatacgggaagccatacgctctggatggaatgcttcaatagcatccattttttctccaagaccgacaaacttaattggtgtatcggttactgcacgaatagaaagcgctgcaccaccgcgcgtatcgccgtctagtttcgttaatacaactccagttaatcctaattgcttattaaagctatccgcaacgtttaccgcatcttgacccgtcatcgcatcgacaacaaggaaaatttcgtctgggttagaaagctctttgatctgttctaactcttccattagattttcatccacatgcaaacgtcccgctgtatcaattaatacataatcgtgatgctcttctttcgcatgagcaatagcttgtttcgcaatctccacaggacttacttgatcacctaatgaaaaaacagacatgctaagctgtttccctagtgtttcaagctgtttaatagctgccggacgataaatatctgctgctacaagcaaaggattacggttatattttttacgtaataaattggcaagtttaccggttgttgttgttttacctgcaccttgaagtccaaccatcataattacagttggagcttttggagctactgcaatcttgctttgctctccgcccataagtgcagttaattcttcttgtacaaccttaataacttgttgtccaggcgttaagctcttaagaacgtcttgacctacagcacgttcgcttacgcgcttaacaaagtcttttactactttaaagtttacatcggcttctaaaagggcaagtctaacttcacgcatcatttctttaacatcagcttcgttaacttttccttttccttttaacttttgcagtgtgctttgcaaacggtcggctaatccttcaaatgccatatacgccgccccctaatctaatttctcgagcgaatcaagaagagaagaaagcttactgttcttgtttaagtcggctgcaagttcatctttcagttgttgaacaattgattgacgctcttgaaaccgttgaaataacaatagcttttcctcatattgttcaagcatttgctctgtacgttttatattatcataaactgcttgacgactcacatcaaattcttccgctatttcaccgagggaataatcatccaagtaataaagtgacatataacttctttgtttgggcgtcaacagcgcctgatagaagtcaaataagtaattcattcttgttgttttttcgagcatatgcacgctcttttcaaccatctgaccgcccccttgttaagtgaaaagcctttacatgttattagtttaactaggctaggtttgaatgtcaagttttttccttaacacctcacatttttccacttgaaagaggtgaagatatgactaaagtatttcaatttaaagacgaacaaacgggttaagggaactcgtatgaaacctgcgtctaccctactaataaaaagatccgaacgattaatcgttcggatctttcttcaactaagatacttatatcccagcctctttttagattacgcctctttttctgtttcttcttctacagcattggcaaataatccatagatatattgctccgtgtcaaacggttgaaggtcgtctactttttctccaagtccaacgaatttaacaggaagcttcagttcgtttcgaatggcaagaacaattccacctttagccgtaccatctagttttgtcaacacaattcccgtcacgttcgttgcttctgagaatgttttagcctgacttaaagcgttttgacccgtcgtcgcatcaagtacaagaagtacttcatgaggggcaccaggaatttctcgctcaataacacgctttactttctctaattctttcattaaattcactttgttttgaaggcgccctgctgtatcacatagtaaaacatctgcttttcgagccttagctgactgaacagcgtcatacatgacagcggcagggtcagaacctgcagattgcttaataacatcaacaccaacgcgttctccccatacttctaactgctcaattgcaccggcacggaacgtatcacctgctgccattacgacttttttgccttcttgtttgaatttatgcgcaattttcccaattgttgttgtttttccaacgccgtttacccctacaaacaaaatcaccgttaaatcattttgctgcatattcagttcaccaatctgctcttcaccagattcataaatatcaattaatttctcagagatgacagcctgcacatcttgagggtccttaatattacggcgtttcacttccgattttaagtcatcaattaaatccaatacggtagccacaccaacatcagcactgattaaaatttcttctaattcctcaaaaaattcttcgtctatttgacgatagcgagacactagatcattcacgcgttctgaaaaagaattgcgcgtttttgatagtccatctttaaatttttgtgtaacagaatccgtttgcattgtaattttttcttttagtttcttaaaaaagctcattcgtaccaccctttcattctatgagttaaacatattgctttgattcttctaagcgaacagagactaatttcgatacgccagattcttgcatcgtcacaccgtacagtacatcagcttcttccattgtaccttttcggtgagtaataacaatgaactgtgtttgagtactaaatttgcgtaaatacgtagcaaagcgatgaacgtttgcttcatcaagcgccgcttccacttcatctagcacacaaaacggcaccggacgtactttcaaaatagaaaacaggagggcaatggctgttaacgaacgctcgccgcctgacagcaaccctagattctgcagttttttcccaggaggctgggcaacaatttccacacctgtatttaataaatctttcggatctgttaattttaaatccgcttttcctcctccgaatagtgaagagaacactgtaccaaattcattgcggatacgagagaacgtatcagaaaaacgtttcttcatttcctcgtccatttcttcaatcacttgatacagcgtatttttcgcttcgtcaaggtccgctcgttgcgtatttaaaaattcatagcgctctgaaacacgttcgtattgttcaatagaacctaagtttacggttcctaattcatcaattgccagcttaatgagcttgatttttttcctcgcttcttgaatatctaatgttaaaggatacttttcttttgctgcttcaaagctaatttcgtactcttctgtcagctgctgcagacggctgtctagctctacgtcaattcgattgattttgacttcttcatcttttaaagcatccgcaatttgtttgtactgacgctgcagctcttttacaatcctctcttcgtcttcaagtttattctgggctttcaaccgctctgatctgcagtcatccattaattttaacgtttctgtcttttcttttattcgctcatgcgctgcttcttcgagctgaagttcacccgagtcgttgctcgtgatttcattcgttaaaagagaaagatcatctgtagtttcagataaacgctgaatggtttgaccaagctcaaaacacactctttcatatttttcttgctgatttgcgaggaactgttcttttttcgcaagaaggacttttacttctgtaagctcatgttgaaccgtttctttagacgtttgctgtgtatgcttgcgtgcagctaactcttcaatgtttttctctaatacatttgcctgctgctgatttccttgcaaactcgtatgcagctcatcaattcgagcggacaagctcgtttgatcttgcctaaagctagtaatatcatgatcgtacatagttaagcggtcattcactgctttttcttcgatgtcaatttgctttacttctcggtcagactcctgctctttgtctttcaagcgttccacaaatgcctgctgtttattaatttcctgttgaagctcttcaatctgtgactttttatctttcacatcttgctcgagcacaagcgtcttttgttccatctcttctatttttgccgtaatggcttccacttcacgctgacggcctaacaaagagttggacttttgcttcattgaaccgcctgtcatcgaaccaccggggttgacgacatctcctttaacggtcacaaaacgatagcgatgctgtacaagacgggcaagttcattcgcaccttttaaatcattgacaacaataacggttccaagcaaatttttaataactcgttcgtaggtagcttcgtatttaacaagagatgaagcaattcctacatacgcttcgtgactctctagcatagaaatagtttgagccggaacataacgttcttttacagacgttagtggtaaaaatgtagctctcccgtaaccgttttgtttcaaaaagccaattgcctgacgtgcactttgttcgtcttgaacgacaatatgctgagctgctcctccaagcgcaatttcaagcgctgtttcatactcttttggaacattgattagctcagcaatggcacctttaatacctgcaagcttctcatcacgcgcttttaatacttcttttacaccgtgaaaataaccttcatagtcttcttgcatctcttcaagcatttcttttcgtgattttgtctgctgcacgtactgataagcttgataaagcgtagactcttgtttacgataggcttgccttaatgactcaagcttctctccttgctgcttatacacgtgtacagcctgctgaagctcttgacgaaactgagcaagccttttgatcgccgcttcttttcgctgcgttaattcacggcgttgttctacgtattgctcgttggattttgttaaacgctgctctttttcaaacgtttgcattttttgctgctctaaaaatgaaatttcatttcgagcggatgtttgagcgttcgctaattcaaaatactcgcttttcatctgttcaagtttttcttctagattctcgctgtactgcctgaacagctgttcctgctcagtaagcttcagacgtatctcttgtacttctttttgagattgctcaagatcttttccttcgctgtcttttgctttacttagctcttgatgcttatgagtatactcttttactaaacgttccagctgctctttattttgaaaggcatttttcttacgctcttttaatacttcttttttgccttctagcttttctacttcttcacttacatatagtagttttttatgtaaagagtctagttgttcatctatttgctgaatgtgcaaacgaagggtctggatttctccttcacgcgtgcgaatattcgtcgcgagagattcttcaagctgctcgtgctgagccatttcagcttttaatttttcccatttctgatgaagatcttcaacttcaaataccgtaacagccacatcaatgtgctctaattcttcttttttctgcaaataatcttttgcaatagacgattgaatctgtaaaggctctaactgagcttcaatttcatgaagaatatctaccactcgatttaaattttcttgcgtttcgagaagtcgaagctccgcttttcgtttacgcgttttgtattttaatacacctgctgcttcttcaaaaattttacggcgctcgtcagatttactacttagtacttcttctacttttccttgactgataatcgaaaaagcttctcttccaagtcctgaatccataaataaatcgacaatatctttcaagcggcacggctggttgttaataaaaaattcactgtctcctgagcggtacacgcgccttgtaatactaacttcatggtagtcaagcgggagaaactggtcatcattttccaacgtaagcgttacgtcagcaacatttacagcacggcgcgattcgcttcctgcaaaaataatgtcctccattttccctccacgaagcgatttggctgactgttctccaagcacccagcgtatggcatccgtaatgttgctttttccgcttccattcggtcctactaccgcagttacacctggcacaaaatctatcgatactttttctgcaaacgatttgaaccctgcaatatctaatcgtttgaggaacatagaaatcccccctcacacttgtaatcttttcatagcaaatccccctttataacgaatacgttaagagggggatcattttatttcgtttgacttgctctaattttcgtaatagctacttgagctgctttttgctctgcttcttttttcgaacggcctacaccaacgccgagctcttcaccatttaacgatacgcgagataagaattcgcgattatgcgctggacctttttcttgcaaaactttgtattctaattgtccaactccatcacgttgaatgacttcttgaagctggcttttgaaatccatcacatgagaaaaagcaccttcattaatttttggaaagacaactttttttagaatcgttactaccgtatcaagcccttggtctaaataaagagctccgataaatgcttcaaacacatcggccagtaaagcgggtctagatcggccgccggtcatctcttcaccttttccaagtaacactagtttaccaaaatccatttcatttgcaaaagtaacaagcgacggttcgcacacaactgctgcacgaagcttcgttaactcaccttcactcatcgttggatactttttaaataaaaattgtgatacggttagctctaatacggcatctcctaaaaactcaagacgctcgttgtcttcatacggtcttctgcgatgctcattcacataggatgaatgtgtaaatgcttgaaaaagaagcgcttcatttgtaaactgaataccaatttccttttgaaactctgcaaaattttgcttgaatttcacgttcatctttcgatctcgatttgaatattgtttaggcataaaatacctccgcttacctgcttcaattgtttcgtagttttttcctaacatctctcattataaaacgaggtatcctaaaagatacactaccttttcaaaaaaaagaggtctttttttgaaattcttaaaaagaagagaaagccccgctgtttaacggggcttttcatacatatactacagattaaatttggctctgtatgtaattaactgcatctcctacagttgaaattttttcagcttcttcgtcagaaatttcgatatcaaattcctcttcaagctccattacaaattcaactacgtctagagagtcagcacctaagtcttctttgaaactagattctagtttcacttcacttttgtctacaccaagacgatcaacaatgattgttgttacgcgttctagtacctctgccattgttcttcacctcccctcaagtcattatagatgatttccatctaaaatactatggttgaataataaagtttatcggtcgcctagtaaacgtccctttgtactttatcaccaaattacacttttcgtaaagtgcattttttacatcaccattccgccgtcaacgtgaatcgtttgacccgtaatataacggcttgcatctgatgctaaaaacgcaactgcgttcgcaacatcctcaggctggccgaagcttgcaagagggatttgctttaacatttccgcctgcacttcttcattcaatttatccgtcatgtctgttgcaatgaaaccaggagcaactgcattcactgtaatattgcggcttgctaattctttggcagttgtttttgttaaaccaatcacgcctgattttgctgctacataatttgcttgtccagcattaccgctgacgccgacaattgatgaaatattaatgatacgtcctgcgcgctgcttcatcatttgacgagtaaccgcttttgtacacaaaaatacgccttttaagtttgtattaataacatcatcccattcgtcttctttcatacgcataagaagattatcacgtgtgatgcccgcgttgttcactaaaatatctactgaaccaaatgtagaaatcgcttcttttatcattgcttgtacagaatcactttctgccacatttgcttgtacagcaattgcatccgttcctaatcctttaatttcatccacaacttcaagagctttcgcttcgctgccagaatagtttacaactactttagcaccaagctttcccagctcaattgcaacggcacgaccaattccgcgagaagcgcctgttacaaccgcaactttcccttgtaacatgttattctcccccttttagtgcgtcaatcgttgattttaatgatgtaagatcattaacagcatacacagccgcacgtcgatttacttttttcacaagacctgataatacttttcctggtccaatttcaacaaatgtatctacaccttctgcaagaagtgtttcaactgtttcttcccatctcactggagaatacagttgttccactagcttgttttgaatatcttgactgtcagtaaccggctttgcagttacgtttgctataactggaaccttcgcatcgctaaagcccactgtttctagcgtatcacgtagtttttcagcagctggcttcattaaactagagtggaacggaccgcttaccactagaggaatcacgcgttttgcacctttttctttggccagagctcctgctttttctacgccatttaccgtacctgaaataacaatttgacccggacagttaatatttgcaagctgaacagcgtcgccttcgcttgtaatttgagcggtaacggcttctagatcttccgctgacatgccaagcactgctgccattgtaccttgaccggctggtacagcttcgtccatatagcgacctcttttgtgaacagcaacaacggcatctttaaacgataaaacctcagcagccacaagcgcactgtattctcctagactgtgacccgcaacaaaatcgggtgtaattccgctcgttttaaatgcttcaagtagcattgtactcgttgttaaaagagcaggttgagcgtgataagttaaagtcaattcttcttgaggcccttcaaaaataatgtttgaaagactgaaccctaaagcttcgtcagctgtatgaatcagctttttcgcttcctctgttccatcatataaatcttttcccataccaacagtttgtgacccttggcctggaaagataaaagcaattttccccatttcttatctctccttttcttcattagcagtttgttcgattgctttttgaatagtggaagacacattgttttccaccatattcacagcttgcttaatcgcgctaaatactgcattcgcatccgacgaaccgtgcgctttgataacaggcgcatgcaatccaaacagccctgctcctccatattcactgtaatccattttcgcttttaaaccctgcagctgaggctttagcaccgctgcggctaacttgctttttaacgtgctcattaattcttgtttaatcatagaaaacaaggaaagcgccgttccttcaatgctcttaagagtcatattccctgtaaaaccatctgttacaaccacatccgctacgccgtttagcaaatcacgagattccacgttgcctacaaaattgagatcagtgttctttagtagctgaaaggcttgctttgttaaatcatttccttttttatcctcagtcccaatgttcagcagtcccactctaggagcttgaatgccgcgtactttttcggcatacacagaccccatcacagcgtactgcagcaaatgttcaggcttggcatcaacgtttgcaccgacatctaacattaaaaatccttttccgtctagtgtcggaagcgtcggagcaagtgctggacgttcaatgcctttgatgcgacctacaataaaaagtcccgctgtcataagcgcgcctgtatttcctgctgaaatacaagcatcagcacggccttcggcgacttcatttgccattaataccatggatgcttgttttttacggcgcacagctcgcaccggctcatcagttgcatcaatggtttcttctgtatggataatcgaaatacgatcagattttgttaaatactttttaatctccaattcgtttccaattaatgtaatatgtaattctttaaattgagcagtagctttttctacaccttcgataatggctttcggtgcatgatctccgcccattgcatcaatagctagtttcatgttgtgtctcatcctttttattatttatcctttgtagaacgatacattttaaaagttccagagaacacttgctcttgccctacatagctgtttacttccacggtggttcgcacttcactggttgacagaactttcgcttttgctatcacgcgttcatgaagcttaacagggcgatgatagcgaatcgacgcatctgctgtgagtgctaattcgttgttaataacagcgacagctaatgaattagcctgcgcaaaaaggtggtgaccacgagcaatttgattacgctgaaacacatgctctgttttcacatcaaaaatagatatcgctgattgatctaattcaatgtcgataacttctccaatcacttcttcaatcggaagcgaacggacttcctcatctagttgttttgaagctacatgtttaatacgttctcgcagttcaggaattgacaactctaggcggtctaatcgaattgtttgaacgctcactgaaaaacggtctgctagttcttcatccgtaataaatgggttttcttcaattgtcgtttttaatagatgctgtctttcttttttactgcgcttcattctccaccatccgaacttttaatactaggtactaatagcagtatataatcattaccttctaattgcaacatttttcacatgctgtattctgtgcattgacgtagtattaatgaccaccagccgctaactctttcactctaagccgctttttatctttatagacgaaaagagattgagacataactagatcacttcaacctaaagatgaacaaatgggataaaggagctcgtatagattgcttgttacaccgctgctgatttccgtgcaagacttcgctttccgctggccgcaggtgatcctcctcgtcccttacgcttctgcggggtctcatctattccgctttccccgcaggagtgccttgcccttcacttaacagttagaagcacctacatacccatcacatacatgaaatctacgttcatcatcacaatgaaaaaaatccgaacgattgatcgttcggattttccttcaactaaaatactttgttccagtctcttttactaatcaaatttttctccagttaatacgcccgttgcttctagttgtattctcagcagtgcaaactgatcttctgtccaaaagctgtcggaatttacaagcttagcagcatcttctcgagctacttcaagcgcacggtaatcgtgcaccatatccgctactttaaactcaggcatcccgctttgttttctaccaaagaaatcaccaggcccacgaagctctaagtctctttctgataatacaaatccatcgtttgtttccgtcataatggtcattcgttcttttccaacttctgatttcggatcagcgagcagaatacaatacgactgtgcatctcctcgtcctacgcgtcctcttagctgatgaagctgagataacccaaaacgctctgcatcataaatgaccatcacggttgcattcggaacgttcactcctacttctacaaccgttgttgatactaaaatctgcacgtcatttacgctaaactgtttcatcacttcttctttttcatcaggtgacaatcttccgtgcatgagaccaacgcttgcttttccattaaaatagtgagtgagtgttgcatgtacatcaattgcattttgaacatccagcttgtccgattcttcaatcaacggacaaataacgtaagcttgtctgccgtcatgtatttctttttcaacgaaatgtaaaatacgttcaagcatatcatgttttacccagtatgtttcaattgccttacgtcctgctggcatttcatcgataatggacacatccatttctccaaacaccgtaatagcaagagttcttggaataggagtcgccgtcataaacagtacatccggactctctcctttttcacgtaaaacccggcgctgcccaactccaaagcgatgctgttcatccgtaatgacgagtcctaaactattatatataacttcatcttgaattaaggcatgtgtacctactaatacatgaacatctccgtctttcactcgctgaagcagctctcttcttgcttttcctttaacagaccctgttagcaagcctacgctgatgcctaccttttcaagcatcgcagtcaatgactcagcatgctgttcagctaaaatttcagtcggtaccattaaagcaccttgatgccctgctaaaacagtggcgtataaagcaaccgctgctacgactgttttaccggaccctacatcaccttgcagcaagcgattcatgcggtaaggcgatttcatatcgtgcgtaatttcgtttactacacgtttttgagcgtttgttaacggaaacggcagcaagttcgtgaagtttaccagctcagttgaatcaaatgcttgcttcattccaggcgtttcttctctttcgcgctttctaagcgcctgcatttttaattgaaaaagtagaaattcttcatagacaaatcgacgtcttgcttgttttaaatcttcatgatcacgaggtaagtgaatacttctaaccgcttcttcacgcgttactagtttgtacctagaacgaatagaggtcggaagcatatcctgaatgctactgccataattcttcaacgcaagagagacgaacttccgcattcctttgaccgttaagctgcctttaactgagtagacaggctcaatcgtttgatttttaacaaacggagaaaattgaagctcctgcaagttaatcgtttgccgatgctgatcccatttccccgtaaccgtaacagtttgatcgatttctaactttgatttatagtaagggcgattaaaacaagtaaccgtaatcaaatagcggtttactagcagccgaaacgtaaggcgcgaacgtttttttccgtaatacgtaagcgaggggacgctgtgaacctttccttctacggtgaccttttcgtcgtgctttgcttcagccaaatcttttaactcataatcttcatagcggtatgggaaatgttctaacaagtcatgcacactgtgaatatgcatatcctctaatgcttgtgctgtttcctctccaatacctttaatggttttaattgaaatagttgttagttcattcacttttatttaatgcaataccaaagatcttcgcttcaagctcgcgacctgttggtgttgccgctaagcctccttgtgcagtttctcgtaatgcaaccggcattgtctgaccaattttatacatagcatcaatgacttcatcacatggaatacgacttgtaatgcctgctaaggccatatctgctgcaatcattgcattcgccgctcccattgcgtttcgtttcacacatggaacttctactagccccgctactgggtcacatactaatcctagcatatttttgagagtgattgccattgcttcagctgcctgactcggtgtacctcctgccatttcaacaatcgctgcagctgccatacctgaagctgaaccaacttctgcttgacatccgcctgctgctcctgaaatagacgcattattggctacaacaaacccaaaagcacctgatgtaaataaaaattcaatcatttctttacgagttgggtttagcttattttgcactgcaaacagcgttcctggcactacccccgcagatccagcagtaggtgttgcacagattgtccccattgccgcatttacttcgtttgtcgctacagctttgctgactgcatctaaaattaaatttccagataaagattttccactttgaatatagttttgaagcagcactgcatctccgcctgttaaacctgtaacagactgtaccccttttaaaccgcgttcaaccgcttcttccataaccgttaagttccggtccattttttccatgatttcttcacgagtaactcctgtgatatctatttcctgttgaatcataatctctgcaatttttacattttgactttctgctaattctactagttctgctacgtttcgaaacatagtaacctccgctatcattctgtcttattttcactttagaatcatatataatcactcggctccagttattctctcaagccggtcctattcgctctatcctactcaaccattcttgttacttgaataatgtgaggcaatgtttttaactcttcaattacatcatcttcaatattcgtatccatttcaattgccatgagcgctacttctccgcgctctttgcgagatacttccatatgtccgatattaattgagtgtttcatcaaaatattcgtaacggtcgcaatggcaccaaatcggtcattatgcacaacgagaatagctggattcatgcctgataaatttaattcaaacccgttcagctccgtaatttgaatttttcctccgccaattgaaattccaacaacttcaatttcctttaatccgtcgctcattttgatgcgagcagtattcggatgatctgtgattgccgcttcctcaacaaatgtgacgtccattccttcttttttagctaagtccaaagattgcggaatacgctggtcgaacgtatcaaaatctaaaataccgccaatcagcgctacgtctgttccgtgccctttatacgtttgagcaaaagaaccgtacagtgaaaccacaacttttgtgggctgctttccaaaaagcgttcgggcaacgcgtccaatacgcgctgcaccagctgtatgtgagctagatggtccaatcattaccggaccaataatatcaaagacagatttatatttcataaggattttccccctgctatttagacattgttattacttatatgttacttgagcttttgactttttggaagctttgtttcacgctcttaaaaaatttaaaaattctcatttttattagggattcacgcacaaaaaaaagcggtgtatttatccataaaaataagataagcacaccgctttttttgctatattatgcaggaaaagatgaattacttaagctgcttcttgctcggaagctacatcgtctactgttttaattttaaagtttttaaaaacaactgaacctataaacccagctaatgctcccgctagtgcgcaaagtactgcacaaattgtgaccttcatagggtcattaaacccaaacatcactgcaagccctgcgattggcgttgctgtgcctgcagcatcatttaccaatccgaacagagccacaaccacaccagctagtgcacctccaacaaagtttgtaatgtagataggaatcggatttgctgaaataatattcgcttgtgttaaaggttcaactgcaactgaaatggttgtacgacgatccccaatttttaatcgatcaaacagcacatagttcatgaaagaagaaccaaacacagcaagagctccaatcgccataggcaatcccgttaaccctagcatagccgttaaagccattgaactaagcggagccgttgctactactgtaataactcctcctaaaataattcccatcaaaatagggctagcacttgttgtatctttgataattcctccaatatttaaaagcgtcgcatctacaataggtgagaatgcattaccaattaatcttgttaaaggtgctgcaattaagatgttgcctaataagtctagaccagcaggtgcctttttctcaataaatttcactacaaatgccatgaggtatcccgcaaaaaatccagggagcaagcctagccctgaacacactacccccatcataagagcatatacaggagatactcctaacgccagagcaactagtgctgccgccgcaactcctcccattcctcctgcagcctttccaacttcacctaggaatgaaatacctagtaaatctcctcctacatatgactgaaaggcctctacgagaaacgcagctaccgctccgcttgccagagcccccattgctttcatgccataaggtgccttgttgctaaacaaccaaaataaaaataaaactaataataataaacctgttccttttaaaatatccaatggtgtctctcctctcatgctgttttctttcacatttgactcaatcagttttcaaaactaccatacaaatgggttcttttcaactaatatacctaatataacgaacgattacaacatttaaaaataaaatagttcgtatttaacttaaaaaacacaaaaaagaagcgcccatctggaggggtgcttctttttttgttattcaattgcaaaaatgtaagaatataaaggttgatctcctttatgaagctctacctcaacttcttcaaacgtttcttctacaaacgatgttagcgcttcagcttcatcgtctgagacgtcctctccttgaagaatcgtaaggatttccgcttcgtcatcaatcatataagtcaaaagctttttcgctgcttctaatttctctgaatcttttacaacgattttcttttcggcaatacccataaaatcgcctttagctaattcaagaccatcaatatttgtatcgcgaactgcatacgttacttgtcctgttttcacgtgctgtagagcttccgtcattacttcctcgttttcttttaagctttgctgaggattaaatgatagcagcgctgtcattccttgaggaaccgttttagacgggacaaccgaaacgtgactgccggcaacagcagccgcttggttagcagccatcacaatatttccgttattaggtaaaatcagtacccgttcagcatttgtttcttcaatcgctttgacaatatcctccgtacttggattcattgtttgtccgccttcaatgacaaccgttgccccaaggctcttgaacaattcagcaattccttttcccattgacacagtaacaatgccaaagggctgtttttcagcattttttactgcaggcttttcttcacctgaaacaatgctgctatgttgttctctcatgttttcaatcttcattttaattaaacttccatattgctgtccgtagtttaacacttctccaggatgctcggcgtgaatatgaactttcacgattgcatcatcagatactacaagcaatgagtcgccccatttacttaagtcttgacgaaacgtttcttcagaaaatgttttagctgcaggcttatcctcttccagccttaccataaattctgtacaatagccaaattcaatatcttctgtattcatatggctttgtgcatgcttatggtgctcagcatttacgagttcattcatcgaaggagctgacatgggtacacccggaagtttttcaccttttaattcagctaaaaacccttcataaattaaaacaagcccttgacctccgctatccactacgcctacttcttttaacacgggtaaaagatctggcgtgcgatttaacgaagcgttagcttccttaagtacttcttccatgaacagaatcatatcagattgctttttagcaacagccgctgcttttttagcagtatccttagctactgttaaaatggttccttcgattggtttcataacagctttataagcagtttctacaccaagctcaagagcttcagcaaactcaactgttgtaatcgctgacttttgctcaaccgatttcgcaaaaccgcggaataattgagataaaataactcctgaattaccgcgcgcccccatcaataagcccttagacaaagcttgactcacttggccgatgtgatcagatagtttatttttcacttctttagcaccagacgtaatcgataagttcatatttgttccagtatcaccatctggtacaggaaaaacgttcagcgcatctacataatctgcattgttagatagatgctgggctccttgaagcaccatttctctaaaccgctttccgtccaacgttgtcattgacacgaatcttcctccttaattaaacgttcgttacacgaacaccctgcacataaatatttactgaatcaaccgttaaaccaaccgtttgttccagtgtgtattttacttttgtttgcacattatgagcaatttcagaaatttttgttccatagcttacgataatgtacatgtcgatatgcacgtcatcctcttcttgtcttaccacaatacctcgtgtaaagttttctttgcgaagaatttctgtaagaccatctttaagctgattttttgaagccattccgacaatcccgtaacaatcaacagctgctcctccagcaattgttgcaattacatctgtagaaatatcaatttgaccatacttcgttttcatttcgatggacatactcgttcccctttctactttcataggttataaatattctactataatcaatctcgttttaaaagaggcgtccagcttgtcccttttaaagatgacagtattaggtatcaacttgtcttaaaataagtaataacccaagttatacctatttctactctctatattattgaacatagattcattttatatgtcaaggaaaatttcttgaaagcttttctccagaactattgcattctctttaaggctgtgataaattaatatagtatttctcaaaacagaattgagtagtttttttggtgttaggagggaaaatcatggcacgcaaatgtgtagtaactggtagaaaagctcgttcaggtaacgcacgttctcacgcaatgaacgctactaagcgtaaatggggtgctaacgttcaaaaagtacgtatcttagtgaacggtaaaccaaaacgtgtgtacgtttcagctagagcccttaagtctggtaaagttcaacgcgtttaatctttataatgaaaaagcaccatattttatggtgcttcttttattattccggcgttgttaatcttttttgaacgaattaagcatgacctttacgatgccacctaaaaactttggaagtttgattgtatagaatttcatactgtccctcctaaccgtctccacactttatctccttttaaagaaagccctatgtcctgctctcattttccatacttcatcacaagcaatgtttatcattgcttcttaccatcattaatatgccttttgtaaatgaaaaagtacctctttgttgaataagttcattgctaatacataaagttgagccgagttctacttcatgcttattgagtggatatttgaaaccttctagcgtaagctcttttgcaccgcctgcaaaaggaacgaatgaaatatagtgaaactcctttaaacgatctacatgataagtgcctggttcaaacaattgaatgatattttgattgtcaatcatttgtacattcgctttcttttttaaccctttgtacaggagttgaatgcttccaaacatgtgatcaagccttccacctgttgctccaaagatacaaatactttccggtttttgctctattgcccactcaaaagcaagttccaaatccgtagcatctttttccgcaggatacaattcaacatcttgcaatgcttctctcactagcttaagctgcgcatttgtaatggaatcaaaatctccgaatgctttcacgggcaaaatgtcttgttgaagaagaaggaatacgccgcggtctactcctacccactttacatcatttgattggtgcaagagcggcatatgttcatccggtccccctgctagaatatgaattttcattatgtatatgctccttttctattaaaaaatgaacgaaataaatatgttttctttatcctaaaagaaaaagctgctgtgtacaagttctactcgttgtacacagcagcttttattacttacgcttgaacagttgtgcgaatttgattaattgcgccagctcgatcttcttggttataaatagctgagccagccactaagacatttgctcctgcttccacacattttcttgctgtttcttcattaattcctccatcaacctctacttcaatagaaaggtgacgaatttcaataagctgagatatttgctcaattttcggcagtacacttggaataaagttttgtcctccaaagcctgggttcaccgtcatcaataaaataagatcgatatcttctaagatatgctttaccaagtcaattggcgttgcaggatttaaagcaacgcctgctttcatgccgtgctctttaattaattgaatagtgcggtgcaaatgagtacatgcttcagcatgtaccgttaaaatatcagcacctgcctttgcaaacattggaacgtattgatcggggttttcaatcattaaatgcacatctaatggcagtgttgtgacagggcgtacagcctcaacgataagcggtccaattgtaatattaggaacaaaatggccatccataacgtcgatatggatgtagtctgctccacccgcttcaacttcacgaatttcttcagcaagctttgaaaaattggcagataaaatggaaggtgcgatttttgtcatttttaatacctcggctttctttgcttaatttcctcaataaattgcaagtaatgttcgtagcgataactcggaatttctttttgctcgtatgcttctttcaccgcacattttggttctttcacatgcaaacaacctcgaaatttacactgttcactcaaacgcgacatttcaggaaaacaatcggttaactcttctacttctaacgttaaaaattccagtgagctaaagcctggcgtatcggctactaaaccttcaccaaacgaaatgagttctacatgacgtgttgtatgctttcctcttccaagtgaaattgaaatatcatttgtctttaactcaagctctggtttaagtgtatttaacagtgaagatttacctacacctgactgcccggcaataaccgttacgcgatcttcaaataacggctgaatttgttccatgcctttttctgtgactgtcgacgttaaaatgacctcatatcctattttacgatattcttcggcatattgctcgatttcttgcttttgctgctgtgataaaagatctacttttgaaatacaaataataggttcaatatgattcgactccactaacactaaaaatcggtcaagaagcattgtgctaaaatcaggttcaatcgctgaaaaaacaagcagcgcctgatcaacatttgaaatagggggacgaactaattcatttttacgttctttaatttcaagtatatatccttcaagcttattttccgcctgaaatactacattgtcaccgactaaaggcgttaccttctttttacgaaaaacacctcgtcctcgacattgcgttacttgtccgtcatgaagaacataataaaatccgctaagggatttaataattcttccttctggcataacctcactcctatcactctggatattcaacatctttttcttcaataacttccccgtctcggacaattttataagacgctttttcattttcattaactaaaacatcgaacgattcttttgttgtttcagtaatcgttagttctttagcaggaacggacatatcgttgtctgcatcttcgatatagatttgtactttttgcggctttggcttttcctcttctgttccggtagcatcgcctgtttccgttgcgtcgccttgttccgtgcttgcttcggtgtcagtctcttctttatacggaatagtcacatccactgacaccgtttgaggagcttttggctccttgcccattgagaccgtaatggtgagcttatcaccttgctcgatactctgctccgctgcaggcttttgagacatcacaagacctttttcaacagtgtcggaatacgctgtttttacgtccacttcaatatcttcatctgatgcataatcttttacgcttttttccgtccagcccgagaaatcctttaatgtaatctttggcggtcccttacttacccatagcgtaaccgttgtatcttccggcacgacttgttcggtttctttaggcgtctgatctgtaatattgccttttggttctgtgctttcaacttcgatggattggatatctttataattctgcttttctaacagactttttacttccgtaaagcttcttccaatgtaccggttaaatgcttcttttttctttcctgtacttcgataaataatgacgttagatccttctttgataacgtctcccgcttctggcatcgttttaaccacgtcgccttcttccacctcattatcggatatatctttaggattcttcactttaaagcctaaagaaactaaatcggttactgctgattcataatcttgattatgtaaatcaggaacctttacgtcttttggcagtaataaagccggaataaatgtaacggcggctacgctagcagctgccaggagcaaaaaaattaaaacaagcgttacaatcagcttgcttttgccttttttctttttcttcttttttttcttcggctttaactcttcttcctcttgttgttcgcgctctaagtgaggtggttttctcacaggtacttgcgtttcttcggattcaacaaaatcctccttaataactggaatggcttttgtcacttcttcatcatcaggcaccgtaaacctttgttcattataacgatttggatgaacagcagactgtaaatccgcttcgagttcttcgacggaactgtatcggtaaaatggatctttagttgttgcttttaatacaacattctccacgctttgagggatagatggattccacctttttggagaaggtgtttctgtctgtaaatgttttaatgcaattgacacagccgattccccagaaaaagggactcgacccgttagcaattcaaataggacgatgccaagcgaataaatatcagaacgcttattcgcaagccctccccttgcctgttcaggagataaatagtgaacagagcccaaaacagaattagtatgcgtaatggttgtagaacttagtgctacggcaatgccgaagtcagtaactttaatggtatcatcatgatcaattaaaatattttgaggcttaatatcccggtgaataattccgtactgatgagcatgggcaatagctgatgtaatctgcgtcataatatgtatggctttatcaagagatagtggtgattcttgcagaatgtattgctttaatgtcatacccggtacatattccatgatgatatagtaaatatcttcttcttctccaacatcataaatgctgacaatattaggatgagcaatactcgtagcagattgtgcttctcgatggaaacgctttataaacgcatcgtcacttgcaaagtctaaacgaagcactttaattgccacatcacgatccaaaatcatgtcgcgacctaaatagacgtttgccattccgcctccaccaattacttgcaataccttataacggtcgtttagccgtctacctattagcaacactctcacccactttcagatgtaaagtccacaattgcaagtgtaatattgtcttctccaccaagctcatttgctaattgaatcaggctcgtacccttttcgtgaagtgatgaacttgttgataacgtttcattcagcttttgttccgttaccttatttgtcagtccatctgaacataataataatcgatcttctttttccacttcaattgtttttacatctaaactaacattttcttcggtacctagtgctcgcaataagatattttttcgtggatgatgctcagcatcttcttttgtgatttgaccattttttacgagttcatttacaagagaatgatcttctgttacttgttgaaatccatattcatttgaaatatagcatctgctgtctcctatattaccaatcgcacaaaacgtatcggcgcataaagcaagtacaactgttgtacccatccctttacactcttcatgttcctgagcatactgataaatatcttgattaatttgcgaaacatgcgtacgaatccactgcgtcgcctcatcaggagacgttactttgtccgcttcttcccacgctatttgcaatttttgaactgccatctcactggcgacgtcgccagctcgatgacctcccataccatcagccacaattgcaagcagctgattgtgttggttcaaaaatacccctccgttatcctcattgtgttgtctaactctccctcggtctgtcatgaagacagttgccatacaatcacctcgtctcttctttacgctccttcgcacgtaattggccacaagctgcatcgatatcatgaccttgctcacgtcgaatagtcacgttaacgccacgctttttaagcgtacgttcaaatgcaaaaatctgttcacgcggtgtacgaacataatcacgctcaggcacatagtttaccggaatcaagttcacgtgacatttaacgtctttaatcaaatccgctaattcctcggcatgctctacttgatcgtttactcctccgaatagaccatactcaaagctaatacgtcttcccgttttatccgtataatatttaatggcttccatcaaatcaggaagtttgtacgcacggttaatcggcattaagcgtgagcggatgtcattgtttggagcgtgaagtgaaatcgcaaaattgatttgcattttttcatcagcaaacttatagattttcggaatgatcccacttgtcgatactgtgatatgacgtgcaccaatatttaatccatcatcactgttaattgtttttaagaagcgcatcatttcatcatagttatcaaacggctccccaatacccataattacgacagagctcacgcgttctccttgttcatctagcgctttttgtacttttactacctgcgctacaatttctccagcttctaagttacgctttaaacctccaagagtagacgcacagaacgtacagccgatgcgacagccaacttgagtcgttacgcagacagaatttccgtattcatgccgcataagcactgtttcaatcgtataaccgtcatggagttcgaataaaaacttcatcgtcccgtccccagatgtttgctgaacaactgtttttaatgtcgttaatgcaaatttgtcttttaattgttcacgtaatcctttagataagtttgacatatcgtcaaagtccgttacgcgtttaacatataaccagtcaaaaatttgtttagcacggaacttcttatctccatgttccactaaccaattttctaggtcatgcatttctaatgaataaatagatggcttttgtggttttttttctgcttttgcttttcttttagctacttcttccatttttacaccttcttctgtaaacatgcaatataaaatccatcgctttgtgcatctggcagcaattgaatttcaccatgttttacgttttgtttaagcttttgcggcatccgtgcagcaagtgtttcatctttttgaaaatcagcatgctctgctaaaaatgctgttacaacatccccattttcatcccggtcaattgtacatgtactatatacaagggtcccacctttttttaataaaggcgcaaccgcatttaaaatatcttgttgaatacgcgccagctgctttacatcttgctcagtttttgtatatttcaaatcaggtttacgtctcattacaccaaaacctgagcacggagcatctactaagatgcggtcaaacatttctttatcaaactgttcgcccgctttgcggctgtcttgaaccgtcggctcaatattggtaaggtgcagacgctctgcctgctgggcaatcagctttactttatggtcatgaatgtccaaggaaataactttaccactgtttttaagctgctctgcaatatgagttgattttcctcccggtgcagcacagctatctaaaattagctcttctgcctctgcaccgagcgcatgagccactaacatagagctttcatcttgaacggtaaacattccttcacgaaatgcttgtgtatgagctgcatttcctttttgaacttctagcgcttcttctacaaaatggcctggttctacaacaataccttctttttcaagcgcttcttttacttcattttgcgtaaagcgtgcactgtttactcggattgtttgtttgggggccattaaattagctaaacagattccgcgtgttttgtccaatccatattgttccacccagcgttttacaagccacaatgggtgactcgtttcaatcgccaaccgctccacaggattttgtatttcttctaaagaaggcgtgccgctgcgctgaatatttcgtaaaacgccgtttaccattgaggcaattcctttgtgaccgcgttttttggcaatttctactgcttcatgaaggattgcccggtcaggtacccggtctaaatacaccatttggtaaagagataaacgaagcagcactcgcacccaaggctgaagtttttttgggtttttcaagaaaggcgctaacccgtaatctaacgtatcacgtctttgaatcgttccatacacaatttccgttaacagccctgcatcttttccttgaataccacgtttttgtatgctgttatttaacaatagattgctgaatgcctgatttttttcaatagctagtaaaatatctaaagctatatctcgaacgttgtacttactcattgacatcccctaatactgttccgacttcaacggatgtacctcgtaaatactgcgctgcatccatacgtttttttccagccggctgaagttccgtcactttaatagctgtttcatttccagttgctactataaatccatcctctccaagtgataaaacggtacccggtttgcctgatgcggatactttctctccccaccaaattttcatgacctgaccgtctgctgttgtataagcaacgggccaagggtgaagtccgcggatatggttataaatttcttctcctgtacgggcccaatcaattttctcttgttcacgcttaatgttagaagcaaatgtcgcttcgtcatcgttttgtttaaccggcgtaatttcaccttttacaagagaaggaatggtttctgaaagcaattttgcaccagcagcgctgagtttatcatgaagtgtgccaacgtgatcacgttcttcaatcggaacttctacctgtgttaagatatcgcctgcatctaatttttctaccatatacataattgtaacaccagttttcggcttaccttgtagaattgaataatgaatcggcgcgcctccgcgcagttcaggtaacagagaagcatgcacgttaatacagccgtatttaggcgcttctaaaataggggttggtaaaatttgaccaaaagccgctgttacaattaggtcaggctcatacgctaacacttgctgatattcttcttctaaacgaatcttttctggctgcagtacaggtatttcatgctttaacgcctcaacttttacaggaggaggtgttaatacgcgcttgcgtccttttggtcggtccggctgtgtaaccactgcgaccacttcatatccatctttaagtaatgtttgtaaaaccggcactgaaaaatccggcgttcccataaatacgactttcatcgtgtaaaacctacccttctagttcatcctcttcgtaatactttgttactttttccgtgaacaatacaccgtgtaaatgatcaatttcatgttgaattgctcgtgctaaaaaaccttttgcttctataaaataaggttttcctttacggttttgcgcacgtactttcacataatcagcccgagccacgtcaccaaaaaggcccggaaaacttaggcagccttctggaccgatttgttcgcctcgttgctcaataattaccggattaattaactcaattttaccgtgtcggtcatccacgtctaccactgccacttgctgcagaactcctacttgaggagcagctagacccacaccgtctgcttcaagcattaaatcatacatgccgtttagtaatttcgctaatttattatcaaagtttttaacgacttcacattcttgttcaagtacttcattaggatggtaaacaagcttaagcttagccaaataggcacctcctttattctttctatttatatccaaaaagcttcttctttaacgccatcaagacgactagttacatcatcgagtatggattcaaatcaatagtgatcgttaaattttccttctgcatttccggttgataacgttctaatatatatttcaacagcggaatcaggcttggttccagcttgtattttaacatgcattgatagcgatatctatcttttatcttagcaatcggagatgcgactggccctaagatcgttgtttgcggcgaaagtttctgacgcagatactgcgaaattttgtctgtaacagacaccacttttgcaatattttcatgagataccgttacaagcgccaagtaaaagaaagggggatatttgtgcattttacgaatttccatctcctgcttataaaacgcatcataatcatgctgactcgcaagttgaatgctgtagtgttcaggcgtgtacgtttgaatcactacttctcctggaagtttgtggcgtcctgctcttccgcttacttgtgttaaaagctgaaacgttttttcagatgcacgaaagtcaggtaaattcagcattgtatctgctgttaaaacgcctacaagcgtgacgtttggaaagtccagtcctttcgcaatcatctgcgtccctaataaaatttgcgcttctccacttgcaaacttgttcaggagcttttcatgcgcgccttttcggcttgtcgtatcaacatccattcgaacgactctagcctcgggcagcacttttgttaattcttcttccactttttgtgtaccagatccgaaaaagcggatatgttcgctgtggcattctgggcactcagtgtgcacatgttcttcgtgtccgcaataatggcattttaatttatgttgatagcggtgatacgttagtgaaatttcacagtgctcacatgtcggaacgtaaccgcagtctctgcacataacaaaagaagaatgacctcttttatttaaaaataaaacgatttgctcccctttttccaaacggtctttcatcttttcaaacaggatagttgaaaacatagagcgattgccgctgcgaagctcttctctcatatcaacgatatccaccgacggcattgatgacttattcattctttgctttaacgtcagtagcttatacacacctttttgcgctcttgcaaaggactcaagcgttggtgttgcacttcctaaaatgactggacactgatgatgctgccctcggtaaatggctacatctctggcatgataacgggggttttcttcttgtttataactcgtctcatgttcttcatcgataataagaaggcccaaattttcaaatggcgcaaatacagcagagcgagcccctactacaacggatacttcttttcgctgaatttttcgccattcatcgtatttttctccagtagacaagccactatgaagtacagcaacttttgagccgaatcgctctttaaaacgcttgaccatctgaggggtaagtgaaatctccggaacaagcataatcgcttctttccctttttttagcacttgatcaatcgattggagatacacttctgtttttccgcttccggttactccgtacattaaaaacacattgtgaagattttcttcgatgtcctgcagaatcggtacgattgcctcagcttgttcatcggtcaattgaaatggctgtgatggtgtaaagtatcgatcttgataaggatcacggtatatttcaatttccgtttccgctaagagtcctttgttaatcagcgcttttataggagcggaggtaatctgcaaatcttccgctatttcttttatggctacttcttcatttcggttcagcataaaagacagcacttgtttttgcttttctgcctgcttatttaactcgctcataaactgctgaatttcttcaaggctttgattcagttttacgccttttgccgtttttttgtttcctttgtttttcacgacgtagacgacttcaattagacctttttgaatatcacggtgaaaagcaggagcagcggctgttttttctacttcactccacttcagcgaggatcttgactgaaaaaacggctttacttgctcatgaagctgttcgtatgcctcttttgaaaggagtgacagttctttatcatattttgctttcatcgccgcaggcagcatgacttgaaaagccgatatcataaaacaaagcgttttttcggttagccagtgcccaatctctaacagttcgggagtcagaaccggcgttaaatcaagcaggtcagcgattggtttaacacgcttaacttcagcctcttctttaagagccaccacaaacccttgaacttttctaggaccaaacggaacgacaactcgcatacccggaacaataattcctttccatttgtcgggaatagcgtagtcaaaagctcgatctgtttgcttagcagccacgtccacaattacactagctacattcattttttcaacccttctaacatttccttcacttcttttaacacctcggtagctacatcgtgttttgaaagaataggaagttctttagactctccgcttcgcttatagagcgttacaatatttgtgtccgtcccaaaacctgctccttctgtcgtcacgttattggctacaatcatatccaagtttttagatgcaagtttcttttgtgcatattcatccacttgttctgtttctgctgcaaagccgactaaaagctggtgttcttttcgctctccaagcgtgcgtaaaatatctgttgttctctctagctctagtactgcttcaccaggctgctttttcatcttttgatcaaacacatgctttggtcggtaatctgccactgcggctgatttaatgacaacatctgcttcatgatagcgctgcataacagcttcaagcatctgctgcgcactttcaatttgaacaacctgcactccttttggatactctaaattcgtcggtcccgttacaagtgttaccgatgcgcctaatttagcagcttgttctgcaagggcatagcccattttcccagtagagcgattggtgaaaaatcggacgggatcaatgcgttctaccgtaggtcctgctgtaaccaatacattaacaccttcaaggatcttttgtgtatgtgatgcttgtgaaaaataagattcgattagtgaaacaattgtttctggctcttcaagacgaccttttcctacataaccgcatgccaaatacccttctccaggttctacaaaagagtaaccaaatgatgaaagagtgctcatattttttttaacagctggatgatcgtacatatgaacattcattgcaggtgcaatccacgcaggtgcagtagcagccagcagcgttgtggaaatcatatcatctgcaagaccatttgctattttccctatcatatttgccgtagcaggagctactaaaattaaatcaggccaatctgctaaatcaatatgtgcaattacagatggatctttttcatcaaacgtatctgtataaactgggtttcgagacagagcttgaaacgtaagcggcgttacgaactcgcatgctgaagcagtcatcattactttaacttccgctcccgcttgtactaatttacttgttaaagctgcggctttatatacggcgattccgccgctaacacataataaaattcgttttcccttcatcattatgcccccatctatttatcccgctcaaccagcatccgcttgtttactcgggtaactatctaaagcttttcaattcaattattataccatttttgtagtgagacattcactatcctgcttgaacacagataaaagcatcaaaaaaataacaacctataaagtaggttgttattttttcacttactgatgtttagaatcttcttctgctacaccttgcttatagcttaattgttcagcattaatttcttctaaagcacagcctacaaacttataagaaaccggcttttcaatcggcgtatcattgtgaagctgtaattgacgtgcacgttttgcagctactgtcacaagcgtgtacttagaatctaatttttccattagagaatcaattgatggataaagcatgtttattctacctccagcattcttttatagcgcgcagaaatacgatcacgacggcagtgttcagccgttacgatagcacggatgcgagcacaagcattttctactttgtcattttctacaacataatcgtaggcgtccataagttcaatttcttcttttgccacgcgcatacggttattgattaaatcttctgtttcagtaccgcggtttacgatacgacttttaagctctgataaactcggcggtgccaagaagatgaacaaaccttctggaaatgcttctttcacttgaagagcaccttgcacttcaatttctagaaatacgtcttttccttcagataacgtttgttctacataatcaaccggggtaccgtagtagttacctacgtattcagcccactctaataatttcttgttttcaatcatgcgctcaaactcttcgcgtggtttgaaaaagtagtcaacgccgtctacttcaccttcgcggggctttcttgttgttgcagagatagaatactgcaatttaatgtcttcttgctcaaacaatgcttttcgtaccgttccttttccaacacctgatggtccggaaagaacaattaataaacctctttcaatcatcggttcaagtgacctacccttctaataattcttctttgtttataagtcgctgtgacacagtttctggctgtacaggagctaaaataacatgatcgctatccataacaataacagatcgtgttttacgtccttgcgttgcatctattaaagagcctcgatcttttgcatcttgaataatgcgtttgattggagctgattcaggatgaacgacagagattatacgattagaagaaataaaatttccaaatccaacgttcactaatttaccgctcataagaagcctcctgctataccaatataatctttatcttacacgaaggctattcaatattttgaacctgctcttttatgcgttctaattgtgctttcatactaataacatactgagcaatagtaccattgtttgccttcgcaccgattgtattcatttcacgattcagctcttgaacaagaaaatccagcttgcgtcctactgaatcaggtgtatttaatgcttgaataaattgtgaaacatgactttgaattcgcgtaagttcttcgctaatatctgctttttcggcaaaaatagctacttcagtcagcactcgctgctcatcgaaagtaccttctaaatagtcgctcagctttcttttaatacgctcgcgatattgttcagcaacttcaggagcaagctgtgtaattttttcgcgaatgtcttgaatgtcctgtaagtaccccattaaatcgtgatacagctctgatccctctcgttttcgcatatccactaactgatgcacagcagcttcaacggcttcaaagattgcaccatgaatactcgtctgatcagcttcttcttcataagttgtcatcacttcaggcatgtgtaaaatgtcttgaatttgaacagattgtgatagtccatgcttttcttttacttgctgcaacgcatgcatgtattcatcaagcagctgccaatccgtctgcagtttcttttttgccatttcttcacctgaaatagtaacaaatacttctactctaccacgttttatgtatgtttgaacgattttttttattttatcttcaatttcaattaattgtcttggcatacgaataacaatttcacaaaaacgatgattaacagacttcatttcgactgttactgatcgattttccacttccgcttttccgcggccaaaaccagtcatactttttatcattatcatcacatccactatgtacatcttacataaaaagtatcataaaagaaagtgttagcaaaaaaaagaaatctctcttctttattcaacctgtaaaggctgccttcatgagttttctcatttgggacagcctgtattaaagtatagcacaatttatgaaggttttcttgttaaaagtgaaccggcaagtaaaaaagttggaagacttgcaagtcctaaaataacgagccactcccgcggtgcaatggccattgtatggaaaataggctgcaggggcggatagtagatagccaccagcataaggataatagatgaaataacggctcctacaagatataagttctgaaatggattgcgatcaaagattgatttttcacttcggcagtcaaatacgtgaataagctgtgccatgacaagcgtggcaaatgcaatcgtctgagcatactgcagccgatctgggtcattgtcgtagacaatcatgaatgcagcaagtgtagcagctccaattaaaaatccgcggctgactactttccaccctaatcctcttgcaaaaataccttcgcgcggatgccttggatggcgcttcatcacgttgtcctctggctggtctaagccaagagccatcgcaggcaaaccgtctgttactaagtttacccatagtatttgaattggcactagcggaagcggaagtgctaaaatcatcgcaaagagcataactaagatttctcctacatttgatgcaagcaagtaacggataaactttcgaatattttcatagatgtttcgtccttctttgatcgctgatttaatagtagcaaaattatcatcaagcaaaacgagtgaagacgcttcttttgctacgtctgtcccggtgatgcccatcgcgatgcctatgtctgctgctttaatagccggtgcatcatttacgccgtcgcccgtcatagctacaatgtgatcttttgcttgaagagctttaacaattttaagtttatgttcaggcgataccctggcatatacgtaaacatcatccactacttcttctagctcttcctgcgtcattttggataaatccgttccttccaagacttgaccgtttttcggtaaaatgcctaactgttttgcaatcgcctgtgctgtaatgacgtggtcacctgtaatcataacggttttgattcctgcgtctcggcattctttgaccgcttgcttgacttctggtcttggcggatcaatcattccttgaagccccaggaaagtaaggtctttttccgcttcgttctctgtatgaacgctctcatggtctcctaacggccgataagcaatagcaatggttcgaagcgcttggctagctaactgatcaatcgctccttttacttcatgatgaaccgttaccgacagcgtttgttgtctgctttcccacaaaatatttttgctgtttacaagcagcacatccggagcaccttttgttatgacatagcgcttattagatgcgtcttcaatgactacactcatcattttacgcgttgaatcaaatggaaactcttcaataatcgtaaactgcttttgaatgttttcttttgtcagccccgctttcatcgcggccacaagcaaagccgcttcagtaggatccccgtcgatgacatattctttatcttttctcgaaatggacgtttgattgcaaagcagaccaaacaccaaaagctgctgaagcggtttttcactccgtgtatcaacttctctttcctctcgcgaaaatacgcccgtaggttcataccctgtccctgataccctccacgtcattcctcctgaccagaggtgagtaaccgtcattttattttgcgttaatgtgcccgttttgtctgagcaaatgactgacgcgcatcctagtgtttcaacagcaggaagtttgcgaacaatggatctttgcttaatcatgcgctgcacaccaagagatagcgccacggttacgatggcaggaagaccttcgggtatggcagcaacagctaaggaaactcccgctaagaacatactgtataaatcatggccttgtagcacaccaaccccgacaactaatacagtaagtgcaagagctacaacgattaaaattttacctaattgctctaacttccgttgaagaggagtaatcatggcttcagcattttgaagcaaatcagcaatttgtcccattgctgttttcattccaatccctacaacaatacctgttccgcttcctcgcgtcacaagcgtacccataaacgccatattgtcctgatctccaagcggcacttcatctcctggcaaagcttttatttgcttggcaacaggcaaagactctcccgtaagcgctgattcttcaatttctagacttttggcttccataatccgaaggtcagccccgatacggtctccgctcgaaaactttacaatgtctcctactaccagctctttagatggtaacttaacccatttcccttcacgcatagctgctacttgaggagcagaaagctcttttaatgcatgaagagatttctctgcttttctttcttgaaaaaagcctagaaatccgttaattactacaatggcaataatagcaatcgcatcgatgtattcgcctaaaagacctgaaataagcgtagcagctagtaaaaccagcaccataaaatctttaaactgctctagaaacacaagaatggccggttttttctctccttcagtcaattcattaaatccttgctgctgctgtcgtgcttttacttctttgtgtgtaagaccatgctgtctgtctgtttttgttacttctactattgctttttcacctaattcataccatttcattgcatcttttcacacccttttatttgtaaatgcacctattagattgttacaatcttatatcgtatgcttattcagactcgtcctaaaaaatgctatacttttctataggacaattttcaattacttaaggatgtgagcactatgtcatttgatggtatttttacatatggcattttacaagaattatctgagaccttggtttcaggacgaatttcaaaaatatatcagccgtttccaaacgagttgattttacaagtacgcgctaaaggtgaaaaccgcaaacttttaatctcagctcaccctaactattcacgcgttcattttacaaatgagccctatgaaaatccatctgagcctcctatgttttgtatgcttcttcgcaaacatttagaaggaagcattattgaacaagtgtatcagcttggattagaccgcattttagtcattgaaacaaaaggacgaaatgaaattggcgacgtgacgtacaagcagcttattattgaaatcatgggaagacatagtaatgttgtgcttgtagataaagaaaaacaaacgattatcgacagcattaaacacgtcccaatggccttgaacaggcaccgtacgcttctacccggagcaccttacgtactgcctcctagtcaagataagcttcatccatttgaagccgttgaagaaaccgtggttaaaaaaattgattttaatagcggaaagttagccacccagctagtgcaaaccttctcggggctttctcctttaattgcaaatgaagtggtgtttcgctctggcttagcgaatcgttctacccttccaaaatcattcgtcgaaacgatgacgctgatcaaagaaggtcagtttacaccgactctgacaaccgttaatcaaaaagactacttttatttactggaattaacgcatttagagggtacgaaaaaaacgtatgcaaccatcagcgagcttcttgaccgctattactacgggaaagcagagcgagatcgtgtaaagcagcaagcgtatgatttagtacagtttatttctaccgagaaaaagaaaaatgagaaaaaaataaaaaaacttgagcaaacgctgcaaaatgcagaaaaagcatctgattatcagctagccggtgaactccttaccgcaaatttacaccttgtcaaaaaaggagatgcgaaagtggatgttattaattattatgatgaaaatagcggtacacttacgatttcattagatccgcaaaaatcaccgtctcaaaatgctcaaagctatttcacaaagtatcaaaaagcgaaaaattccgtttcgattgtaatcgaacaaattgaaaaagcaaacgaagaagtacagtattttgaatcacttattcagcaaatggatactgctactcacaaagacattgcagagattcgtgaagagcttgtggaagaaggatatttgcgcaaccgtcagcaaaaacaagcgaaaaaacaaaaaaacaccacgcctacacttgaacaatacgtttcaagcgacggcacgacgattttagttggaaaaaacaataagcaaaatgagtatttaacaaatcgccttgctgctcgtgatgacgtttggtttcatacaaaagatataccgggttctcacgttgttatccgcagccaagagccttcagaagaaacaattttagaagcggctcaccttgctgcttactttagtaaagccaagaattcaagttcggtacccgtggactatacaaaaattcgccacgtcaaaaaaccaagcggtgctaaacctggttttgtgacgtacgataaccagcaaacggtgtacgtaacgcctagcgaagaacttgtactgaagctgcgtcagtcataataaaaaccccctttctatatagaaagggggtttttattatatagatctagtttagttcatccatgaagggtctgaaggattttcacgccatttaaatagcttgtccatcgcttcttcttcaatgtatcccgcttcgtttgccgcttctactagcgtagagtagtctgttagcgaataaacttgaagttctttttctttaaacagctgacgcgctttttccagctcatatgtaaagatagacacaactcccagcacttcacacccctgcgcttttaatgcatcgactgcggtaaacacacttccgccagttgaaatcaaatcttcaatcacaacaactttttggccttttattacttttccttcgatctgatttccttggccatgttcttttgctttgcttcgcacatagcacattggaagctctagcgcttcacttacccatgctgcatgagggataccagctgtagcggtaccagcaatcacttctgcattggcaaaatacgttttaattaaatgctgcagaccttttgcaatttcttttcgcactttcgggtagctaagcgttagacggttgtcacaataaataggcgacttaattccagaggcccacgtaaacggctcgtttggttgaaggcttactgcctcaatatcaattaattgttttgcaatttcttttcgtagttttgtcatcgcgtaatacgctcccctttccactgctgtaacatctcataatatgccttaagcgggtcttttgctttagtaatagaacgtccaacgacaatggcacttgagccatattctctcgctagctgaggtgttgccacacggacttggtcatctactgaatctgtgcccatacgaatacccggcgttacggtcaaaaagtcctctcctgctgcttttcgaatcgaaggcacttcatgagtagaacatacaacgccgtcaagtccactttttttagcaagcgctgcataatgcgtaaccacttcttgcatcgaatgtgtaatgagctgctgctcttttagcatttcatcagatgtactcgttagctgagtaaccgcaatacaatccgggcgctttttgccggcagcggttcctaagtcaagtccttcaacggctgcttgcatcatgttcattccgcccgctgcgtgaacgttaaccaaatccacttcaagagaagctaaagacttcatcccttgctttactgtattgggaatatcatgaagctttaagtctaaaaagatttggtggttttgctcttttaatgcagaaataatggataacccttctttataaaacagttccatgcctactttcacaaataatgactcttgttgaaaaggcattaaaaactgctgtacatcgttaattgatgaaaaatcaagagcaatgattaacggttgcttcacgctttttccagctccttccgatacattctgaaacatgctcgtatcctaatgatgttaatagccttggcagttcgtcaatgatggttggacatacatacgggtcaacaaagtttgctgtaccaaccgccactgcacttgcacctgcatataggaactcgagtgcatcttcagcagtcgtcactccgcccataccgataattggaatgttcactttttggctcacttcatataccattcgaatcgctacaggtttaattgatgggcctgacagtccgcctgtgccgttcgctaaaaccggctgagctgttttcaaatccagacgcatcccgagaagcgtattgatcatcgttaagccatccgcaccagcttcttcaacagccatcgccatgtctacaatattggatacgtttggtgatagtttaacataaactggaacatttgaaacatcttttactgctttcgttaaacgagcagcaatgacaggatctacgccaaacgcaattccgccttcttttacgttaggacatgaaatattcaattcaagtgcttttacatttgatacggttgaaatttcttttgccacgtgcacatattcttcaattgaagcaccggctacgttcgcgataatcggcacatcatattgctgaagccaaacgagctcttcgttcattactttttctaacccaggattttgtaatccaatcgcatttaacattcctgcagatgtttccgctacgcgaggagttggattgccgaaacgagtgtcagcagtagtcgctttaatcataatggctccaagtgcatcaagtgaataaaattgagcatactcacgcccaaatccaaaacagccggatgctggcataattggatttttcaaatctaatcctggcaatgtcgtttttagcatactcatagaagcacctcccctgcttgaaagacgggaccgtcgctgcagatttttttatacgccgtagaatcttcactttctctgcatacacatgcaaaacaagcgccgattccacaacccattctttcttctaaagaaatgtaaagcggcttgtttgtataattattttctagtgctttcaacatcggagttggaccgcatgaaaacataacatcatataaaaactgctgctcgtcaatcaccgttgtgacaaaaccttttgttccgtaagtgccgtctaccgttgcaatatatgtttctcctaaagctaaaaactctcgctcgtaaaatacgtctgcttttgattgaaagcctaagacgtgaataacctgcacgcctttttcacgaagtctttttgaaagctcatagagcggaggcactccaatgcctccccctactaataaagccgtttgacctgactctatggcatctaatggaaaaccgtggccaagcggacctaacacgtcaatcgactggccggcttgtttttcggcaagcagcgatgttcccgccccttctgcacggtaaatcatcgtaaattgttcgtgcgtttggtcaatttctgcaatactgattggtctgcgaagcagtggcaaatagtcgttgttgacgcggatatgcacaaactgccccggctcattcatgaaacgaacaagctcgccttgaagggttaattcatatacattgtgtgttaacggtcgctgactgacgacttgcatcatttcatgtttgatcatacggttgtcacctctttagttggacgaacttttttcattggtgtggtatggaagctgatcgtttcaagcactcgtaaaatcgcttctgctgtatcaagtgatgttaagcaaggtacaccattttcaactgcttcacggcgaattttaaatccgtcacgtgcaggctgttttccttttgttagcgtgttgatgacaagctgcgcctcaccttttcgtatcacatctaaaagattgtgatcttcatgatgaattttatttactacttttacgcgaatgtcttcttttgtaaacgttgaagctgttccttccgttgcaatcacctggtagccgatgttagcaaaacgcttcgctagcgctgttgcctcttctttatctttatccgctactgtcataagtactgaaccgtacggcttaatggacatacctgacgcaattagtcctttatataatgctttttcgtacgttgaatcttgccccattacttctccagtagatttcatttcaggtccaagcgtaatatctacgcgacgcagctttgcaaatgagaagaccggcacttttacgtagacaccttcttcttcagggtgcatgcctgattcatagccaagctctcgcaaacttgttcctaaaataacttttgttgccacattcgccatcggaatacgcgtaattttacttaagaacggcaccgtacggcttgaacgaggatttacttcaagaacaaacacttctccttttgataagacgaactgaatgttgagcagtccaataatgtttaagccttttgcaatacgtgttgtgtaatcaatgattgtatcttttacatcctgtgacagagtttgcggtggatatacagcgatggagtcacctgagtgtacacccgcgcgctctacatgttccatgatccctggaataaccactgtttcaccgtctgaaatggcatcgacttcaatttcttttccagttaagtagcggtcgattaacacagggtgatcagcgtgtacttttaccgcgtgtttcatatagtggagcagttcttcttctttatacacaatttccattgcgcgtccgcccagtacatatgaaggtcgtacaagcaccggataaccaatttcttttgccacaaccactgcttcttctacggatgtaaccgtctttccaagcggctgaggtacttctaaacgcgctagcgtcgcttcgaattttttacggtcttccgctgcatctaagctttcaagcgacgttcctaaaatcttgacccctcttgcttctagctcgtctgctaagttgattgctgtttgaccaccgaactgtacaaccacaccttctggtttttctaaatcgatgatatgcatcacatcttcaatcgtcagcggctcgaagtataatttatctgaaatactgaagtcagttgatactgtttctggattgttattgacaataatcgcctcgtatccagcttctttaatcgcccacacggagtgaactgttgcatagtcaaactcaattccttgcccgatgcggattggacctgaccctaacactacaacgcttttacgatctgtaacaatcgattcgttttcatcttcaaacgtaccgtagaaatatggtgttgtagattcaaattcagctgcacatgtatctactgttttgtacactggcatcacgccattttgtttgcggaagtcatatacttcacgctctgtttgattccatagcttagcaatcgtgcagtctgcaaatcccatttcttttgcttcctgtaaaacttctacgttatgaatctcttcttttaacacattttcaaaagcaatcactttttcaagttttactaagaagaagagatcgattttgctccagtcatgaatttgctgaattgttacgccgcggcgaatagcttctgcgatgtagaataatcgctcatcaccagctttgcgaatacgtttttcaataatggcatcatcaaattcatgcgcatctttcagctctaagtgatgaacgtttgactctagtgagcgtacggcttttaaaattgactcttcgaacgtgcggccaattgccattacttcccctgttgctttcatctgtgtacctagtttacggttagctgattcaaatttatcaaacggccagcgtggaattttagatacgatgtaatctagtgccggttcgaaacatgcgtacgtcttcccagttaccgggttcatcatttcatctaatgttaagcctaccgcaatttttgctgctaattttgcaattggataccctgttgcttttgatgctaaagccgatgagcggcttacacgagggtttacttcaattacgtaatactggaagctttctgggtctagtgctagctgaacgttacatccgccttcgattttaagcgctcggataattgttagtgacgcatttctaagcagctgatactcacggtcgcttagcgtttggcttggtgctacaacaattgaatctcccgtatgaataccgaccggatcaaagttttccatattacatactacgatcgcattatcgtttgcatcgcgcattacttcatattcaatttctttaaagcctgcaatgcttttctcaagtaagcactgtgttacaggactgtgttttaatccacttgttacaatttcaatcaactcttgctcgttgttacaaattccgcctcccgtaccgccaagcgtataagcaggacgcacgattaccggatagtttacttgttcaacaaacgcatacgcttcgtctaacgaatgaatgatttcacttgctgggacaggctgatttagttcattcattagtgaacggaactgctcacggtcttcagcttgttcaatcgccgataattttgtcccgagaatttctacgttaaattcatctaaaatgcctgtttcatgtaattctaccgctaagttcagtcccgtttgaccgccaagcgttggaagcagtgcatccgggcgttctttacgaataattgagcttacaaattcaaccgttagaggttcaatatatactttatctgccatttctgagtctgtcatgattgttgcaggattggagttcacaagaataactttgtatccttcttcttttagcgcaatacacgcttgcgctcctgcatagtcaaactctgccgcctgtccgatgacgattggtcctgatccgattacgagaattgtgttaatatcttgacgttttggcattagcaattacctactttctgattgtttttcataagattcataaattcgttgaacaatccgtttgcatcttcaggtcccggtgatgcttcagggtgatattgaaccgtaaatgccggatattctttatgctttactccttcaactgttccatcgttaagcgcaacgtgcgtcacttctaatggcgtgttgacaagagatggctcacatactgtatagccgtggttttgagatgtaagagctactttattggtttttagatcctttacaggatggttggatccacgatgaccaaatttcattttttctgtatctgctccgcatgctagcgcaaacagctgatgtcctaaacaaattccgaaaagaggaacctttcctaaaaccccttgaatcatctcgattgcttcaggtacgtcttttgggtctccaggtccgttgcttaacatgatgccatctggatttaattgaagaatttcttgcgcagttacgttataaggaaccacaatcacgtcgcattgacgagctgttaattcgcgtaaaattccgtgtttcattccaaagtcaacgagtaccacttttttacctctgcctgggcttgggtaaggcttcactgttgatacttttttaactgaatcagtcggaagtttatgattttgaagctgtgctaccacttcttctacattgacttccatgttgcatacgcgcccgcgaagcgcaccgtgctgacgaatttttctcgttaattttctcgtgtcgattccagctaatcctggaatatctttttgttttaaaaattcatctactgatagttcacttctgaagtttgaaggagcatcacaaatttcttttacaatcaaaccgtgtacagctggttcaatcgactcaaagtcatcacggttaataccgtagtttccgattaaaggatatgttaatgtcacaatttgtgcacagtatgatggatcagatagaatttcttgatatcctgtcattcccgtgttgaaaacaacttctcctgtcatttctttgtcgctgccgaatccttttccgataaatactgttccatcttctaaaattagttgacgttgcatgctttaacatcctcccatactcgtttaccttctactaatgtcattaccggccaacctttgcatacccagttagcaaacggcgtatttttaccttttgatacaaattcttctggattaattgctttttctgtttcaagatcaatgatagttaaatctgctggttttcctacttcgatggtgccataaggaagattgaacgtttcagcaggcttgtttgttaaatatgatactagctgctctagcgtcattacttcttttaataccaagtttgtataaagaagcgggaaagctgtttcaagtcccacaatcccaaacggcgcaagctccatgccttctgctttttcttccgctgtgtgcggtgcatgatcagtggcgataaaatcaagcgttccgtctaataaagcttcaattaatgcctgttgatcatcttttcctcgaagcggcggattcattttaaaattcgaatcaagtcccgggatatcttcttcatttagtaacaaatgatgtggcgttacttctgcggttacgcgaatgcctgcttttttcgcatcacgaatggcgcgaatggattcttttgtactgacgtgacacacatggtagtgacagtttgctgcttcagcaagcaggacatctcgtgcaatttgaacggcttcgcagatagaagggataccgtttagtccatgttcttttgcgaatttcccgtcgtgtacgcagcctttgttaattaaatcattatcttcacagtgtgcaacgattgctttatttaatgaagcagctttcttcatcgcttctagcatcattcctgttgactgaacgcctactccatcatctgtaaaagcaaatgctcccgcttcttttaagccttcaaagtccgttagttcttttcctaattggcgagtggtaatggatgcatatggcaatacgcgaacatgtgctgtttcttcaatacgcttgtttacccactccatttgttcaacagtatccggaactggacgcgtgttgggcattgcagcaattgctgtaaaaccgccctttgccgctgctagagtacccgtttcaatcgtttctttcttttctcccccgggctcgcgcaagtgaacgtggacatcgattaaacccggtgataagaagttcccgcctgcatcaatgacttcttcattctgtacgtcgatgtgtgaagctatttcagcaattacaccattttcaattttcagttcgacttgttcaattttcccttcatttaaccatgtagcatttttgataattgttgtcattattaagtcccctttcaattggttgtagcgctcttgctaatactgccatgcgaatgtacacgccattttgcatttgtttaaaaattcttgatcgttcacattcaacgagctcatctgcaatttcgacccctctgtttacaggagctggatgaaggataatgctatgtgatttcattttccgctctcgttcaacggttaatccgaagcggctgtggtagttctgtgcaagctctgaagtgttctcttcatgcctttcaaattgaatacgcagcagcatcacaacatcgaccgtttcgattgcttcatcgatatcaagatatgtaccgtgtctgttctcttcatctttccattcttcaggtcccgcaaaatatacggtcgcccctagttttgtcagcatttcagcattcgatctcgctacgcggctatgtcgcaaatctccgactattgcgacttttaatcctttaaacgagccgaactcttggcgaatcgtcagtagatcaagcagacactgagttggatgctgaccgcatccgtctcctgcattaatgatgggaatcgatactttttcctgcagtgcttcataataacgatcttgcgggtggcgaataacaactgactgaacgccgattgaagctaatgtttcaatcgtgtcataaagcgtttctcctttttggacgcttgaagttgttacttcaaacggaattgttgttaatcctagctgctgttctgccatctcaaagctgcatcgagtacgcgtgctcgcttcaaaaaataagttggcaacaaacattttctcttccggtttccatccttgtttattcgttcgatagttttcagcgctgtctaaaatctctagaatttcatttgtttctagtgttgagactgtcactaaatgtttcatatcgattccctccatttttgctttcctcgcatttctttataaaaaaacaccctttctaacttagaaagggtgtaagaaaacaagcttcgtctataacgcgctttttacacacccttagaaacctctctggatttcaattaaaaggcgttctatgaaatttttcgtgctgacgtttgttgaacgttttcggcttcttttatcttctctttcggcagaactagattcagcagaactcccatgatagcagacagtgccatgctatcaatctttacatgttctgagatatctaagtgtgctcctccgattcctaacactaagataatcgaagcaatcattaagtttcgttttgatccaaggtctacctttgcatccaccatcatgcgcaagcccgatgaagcaatgattccgaataagagaattgaaatcccgcccatgaccggcgttggtatacttgaaataagagcgttgattttcccgacaaacccgaacaaaatcgcgaagactgctgctcctgctatcacaaatacgctaagcacctttgtgatggctaacactccgatgttctcaccgtatgttgtatttggcggtccgccgatcagcgcagcaagcatagttgctactccgtctcctaaaatcgatctgtgcagccctggcttttcaatatagtttcgatccacaatcttatttaagacgagaatgtgtccgatatgttctgaaagtgttacgactgctacaggtaccatgataagcacaatccccagtgaaatggacggcgtgtatgtgacaaacggcacgtagaagtgaggtacttcaatccactctgctttcactacctttgaaaagtctaccaatccttgtgtataagcgaagatgtatccgccgataattcccatcagtaccggaatcaggctgataatgtttttaaagaagattgagcaagcaactgttatcgctagtgtcacaagcgcaaccatcaggtaagttaagctgtaatttccttttgcatcgttcatagccatgcctactgctgtattagctagtcctaagcctataaccataataactggtcctactacaactggaggaagcagcttcataatccaattgattcctgttccttttataatcaaagcaacgattccataaacaagtccggctaagaaacagccaaccatcgtttcttcaggtccaaacgaagcttttgcgaaaatgattggcgttatgaacgcgaacgatgaaccaagataagaaggaatttgacctcttgtaatgagcaagaaagcaagcgttcctaccccgcttgaaatcaaagcaattgccgggctgaacccgactaggaacggcactaacaccgtcgacccaaacattgcaaacaaatgctgtagactcaatgttaaccaatttactgcttttggtttatcatgtatatcaagtacaaaatctcgttgttgactcatatgtttttcctcctatcactattaaaaaacctctttacgcagaggcaaagaggttttcagcatacaaggaagacgttataccgcagtatagttttccttgtatagtgacccaccttttgcagcctcacgggactaccatttaaaagggtgtataatttatttttcgtaaatagacacgtggtctttttcatctacttccattaaatgcaccgcaattttttcacttttagctgtcggcacgtttttgccaacatagtctgctcgaatcggcagctcgcggtgccctctatccactaaaacagccagctgaatgagttcaggtcggccgatatcaatcagtgcatcaagtgctgctcgaaccgtacggcccgtatataacacatcgtctactaagatgacgttcttatttgcaatatctgtcggaatatctgatccttttacgagaggctcatcattgcttgtcactttcgataaatcatctcggtaaagcgtgatgtctagttctccgactggcaatgtatttccttcaatttgtgcaattcgttctgctaaacgttttgcgatataaatacctcgcgttttaatccccactagcacacaattttcgattcctttattcttttcaataatctcatgtgcaattcgagttaaagcgcggcgaatagcctgttcgtcaagtacggtagcttttacgttcactgtttttcacctcaagttgttgacataaaaaaatcctcttgccttgaggcaagaggatttggtttcagacatatttcttcaaaaaggctataagtatgccttttctgcaccgtatccttctcagcctctctggactgttcttaaaggttcttattaagttaatacaagtatgccatcacttatggcagttgtcaacttcttttttcaataagctctagcatctcattaaactcttttggagccggtgcttcaaattccatatattcatttgtacgagggtgaataaagcctaatacacctgcatgaagcgcttgtccgtcaatcggaagcgtttttttcggtccgtacttcggatccccggcaagcggaaagccaatatacttcatatgaacgcgaatttggtgtgttcgccccgtttctagcttacattcgaccagtgaaaaatctttaaaacgctgcaatacagtaaagtgcgtcactgcatcacggctgttttcatcagtgaccgtcatgctttgacgatcttgcttatctcggccgattggcgcatcaattgtaccgtgatcgtgcgcaattactccgtgaacgatagctttatagcgacgcgtcactgttttagctacaagctgactaactagtgattcatgagctaaatcattttttgcaaccataagtaaaccggatgtatctttatcaattcgatgaacgataccagggcgcataacgccgttaataccggataaatctttacagtgagccattaggccgtttacaagcgtgccgctatgatgaccaggagctggatgtacaaccatgccgcgaggtttatttacaacaagcacatcttgatcttcataataaatatctaaatccatttcttccgctaccacatcaagctcttctagttccggcacttcaataacaacagcgtctcctgttttacatttatagtttcctttaacagttttatcgttcacttttgcgtgaccttctttaatccattgctgcacttgtgaacgtgaccattctgcatttacagtcgaaagtactttatcaatacgttctcctgcttgttcttcatttataactgtttcaattacattcattctttgtgctccttcttcattttcccttcaaacagcgtcataataaacatgatgattactccgacgacaagtgccgaatcagctacgttaaaaatcggaaaatcatacgtaaagatgtatgtatttacgaaatcaactacttctttacggaccactcgatcaataaagtttccaatggcgccgcctaacattaatgctagcgcaataccgaaccatttatcttgttttttgagcttttgaatataaattattaaaccgactaccacaaccaccgtaatgagataaaagaaccacatctgtccttgtaaaatcccccacgcggctcctctgttacgatgagaggtaatgtaaagaaagttttcaattacggtgatgctttgtccataatacatttcttttacaatcatccattttgttacctgatcaataagtataacagctaaagcgataagataataaaacacaaacattttcctcccgcaataaaatcaaacgaatccatactaaagcattttagcacataattcattttttttctcgcttctcaccataaaacaaataaatcttcatttgtgcgggccgttggcattacttttaatttatgaatagacatcaattcgccagttagttcatcaattccgaacgcaccaacgtcaagctttgctaacgcgtgttctacatcttttaaatcggctttaatcatttctattacgtaacgttccttttcatctatataaccagattgttctgtagcatatctcaataggcgatcttgtaattcttctttaataagagctaattcctgtccaatggaaagataattttcatacatgcaaacgcctcctgtgctgataagatgaagtattaatgatgttaggtttaccgagttttccatcgaatctacaacacaagtttttcctaaggctttaaatgctttataccattgtatttgggaatttcgtacagcaaaaaacacgcccaaaaaggacgtgtttttgttaattactgctgaacgtagtgattttttacaacatccgcacagcgtgtacataaagtcgggtgatcttgatcttcgccaactgttggtgatacaacccagcagcgctcacacttctcaccttctgctttacttacaacaattgaagcatagctgaatttttgtgcttcagcaggtgcttcaccttctgctacttcaagatctgaaacgatgaagagttgacctacattttcagaaatagatgctaacagttctttcgtatctgctgttggatacagcgttaattttgcttctaaagacttaccgattactttttcattacgagcttgttctagcgcttttaatacttcatcacgaagctccatgaatgcatcccatttctctactaattgatctgctccttcgatttcttgaacctctggcatatcaactagctgcacgctttcttctattacatttggaatgtgaacccatacttcgtccgctgtatgagaaagaattggcgacactaatttcgttaacgataataacgtttcataaaggaccgtttgaatgctgcgacgctctacattattttctgcttcgatgtacaatacatcttttgcaaagtctaagtagaatgaactcatatcaattgtacagaaattatgcactgcgtgataaatgcttgagaattcatatgaatcataagattttttcactttatcaattaatttgttcagcttcacaagcatgtagcggtctacttcacgaaggtcttcaacggctacagcatcagttgttggattaaagtccgctaagtttcctagcaagaaacggaacgtgttgcggattttacgatatacttcagctacttgttttaaaatgttatcagatacacgaacatcagcttggtaatctacagaagctacccataaacgtaaaatatctgcacctagttgtttcattactttttctggaattacaacatttcctaatgacttactcattttgcgaccttcaccatctaaagcaaatccgtggctaagtacccctttataaggtgcttcaccggttacagctacacttgtagaaagacttgaattaaaccagccgcggtattggtcagaaccttctaaatacaaatcagccggacgctgtaagtcttcacgttcttcaagaacagcttgatgtgaagaaccagagtcaaaccatacgtccatgatgtctgtttcttttgtgaagcggccatttgggcttccttcatgagtaaagccttccggaagcaagtcttttgcttcacgctcaaaccatacgtttgatccatgttctctaaatagatttgatacgtgttcgattgtttcgtccgtaatgattggctcatcattttcagcataaaataccggaatcggaacgccccatgcacgttgacgagaaatacaccagtctccgcggtcacgcaccatgttataaagtcgcgtttcaccccaagtaggcacccattttgttttttctactgcttttaataaatcttcacggaaatctttaatagacgcaaaccactgtgccgttgcacggaaaattgttggtttctttgtacgccagtcatgtgggtatgagtgggtaatgaaacttaattttaacagcgcgccttcttcttctagtttgtctgtaattggcttattcgctttatcatagaataacccttcaaatcctggtgcttcattcgtcatatgacccttactgtcgactggacaaagaacttccaaaccgtatttttgaccaacgataaagtcgtcttccccgtgtcccggtgctgtatgaacacacccagtaccagcatccgttgttacgtgatcgccaagaacaactaatgaatcacgcttgtagattggatgctcagctactacacgctcaagttctgaaccttttaccgtacgaagcgtcttatagtcagcccattcaatttctttagcaactgtttcaatcagttcagttgccactacatattttgctccatctgcttcaactacgctgtactgaagctcaggattgacagcaatcccttggttagctggcattgtccatggtgttgtcgtccaaatgatgaatttttcatcttgttcaagcacacctttaccatcttttacgttaaacgctacgtaaatagaagctgaacgcttgtcatagtattcaatttccgcttctgctaaagcagactcacttgaaggggaccagtacacaggttttaaccctttgtagatatagccttttttcgccatgtcaccaaacactttgatttgctgcgcttcgtactgcggctgaagcgttacatatggattatcccaatctccgcgtacgcctaaacgcttgaactgctcacgctggccgtttacttgttcccaagcatactgttcgcaaagcttacggaactcagctaccgtcatttctttgcggtttacttttttattttttgttaaagctgtttcaattggcaaaccgtgtgtatcccagcctggtacataaggtgcgcagaagcctgacatcgacttatagcgaacgataaaatcttttaaaattttatttaatgcatgtcccatgtgaatatcgccattcgcatatggaggtccgtcatgcaggacaaatagcggacggccttccgtacgtttttgtactttttcataaatattcatttcagcccactgttcttgcattttaggctcgcggttcggtaaatttccacgcatcggaaattcagtttttggcatcaataatgtatctttatattccatgttttaccctccaaaaaaagcgtaaatttcatatctttttgtaccataacaaaaagaccttctcatcccaaaaagggacgagaaggcctcccgcggtaccaccctagtagatttgctgcacgcaaatcctctttgcattcgtaacgtgaataaaccgccactgcttactatcatcagttcagcaatggtactctagggtgattttcacttttttgtttgttatcgagctcgcaccatcctcgattcgctttgacaaactaaaaaagctactgtccctgtctccgtactgtttgatatgaaatttcatctgttaccaaattatatgacaacaaaacgtgagaagtcaagatgatgtcttgactagtcaattttttcttctagcgctggcatctcataatccatcaactgatcccagtcgtcgctgtttaacatttcaagctgtgcttcgattaacattttgaaacgagttctaaatactttagactgctttttcgtctcctcaatgtccatcgcaattttacgagacttagacagtgcttcgttaataatacggtccgcatttttttctgcttcttttataatgagcttcgcttctttttcagcgtttcgcttcacatcttccgctgcttcttgagcaattaaaattgatttatttaacgtttcttcgatgttagtaaaatgtccaagacgatctgttaattcagatactcttccttctaactcctttttatcacgcatgaccagctcatagtctttaattacttggtcaagaaactcatttacttcatcttcatcatatccgcgaaacccgcgattaaactctttgttatgaatatccaaaggggttaaaggcatctaggccacctccgtgttgtctcattacgtcattagtaatggtttattcgacatatttttaaaatttcctgctagtagatttctttatttctgctttcctacaacaattcgccatttttcttttttagttttgccttcaagtgaaacgatacgacttctgccgtgaccacgaagcgacaaaatatcaccttcatgacattcaaaagaaggctgttcaatgactttaaaatttacttttaccgctccatttgcaataaacggctggactttttgtcttgataaattgtgaatagtcgacagcaaaacatcaagcctcattgaagaaactgtataaacgtgttcaatcagctcttcttttaccacatgcagctgctctctttgaatagaagaaagtgaaactttggattttccaattgatgttaaattcatctcaatataagaagaaatttcctctgcagctacaacctgaatatcgtctcccgcgaccaaaatatcgccaaattttgaacggcgcagtcccaaggacatcgccgaaccaagaacttgaggatgttcaatcgtcacaaactttttaggataattgagctcatacatatgcaactgaaaatcttcgctttcaggtatatagtaatccggatatagcagcgcacgcttgcgttcagcaaacggttgtccaccatcaaatgaaacttgaacctctccttcagtcccgacaatagccgtcacaatctgctgctctcttggatctaaaaagtccgttaattttgggctgtattgatgtaggacatcttctttccactgaagaacctggtcaataaatccatgttcttcttgcctaaaatgttcataaatagacatattattactcctactattggtatgtaaaaaaggaatccagcgattcctttttaaataaatccaaccatactgtgaagtgaacgtacacctgcttgcgcaaatcgtagtaaaaagattgcaacaagaggtgaaatatcaatcatgccaataggcggaatgattttacgaaaaggctctaagtaaggctcacaaatactgccaagcagctgaccaaacttagacgcccttacatcgggtacccaagacatcaaaatgtaaataatcagtgcccatgagtaaagaccaattaattgcccaagaatcccaaaaacgatatccaaaaactaccacctctttacgtttgttgtatcatgttctcccatcatatctgaaatgcttccgcttacgtctacattatcaggtgtacataaaaagatgtcggttccaattttttgaatgtccccgcctaaagcataaactgtaccacttaaaaagtcgacaattctcactgcttgatctcgttgaatgcgctgtaaattcacaactacgactttacgattttttaaatgatccgtaatttcttgtgcttcggcatagatgcgaggttcgcaaagcatcatttttgatgatttttgaacgctttgcaagctaatcacgttttgctgctgattcggctgctgactagctttcgctggtctcgactgctgtacaggctcttctaccgactcttcttgttcgtaatgttcttctacatattcagtatcgtcatcaagagcaaaaaaacttctaaagcgatttttcatactcatcttgaattacacctccttaacgttcattcccaactaacgtggttcctagtcgaatgaatgttgctccttcttcaattgcaattgcataatcgtttgacattcccattgatagctctgtacacggtgcatatggcaagtttagttcttgtatgcggttctgcaatttttttagaccttgaaaacaactgcgaagcgtggactcatcatctgtgtgaggagccattgtcatcaatccgactacttgaatatttgtaaattcttcaagagatttaataaatggcattacgtcttctacagcaaggccatgcttggattgttcttcggcaacattaacttgtacaaaacattttatacgatgttctgcacgtttatcaatttcttttgctaaagataatcggtctaatgaatgaatatagtcaactttatcaatcacattttttacttttcttgtttgtaagcttccgataaaatgccaggtcgctttctcaccgattgattcatacttttctagaagaccttcatccctgttttctccgagatgtaaaatgcctgcatccactgcttctgctgctcgttttgtggaaacgtattttgttacagcaatcagctctacatcttctcgatttcgattaacttttttacacgcttcagcaattgtttgttgaactgcttctagatttttgcttacgctagctgtcactatgtaattactcctccttaaagcctatgaagttaaacatgcgtcctgttttcccctggtcgcggcgatgtgagaagaacaggtcatcttcacagcttgtacaatacgacgatgttaaaattcgttccggcaatacgcctgcgttttgaatcagcagcttattgactttttttaaattaagcgcgtattgtccagagcttacttcttgatatccattttggccaactacttcgtttacttgtgtaatgacgcggttatcgacaacataacagcaatcttcaatcgaagggccaatcgccacgtaaatatcttcaaccggaacattttcctgctctacccaacgtcgaatcatatttcctgcaatatcttttactgttcctttccacccagcatgagcaagaccaactaaatggtgatcaggcgcatagaagtacagcggaacacaatctgcataacataaagctaacaaaatatcagattcatttgtataaataccatccgttgcttttatgccctcttcatacttgtagagtccttttgcacagtcggcttttgttactttttgaacagttgcttcatgtacttgttcagcacatacaaagctttcaaaagacatgtctagttcggctgctaaaatttttctatttgtaataacatcttctacgttatcgtttacgtgaagccctaggttaaaagaagcaaatggaggtttactcacgccaccattttttgtggtgaaaccagcaacaagcatatcattcttttctacccaagggctcagccacataaacgactcgtgatggcttttttttaatggctcaggattcatgtatgtgacacatcccttgtttcatttgttctcacatattgtaccacagattgctaggtgctgttgacaaaaaactaattctcttcaggctgaaatgcgtctttataacgtactaaaatgacatcagaaccaattttcacaatatttttccacggaatcacaatttcatcatcttttccaaagaagcccaatacacgagagcctccgataatgacggcctgtatctttcccgttgttaagtcaatatcaatatcccctacatttccaagttttttgccatcagctacattcactacatctttcagctggaattctgaaatctttaacatgctctctcctcctatagccaactttattccttagcctatatatattttcaaattttcatttcatgaaggaaaagcttattttttctctgccattctcgttctataggcattttgttcactaattacacatcttttcatcaaaagacattctcaacgagtagctagaagtcctcacatcaataggaaatctgataggaatatcttttggtcatgtattatacattgatacatacaaaataagcaccgtgtcagtttttatagacacgatgcttattaagttgaacatcaaataaagtgaatggtattaattgtatgaacgcgagcagctgccagtttagatagcttttgttaactttgaatatttttattcatctgtttaatagcagctttttctaaacgagaaacctgcgcttgagaaataccaatttcttcagccacttccatctgtgttttaccttgaaagaagcgctttcgcaaaattagtttttctcgctcgttcaatcttctcataccttcttgcaaagcaatttcttcaatccaagttgaatcacggttgcgttcatcgcttagctgatccatgacataaattgggtctccaccatcattgtagataggttcaaatagagaaaccggatcttggatagcatctaaagcaaacacaatttcttcatgcggcacttctaggacttttgaaatttcctcagctgtaggttccttggatgtttcactcataagcctttcacgaacttgaagagctttataagcaatatcacgaagggaacgagaaacacggattggattattgtcacgtaaatagcggcgaatttcccctataatcattgggacagcatatgtagaaaacttcacgttttgacttaaatcaaaattgtcaatggatttcattaatccaatacacccaacctgaaataagtcatcaacaaattctccacgattgttaaaacgttggatcacgctgagtacgagacgtaaatttccgcttactagcttttctcttgctgttccatctccagcctgcatttgtttaaacagctttcgcatttcttcattttttaatacgggaagtttcgaagtatctactccacaaatttctactttatttcttgtcaactctttccctcctaacaggagatgatgttctgaattcagtatctcctcagaaggaaaaaatatgcacttttacaattctgacaattctccactaaaaaagctgattgtataagatgcttctcagcccttatacaatcagcttttttacttaaaccattttattaaattcttttcgcagccgtttaataattcgtttttcaagccttgaaatataagactgagaaatgcctagcatatcagctacatctttttgcgttttttcttctccgccggctagcccaaagcgcagctccataatttgcttttcacgatcatttaattggtgcagtgctttcaacaaaagttttcgatccacattcgcttctaggtcttttgtgatgatatcttcttcggttcccatcacgtcagataatagcagttcgtttccatcccaatcaatatttaacggctcatcaaatgaaacttcggatcgaattttattgttgcggcgcaaatacattaaaatttcattttcaatacagcgagaggcgtacgtcgctagcttaattttcttttcaggattaaacgtgtttactgctttaattaaaccgatggtgccaatgctaattaaatcctcaatattgattcccgtattttcaaacttgcgggcaatataaacaacaagtcgcaaattacgctcaatcaacagcgaacgtgctgcttcatctcctgatggaagtttttttaagagcacttcttcttcatcttttgttaaagggggtggaagagcttcacttcctcctatatagtacacttcatctgtttttagcttaagtttaattaataatttgtaccaccataattgaaatcgaattcgatatgtagccattctgtatcctcctttatttgttcacaccttttacgatgcggaacttacttctccaataacaataagcttcggatgaacaatacactcatattgcttctccactgaaagcgttgtatgactaatacctactaatactttagtgacttcaatcgtattggactgatgcaccagccttaccatatctggctttagagcaagcagcagctgattggcttggcccacgcttcgataagggacaaagcggacttttgaataccactcttgatcaatatcttcgctgtgtgaaaaggattggacatttttgcttaattccattaagccttcaggcaatatttcttttaaagaatctgctgtaacaatcataaccggggttttcgtcagcggatctacaagctggtttccactatcaataagtcctttcatcgacagcgtctgttcgtttaaaataacttctacatctaccagctgatcaaatgtaatgtttttcattcgcaaatcatcaactcgtgcttttgaaaaataagataatagcggaaaaccgataagaacaaatatccagctaataggatcaccaaactgtggagatttcgtatcaaccatttgattaagaacaagaaactgatcttgaaataaaaagtgaacgcccattaaccctccaccaacaacaaaggttgtaaaataaaacgttaataaattctcaaagaaaaagcgcagtcgtttataaccaaacgtcatcaataccataaaaaaagagaataaaattttaatagcagggtgaaccatgagatgagaaaaaggcgtaaacataagaaggacaattaatgaaccgataaagccgccaagcaaaagccgccaccacttgtaattccgtttaagtacaactgcacataacattagtaaaatcgtatctaacccaaaattcagcatccatattaaatctaaatagattggcaatgtttataacctctccattctttctgaatttttctgttaaaaattagtatatagtacatcctattagaaagtctgtcagttcatgccgagaaacaagcagtatttttgaggaaatcattcgatatttgtcacaccacttttagaaagaaaacacaaaccctttgaaggcatcatattgaccatgtcgaatgttttttatattctttttgagttttctagattcattgcataaaaaaagacctctgtataaaacagaggtcttggctttttattttcttagcgtctacgattacggtttcgtaagaatgttggaatatctagcgcatcttcagactgtggctgagatggacgcgtatattcttgctgtacaggttcttcacgctttacttcacgcttcggctgtggagccggttgctgtgtcgattgctgcatgcgattcgctgataacgaaggacgacctggttttggctgtgataaatcttggtcactaaagccagttgcaataactgtaacaacaatctcgtcttttaggttttcgttaataacagatccaaagatcatgttcacttcttggtcagaagccgaagcaacgatatctgcagcttcttgtacttcgtaaagacttaggtttgtaccgcctgtgatgttcattaatacaccttgagctccatcgatagatgtttcaagaagtggacttgaaatagcttttttagccgcttcagcagcgcggttttcaccagtcgcaataccgatacccataagggcagatcctttgttagacataattgttttcacgtcagcgaagtctaagttaattaatccaggaactgcgattaaatctgaaataccttgcacaccttgtcgcaatacgttatccgcttcacggaacgcttctagcattggcgtgtttttatcaacgatttctaataagcgatcattcgggataacaatcagcgtatccactgcttctttcattgacgcaatgccgcctgctgcttgagtagaacgcttacgaccttcaaacgtaaacggacgagtaacaacacctaccgttaatgctcctagctcacgagcaatttgggcaatgactggagctgcaccagttccagttcctccacccataccagctgttacgaaaaccatgtctgcaccttttagggcttcttggatttgttccttactttcttcagctgcttttttaccaacttctggattagcacctgcacctaatcctcttgttaatttagcgccgatttgcattttcgtttcagcttttgataaatttaatgcttgtgcatctgtattaactgcaataaattctacaccttggacgccatgttcaatcattcggttaaccgcgttgttaccgccgcctccgacaccgattactttaatcgtcgctaattggtctacacttgtatcaaactccaacatgatagttcctcctaattcttcgaaattaccaatccgtaacgttaatcaaagaagtatccaaaaaacttcttcattaaattttggtcatttttctttttcggctgctcagctgattgttgcggctgctgtggtttcgggctaggtttgatcatttcttgctcaatcggctcttcttccacaactggcgctccaatttctcggccttgtattttagcatttttgtatgcaaattttattaatcctacgcctgttgtataatgcggctcacgtactccaatataatcaggcactgctatgcgcacgttattctttaaaattacttgagctagctcaagaataccaggcatcgctactactccgcctgttaaaacaaatcctcctggaatatctttatatcctaggcgatttacctcctgcgtaatcatatctaaaatctcttctaatctagcttcaataatatcagagatttcgagctgattaaactgctgatgctgatcgcttccaatgatcggtacactaaatacttcttcctcagaagcatgatcgtagaaagcatgtccatgctttatcttaatattttccgcatcttcagtcgatgtgcgaaggccaatcgataaatccttggtaatgtgctctccgccaacagctagtacatttgttactttcaaatgtccttggtcaaagatcgcaaccgttgttgaacctccaccgatatctaccagtgcgacacctaagtttttttcatcacgagataatgcaattgaaccagcggctagaggctgtaaacaaatatcactgatttctaaaccagctctttctacacagcgtaataagttatgtaaaaccgttctagatcctgttatgattgtaccttccatttctaaacgtaccccaatcatacctctaggatcgttaataccttctaagccatctacaataaattgctttggaataacatcaatgatttcacgatctggcgggatagacatgacttgagcagcatcaattactcgatgaatatcttcgtttgtaatttcacgattctcgcttgacacggctactactccgtgacaatcttgtaaaaatacatgatttccgcttatgcccactacaacctttttaattgtaatgcctaccattcgttcagcttgttctactgcttttctaatagattgaactgttgcatctatatcaacgatagaacctttttttagtccgtgtgatttaacattccctacaccaatgatattcaatgaatcgttactcatctctccgatgattactttcacactggatgtaccgatgtctaaactaacgtatatttcattgctgttcattctttggcacctcctttttctttctgcacatgtcatcttaataaattaagaagaacaacaatattaattttttattatatgaaaatattcaacaaatacatctgtttcccttttgtaaaatcaatttttttcaagtttttcacagactttatctctttcaaagaacaaaacgttctggttttgacttttttttagatttaagcctaaaattcactgaaaaaagctatttaactacaagtctacactaagatgtacactgagaaaagcgaaacttacctagaacaaatattacatttccatttcacagcaacggagaagaaaatcatatgtatgcagaatacttgcatgtgattatacaatgtacaagggctagtttgccagtctcaactcatctatttcctttaattaacacttataaaaaataattactgcttgctctttttataaggtttaaatgcatatccttcttctaaatcaataatacctttttgatcatcactcaatttacttgcaatagctgggtaatgaacaattttatcagagaagttgctaattttcccgcttacttcacgcgtatcattcataaacacctcgatgtgaagaggttctgattttgtcggcgcgtagtaaatctcagaaatagccccttttatgctcttaggcgttttagctaattcttgaaccatgctttgtatagcgtctccgtctttccagtcaattagcagcggagcgtcggatgacactttcttagcacttacttcttttaaaacttttccattttcattcacagggaaatatttattccccgaggttacatatgcaattcttgcatactcttttacgtcgattacgaccttattaggaaatgttttgtgaatgacagcttcctttacctcagggtttttctcgactttcccctgaatttgatcagcatcagctttccagtagctggtttttttggacagaccactcgctttgacaatatccttatcacttacatgtttattcccttgtacttcaatgttagaaacattgctcagagaagattgagaatacacaataaataaaataaggatgaaaaagagtgataaatacaaaataagccgtctatttgctttttgctttcgctgttcttgcagcttcggtacccgatcttctaaaacaattaacttacctttttccatttttttcacccttatccatttgagaaaataaacgaagaattaccatctatttatttccaatctttgcttcatgagaatatccccattatagcatagaataaacacataaaagctaccttttcacgcataaccatacagcgacgggctgagtaattagcggccgataatctcaacttctgtatgaatatcaatatcgaatttctctttaattgttttcttaacatgagcaattaaattcagcacgtctgaagccgttgcatctcctgtattgacaatgaagttcgcatgctgctcactaatttgcgcaccgcctactgaaaaaccttttaagttggacttttcgattaagtctcctgcataatttggaagcggatttctaaaaatacttcccgcacaaggaaaattccaaggctgtgtttcgcggcgatagtctttatttttctgcatgaccgccacaatatcatctttcgttccctttttcaaacgcagcacggcttctacacatactccgggacggtctttttgtagaattgaatgacgataagaaaattgaagctcttcatttgtcagccactcaagagtgccatcttcaaataaaatcagcgctttttcgactacatgagacatatcagaaccatgggcacctgcattcatataaacagcgcctcccacagatccaggaattccacttgaaaactccaatccagacagaccttgttttgtaataactgttgcaagcttgatgctagggtatcccccacctacagtaaccgtctctccatctactgttaaatcatctaatccggctccgagcttaatgaccacaccttcaattcccttatcagaaacaagaagattagatcctcgaccaatcgctctccatttcacgccatgttttttaataatatccattgtaacttttaagtgatcaacagaatcaggttctacaagcacatctgctggaccaccaattttcattgttgtatgttttgctagcggttcattttcacgaacctttccaatattcgcttcgactaactcttttactaacgcttccataagaacctcctaaaaccctctttgctgttataaaactttcatgtcaatgcgcccttacttctaatgcataagaataataagaacagattcataactaagcagcagcaccttgtaagatacgttttttctacaaaggcactctattctgttgtcaatttcatcatttttatttatcgtatgacattcacccatagaatgtacgttcatctgctatataaagtaattttgattgtttttttatcgtttttcatttagaagttaaacacatgctgacagtcataaaaaaacgctacgctcataagtgcacatacgttcacctaatcactaaaataaaatatttaaccttacacatcataccatagttggactcaaaattggttatcacaacattacattttaaaaacatttcatacaaaaatatcatctacctgtaaaaaatcgaaaataaaccgccaacaaaatccggcgtgcacttggatttaagatgacggtttacttcagtagaccattgcctacttgacattatacaattttttttaattaatagcgagaatatctactaacatttaacaaaactccaactgctgccagcatgagcgtcagcgatgatccgccgtaacttaaaaatggaagcgtaattcccgtaacaggcataagacctgttaccacgcctatattaatcatgacttgaatcgcaaccattgaaataattcctaaggctaaaaacgttccgtaaagatcaggtgctccgagcgctactttaattcctctccaaagcaataagctaaacaaaagcagaacaagtgttccgccgatgaaaccgagctcttctgccagaatagcaaaaataaaatcagtttgaggctccggcaaataaaagaacttttgtctactttgccctaaccctaatccaagcaatccccccggcccaattgcataaagagattgaatgatttgaaacccgcttccaagcggatcttcccaaggatttaaaaatgaagtgatgcgtttaatccgataaggagccgataaaacaagccctacaaaaccggcaacgccaagcaacccaagacctgcaaagtgacttacttttgctcctgaaacaaaaatcatgactaaacaagttccaacaagtaccgttcctgttcctaaatccggctgcagcataataatgccaaacggtaagaaaaccagtaataatgccggtaacattccttttctaaaggatgtaattttcttctgattttctgataaatatttcgctaaaaatataatcatagcaaacttcataaattctgaaggctgaatcgaaaacgctccaacacctatccaactttgcgacccattccgtactagccctactcccggaattaatacaagtaccagcataacaaagcaaatgattacaattggctttgcccacgtacgccacatccaataatcaatattcatgatgacaaacatcgcgcatactccaagccctgcaaataagagctggcgtttagcaaagaaaaaagaatcattaaacttgtatgtagcccataccgcacttgcgctgtataccatgataaggccgatggttagcaaggaaagcgtaacgattatgagaaaaaaatctggggtagacctttttgtcgacactgtcacacacctctaaaaatagattagggctagtgtattttctaggtgtttagacaagcccttatttcagtttatgcacagattcaataaagatgtcaccacgttcttcaaaagttttaaattgatcccagcttgcacaagcaggagataataaaataacatcttcttcatctgaacaagcatatgcttctgaaactgcttgtttaacattatcgacacgttttacaatttgtattcccgcttcttttgctacgcgttcaattttaggagccgtttcaccaaacgtaataacagctttcacatttttaaactcttcttttaaatcatcaaactcattgccgcgatcgagtccacctgcaagtagaatcgtcggctgcgaaaaagcggaaagagctacttttgtagcaagcatattcgtagctttagagtcattataaaacttacgtttgttgattgtcgtgacatattgaacgcggtgtttaacaccagcaaacgttgtgagcacgcggtagatagcttcatttgaacagccgtacagcttcacaacggatacagctgctaaaatgttttcttgattatgtctgcctggcagcactacatcttttaaggacatcacttcttcatctttaaagaaaatggtttcgtttttaatatacgctccttctgtcgtttgagctgtaacagaaaaaggtacttttgtcgctttaacacctgcactagctttcatcactagctcatcatccgcattaataacggcaaagtcttcatttgtttgattgttaaagagatttgctttcgctttgatatattcctcttttgtgccatgatagtctaagtgagcatcaaacaaattcaataataaagagattttcggacggaatttttcaattcccatcagctgaaaagaagaaagctccgttacaattacattgtcctttgttgctttttgcgccacttcacaagctactgttccaatatttccagcaatcaacggctgcttttgatcttcttctaacattttataaattagcgttgttgttgttgtcttcccattgcttcccgtaattccgataaaaggagcttcactaatttcataagccaattctacctctgttaaaatcggaatatttcgttttaatgcttcttgcaatagaacatttgaatacggaatcccagggttttttacaataacatctgctttgtctaaaagctcaagcggatgatgtccacagacaacttcaatgcccgttttttctaattcctgtgctgctacgttctcttcgtacggtttttgatcattaacgactactttagcaccaagctgtttaactaactgagcggctgctaaaccgctcttggctaatcctaaaataagtacttgtttaccttgatacgtattgactgatttcatttaaatccacacctcgatataaattccaagcattgcaaataatagtcctacagcccaaaaagtcataactacgcgccattccgaccagccgcttagctcgtaatggtgatgaagcgggctcattttaaacacacgttttcctgttgttttgaaagatgcgacttgaataataacagatagtgtttcaataacaaacacaccaccgataataacaagcaagaattccattttcattaagacagccaccgtagcgatagctcctcctagcgctaaagaacccgtatctcccataaatacttttgcaggatgggcattaaaaactaaaaatcctaacacagctcctactacagcaactgagaaaatagatagttcaaactgttctgcattccaggcaagaactgcaaatgcaccaaaagcaatcgcacttgtaccagatacaagtccgtctaatccatccgttaagttaaccgcgtttgaaaaaccaacaagccagatgatgaggaaaacaacataaaaccaacctaaatcgattgggtctttaattcctggaatcgtcacttcagttgaaaactcaaactgtcttgcaataaagtaaaaaataattgaaatgacaacctgacctaaaaacttttgtttagatgttaatccaaggttacgctttaacactacttttataaaatcatctaaaaatcctaataaaccaaatccgattgtgacaaataataatagaaacgtcttatatgtaagttctgcatactgattgaccataataagagttgccacaataatagataataaaatcatgataccgcccattgtaggtgtacctgattttttctggtgagatttcgggccttcatcacgaatactttgaccaaactttaatcttcttaagaagggaataaaaatcggcgacaatacaaccgtaatcaaaaaggctacgccgattgtcaataaaattgattgttctagcacgatgccccctccttaacttccaactcattccgactcattttgttctctacccatttcattactactttcgctcctcaatcattttgcgtgctacttctcgatcgtcaaaatcgaatacttttttaccaataatttgataggtctcgtgcccttttccagcaatgacaataacatcatctgcatgcgctgcttccactgcatagcgaatagcttctgcacgatcagcaatcgtcacatagttatctgtatccaaaccctcttccatatcttttaaaatagccaatggatcttcacttcgtggattatccgatgtcaaaatagcttgtgtactgtattcagctgcaatccgagccatgattggtcgttttgtacgatctcgatctccgccacaaccaacaataacatatatattgcgttttgcgaattcttttacagtttttaacacattctctaagctgtccggcgtgtgggcataatcaacgataaccgtaaaatcttgctccgcatcaaccacttcaaaacgcccagacacgccttctaacacttttatttcctcgacaataactgacagaggaatacctgacactaaacatgaagccgtagccgctaatacgttgtagacgctgaatttcccaataagcttcatttctacacgaaccgtttctgtcggcgttgtcaagtcgaacgttgtgccgctgtttgtaatttgaatatttgttgcacgaatatcactgtcacggtcaatgccataggtaatcactgtagcagccgtgtttttaatatattcctcggttgccgcatcatcagcattaagaacagcgaatttaggacgattatggttataagcgtttcctaactgtgcaaatagcaaccctttcgcacgacgataatcttccattgtatgatgatagtccaggtgatcttgcgttaagttactaaatactgccacgtcaaagtcgcacccgtgtacgcgtcctaagtcaagtgcatgagatgatacttccatcatcgctacttctacattttcttccaccatttggtgaaatgttttttggagcgtaagcgattcaggcgttgtgtttttcacatcataagacgtatcaccaatacgaatttcaatcgttccaattagacccgtctttttatgttgtgatttaaagatatgctcaattaaatgtgtaatcgttgtttttccatttgtgcctgttacaccaattaaatgcattttttgtgtgggctgattgtagaaagcatccgctagcactgccattgctcgttttgtactctttacgcgtacaacaggtacttctacatccacaggcttttctgctaagattgctactgcccctttttccacagccatctgtgcaaagctatgtccatcaactgtatagccgtctatacaaatgaacaatgctccgggcttaacttctcttgaatccatttcaattgacgtaatatcaatattctgttcaggaagctgaacaaaatcatgtaaatgtgttagtagttctcgtaaatccattcctaccatgtcctctctatttgtaaagtgaaacgtttgttataagacgctatggcaactattcttctttttctagcacctaacctattacattttacagaaaaagaagcccggagggaacacccccaaggcttatttgttgatttcatgttcacacgcagagtaacctgctgattatcatgcaaggaagaatagtggtttatagagatttttattttcccatataaattctaaccgtttcgccttctttaactttcgttccggcttcaggagactgcttgaccactttatctccttcgccactcacatctaattttaaattaagtagctgttcttgtaactctttttttgacattcctacgacatttggtacttttatcattggtgtgtccagccacgttaactctttttcaatttgtcctttacgcggtttaacgtccatcacacgcaaactgtcttcaatcattttacctacaatcggagctgctacaactccaccaaactgaatggtgccttttggattatcaaccgcaacatacacgacaatttcagggttatctgctggtgcaacaccgataaaagaaacgatgtgattattttttaaatactttccattttgagctttctgcgcagtacccgtctttcctccaacgcggtacccttccacaaaagctccttttccgcttccttgtgctactacactttcaagagcaaaacgcacttgcttagacgtttcctcggaaataacttttcgcttagcaaccggcttatgactgcttacaacttttccggtagttggatctacccactcttttgcaatataaggttcataaagcgttccaccgtttacggctgctgaaacagcagctacttgttgaataggcgtaacagcaaccccttgcccaaaagctgttgtagcttgttcaaccggccctacgcgatcaagcgggaacaaaattccttttgcttccccttgtaaatcaatacctgttttttgaccaaagccaaattctttaatgtatttgaacaatttatcttttcccaaacgttccccaagctccacaaaaccagggttacatgagttctgtacaacttctaaaaaagactgctgtccatgtcccccttttttccagcagcgaagtctcgctcctccaacttccgcggctccatcatcgtaaaattgatcttttagtaaatccactttcttttcttcaagagcagctgccagtgtaataatcttaaacgttgatccgggctcatatacgctccagattggaaggttgcgattatacacttcaggcttcacatttttaaaatccgtaggatcaaatcccggacgacttgacatacctaaaatttcaccgtttttaggattcatcgcaatggcaatcataccatctgggttataagctgtctgagcattatccaactcacgctccatgattgtttgcacgcgtgaatcaatggtcaatctcaaatccagcccgtccacaggtgctgtgtagtcatcagctatattgggcatctttttacctttagcatcagaatacaatttaactgaacctttttgtccttttagctctttatcataatataattcaaggcctgttaacccttgattatctactcccgcaaagcctaatacatgcgacaaataacttccaaacggatagtaccgcttagaatcttcagctatatatacgccttttaaatttaaattccgcacttcatttgctttcgcatgtgaaatttttcttccctcaggacgcaaatatacgctagaagaagcttttgttatttgttcatatactttttcttttgatgctcctagcacttttgctaacttttcagccgtaacagctggattttcaacttgtcttggcataactaaaacggtcggtgcacttttatttgtagcaagtgccacatcattgcgatctagtatctttcctctttctggttcaaaaggaatatttcgactccataagtctttggctttttcagttagcgtatccccagtcagcaactgtacatacccaagccttgtatcaataatcaaaaacacaataaaaccgacaaacaaaacaatggctagccttttacgaactgtgactcctgatacccgcatatattagaacctcctctgaatcggctcgttccaatatatgcttgtacaggattcactagaacttattttctagtcaagttgcttatcgtcttttttgctattagactcacttttttccgtttcttttaacttatttaacgtgcttgaaaactctttaggcgtttcaagctccactttcaggtacgttcctgcttttagcggatctcctgctttaatactttgacttacaacataaccattttcaagtgcgctaggtcgaacgttgacaaattcactaaagcgaataacgtcacgatgtgaaaaacctgttaaatcaggcattgtcgcttgtccgtttgtcttaatgtacacgcgctgaccagtaataattgtatcggaagtcggtgattggctttctaccgtatctcctttacctattacaacaggaacaagtcctttttgttttaaatcttttacggtactatcaactgattcattaacgtaagatttaagcgtaatttctgaatccactttcttttcttccgtttctttcccgtcttcatccttcttagtaggctctacccctaaatactgtaaactattcttcataaccggattaaatacggcaacaaggggttcacttcctccctcttgaggcttgagagtcgggtttttaacagctacatagacaagcagctttggatcttttgcaggtgcaaagcccataaaagaaataaagttttttccgtgtccatgcaggtaacctccgtttggagcgggaatttgagctgtaccggtttttccagcaacatcatacccttcaatcgcgtatggttttcctgttccattttctgaagaaacaacggtttctaaaatatttagcgtctcgttcgctgcttttttagaaattggttgtcctaccacggtaggttttgtttttttaatcgtttttttatttgtttcatcgactacttgtttaatcacgtaaggcttcatcatcttgccgtcatttgcaatggcagtagcggcttgaatttcttggataggcgtaaaagcagacgcctgtccaaacgcagtcgtgactcggtctctcgggtactttgtgactagtttgctagaagcctcgtttggcaagtcaattcccgttttatccataaaaccaaacttgtccaaatatttatacaaacggtcggtgcccaatttttcattggctaaaatggcaactgctacatttgaagatctttgaattccttcattaaatgtaatagccccccagccgaccccaccgttgtgatcgttaattggaacgccgtttttcgttactttataagacccggactgatagcggtcttccccgttataaactcctgcatcgatagccgctgctagcgtaaagattttcatcgttgaaccaagctcatagctgttttcaacaaacggattacgataagaagtaatatcacgaatatttggatcaaaggaagggcggtttgacatcgccaaaatttcaccagtttttggattcactaccgttgccatcagctcttctggtttatactctttagctgctgttgtcatcgcatcctctaaaaacgtttgaattttttcatcaatcgtaagcgtgacgctgtctccatttttaggggctacgattgattcttttggatccggaagcttaattccgtttttagcagcttcatattttacatatccatcttcttcagaaagctgcttatcaaatactttttcaattcccattttccctacgattttacccgtatcatctttttgtgcgtatcctaaaatacttgaggcgaatacaccgtttggatagaagcgcttcgaatcgcgtaaaaacgtgatacctgggagatttagtttttcaattttttgctttagcacgttatcaatgtcacgtccgcctgggccaagttcaacttggaaggtaccacgtttaattcctctcgttaacatgctttcaatttttgattcgtccatcttcaatagcggcgctagcttttcagctgtcttttcagggtctaccacgtgctgtggatgttttttatcttctgactgcgactccttcaaaatcgccacaaccgtataagcgcccgtatcttgggcgattgcttctccatttcgatcgtaaatcgtaccgcgctgtccttcaatcttggacgttcgcgtatgctgtttttgtgcaatttcggctaaaacttctccatttgctttacccgtcgcttggatgtaaaagaaccttatggctaatgcaaaaaagagcaatgcaaatattaaaattaatattgctgctccagtactaatattgctattttttcttggcgtagtcatcgcaattaatcgttaacgacttttacgttattttcattcaattttagtccaagttcttttgcttttgtccaaatacgatcgtatgcacttaactctgttacctgtagttttaactcattgttttttgcttcttgcttgtcaatctttccatcgagtgattgcacttcttcactgatgctataaagcgaagattgatttgaaatgatttgcacagacccaaacagcatgagtgcgacaaatccagaatacacaattttttcaccaaccgtgatttttctttttgtcttccgaacaacttgacgtaccgtcttttgctgcttctgctgctgatcttgctctcttactttgtatgctacattgttcattctcgtcccctcctccttgattaaaccctttaattacactaatttctcaacaattcgaagctttgccgaacgcgcgcgcttattttcttctatctcttcttctgaaggtaaaataggttttcttgtaataactttcattttaggtttaaattcttctggaataatcggcagtccatgcggaagctgcggaaccgtacttgcatttttaaacgcaactttacaaattcggtcttcaagtgagtggaaggtaataacacttacacgtccaccttttttgatcacatccatagcctgttcaattgcatcttcaaatacttgaagctcatcatttacagcaattcgaatagcctggaaaattcgttttgccggatgtccacccgttcgtctagctggcgctggaataccatctttaataaggtcaaccagctctagtgttgtttcaattggcttagactctcgatatgcttcaattttgcgggcaatttgtttcgaaaacttttcttctccgtattggaaaaagattttcacaagtttttcataaggccattcatttactacgttgtacgcagaaaacattgagttttgatccatgcgcatatcaagcggggcatcatgatgaaagctgaaccctcgctctggtgtatccaactgaggagacgagactccgaggtcaaacaatactccgtctacttcttcaattccatgtttcattagctgctcttttaaatagcgaaaattacttttgattagaataactctgtctagatacggggccaatttctcttttgcatttgcaagagccacatcgtcttgatcaaacgcaattaatttccctttttctgatagctgttttacgatatattcactatgacctgctccgccaagcgtgcagtcgacatatactccatccggcttaatatttaagccttccgctgcttctttaagcaaaacagttgtgtgattaaacattatgacacctacttctttctaaactacttagttatgtatacaaaaagcaaaaaacggtgtttttctttgatatatatacacgtttatattatatatcaaagttcaacattatttcagctatttatataagaattaagtagaattttgtctttttgtcacaaatagtgtcattttgttaaaagtaggacatattcgtagaataaaatgtaaggaatataaggttttttgcacaattagaaataaataccttataaggattcaattggttgacattcaccttgtagactttttctcttttccaaaataaaaatcctgcttttcagcaggattttattagacataacagacttttaactggtgatttaattcgacttcagcacttagtaaatctgacacaaattgcataccataaccgtttaaataatacataatattccacatgcgttcttgtggagcattgtaaggacgaagagcaagttcaatttgagcatattttgaatgcttcacatcgtgcttaattagctgtttggattcgacaatcttttgaatggtttcaaactgcttttgaataatccctcgatttttaagcatgacttcatcaaatgttttgtcttctttttgaatattttcacgaagagttttatgaattttttcgaaatcttctttcgctttttcaaaatacatttcgtatgggttgtgaacttccgtcttaagccagtgctccctctctgcatctacgccttcgttcactacgttcgaaaggtctaactgaagttcatccatatacttctcgatatgtctttctacgattgcataggataacctagggaccacgggaggcattttaaagctaaataaagaaaatgctttttcaagctctgcccaatacgctacttccccgggacctgcaataaacgcaagggtaggaagtaagtactcctgcataaggggtctagtcacaacgttgttactaagaagctcaggcgtttgtttagcaatttgaaccagctcttctttagacagcacgagttcattttgctttccaacaaactgctcttgttctgcatctctttctaaaagtactctgttttcgttgtgtgaataaaagagatgagccgtttcttctcccacttcaatcattcgtccatattgtttttgaatctctgtttgctgttccataacggctgacgataatctgtcattttgttcaattaacgtcacaaagaaagaagattcaatgctgcgcacttctttagaagctgcatccattaaaataagacctgactctgcgaacattgtggtaaccaaatgagcaaagaaatcgacataggtacgtgatttatctaacgcctgtaaaacaaagtgtaatacctggtttgtatgcgccgtttcgttaaacgtttgaaatacatcacgaacccagcttctacaggcttcatggtctagttcgatttgagaaaccatttgctttttctttaaagaatgctttaacgttttctttaaaagctggtttttatgctctgtgtatacatggttgatttcagcaaaatcatgatcttctccagcaatccaaaataccggaagcacgggcacgtttaaagcttcctcttgttgtttagctaggagcacaattgaaatcactttatgaatggtgtacataggacccgtaagcagccccgcttgctgacctccaacgaccactacactgttaggatcttttagcttttcaatattttcaatcgtcttagaagatgctccgtagcgcttattaaaatcaagcagatactcagcaagctgttctcttggataagactgcttttcaacatccgctaaacgtttttcatatacgtctttttcgtgtatattataatgaaaaaaggaaagtgcttgcttttcaccttttatgtaatcgttcgttagtttgtttcccgcctttaaagagacgtctgtaatctccatgaaagaacttcctttcttttcctaatacttatattctctacatatagcttcattatccataatgtaactgctcacgtctagtaacatgctttacagagaggaaatacgaaaaacgattccacctatatttaatacaatatgtgcaataagaaacaaaacgaaattcatccgaaagaaccctttcgcaataagcttcatttctaagtcatgtttgactttccaatgtacaaacatcataatcattgctacaactaaaaggactagcgcaatcaaccacaaaaaagagtgcccgaaaatttccacagctgcataatgcacggacaaaataagaaaaaccgtagtaatgtacgttgctatgtggacagatttccttttatttttcgtcagtttgcgtaaaagcatgtatagaataaaaaaaccaacgagcggcagagtgacaaacgtcgcaaaaactccagcaataaaacttcccatgttaatcacccttttcttcttcgattccttttattgacccatataaaaagtcaacaataggcgtcgacgttcttttttcagcagcttgtgtttgaatatagcctaaaatagcatcaatttctgtttgccgcccctcctgtatatcttttagcatagaagattgatttgtactcgtgcgcgaacaaacccccaacgcattttcccaataattaaaagctgaatccagttttaacacagcggcaatctcttcaaacaatagacgcatcgttttataaaagtagctgttatgaatcagctgcccattttttacccgatacagcgccgtaagaggattgataagcgcatttacaactaatttcttcaccagcatcgcataccaatctgtttcaatcacccaaggaaaattcataattggcaagatagactccatttctcctctgtacgaagcaatacgggttgttcctattcctgtatgatggacgctatccatatttgtacgcattgccccgtgttcaactgtacccaaatagagagtgcgctgcgggagatttttgagaatttcaatatggctcataccgttttggataaacaaaaggggagtatgtatagtaagggttttgataaaaggaataatctcttttaaatgatactgttttacagtaataatgattaaatctgcttcttttatgtttctttccagagggatagcactgacttttttagtgtgatgtcccccttgtctatgtaaagtaattccatttttgttaatacactttgcttgagtttttgttttcgtatacaaggttacatcataacaatctgataaatacgcgctaaacaacagacctaatgatccgcctccaataatacctatagttttcatcgtattttttgttcctctttctattattgagtttcattttagcaaaaaaatgctttgaattaaatgcattcttaaaattttacctattcatatagcccgtgtgattaaaaatcaccgggcttattgtaaattatttagagtgatcccgtttttttctattatacgggatacaccggatgtttacgacggctaaaggtcacattctttgtttcatataatcgaaagcggtcaattaaagttcgacgcagttcgttagcaggaacgatgtcgtcaataataagttcagaagccagcgtatagatatcgatgtgttctttatactcctgctgtttctgtttaacaaacataaaccgctccttcggatcttcaatttcattaattttattagaatagacggcatttactgccgcttcaggacccattacggcaatttgagcagtaggcaatgcaaggcagcaatccggttcaaaagctggaccagccatagcgtaaagccctgcgccataagctttacgcatgactacggaaattttaggaactgtagctgaactcatcgctgcaatcaattttgctccatgtctaatgatgcctgctctttctactttggttccaatcataaatccaggtacatccgctaaaaatagcaaaggaatatggaaggcatcgcacagttgaataaattttgcgcctttatctgctgaatctacaaacagcactcctcctttgaccttcggctgattcgcaataatccctactacttttccatctattcgtgcaagccctgttaccaattcggcggcaaacagttttttcacttcaaagaagctcccttcgtcaataagggtatcaattgcttcatagatatcaaatggaacattttgattctccggaattagttctactaaatcctttgtctgcttaggctctttagctttttgtactttaggcttctcttgatagttttgtggaaagtaggttaaataagatttggcatacgaaatagcttcttcttcagaataagctaacacatctccacatccgctaacgctgcagtgcatatgtgctcctcccatttcctctagcgtaaccttttctccaataacagcttcggccatacgcggcgaacctaagtacatagaagcgtttccatctaccatcacaacaatatcacaaaatgcagggatataagcccctccagctgctgatggaccgaagagcaaacaaatttgaggaataacgccggaaagttttacttgattgtgaaagattcgtccagctcctcggcggtttggaaacatatctaattgatcggtaatacgcgctcctgcagaatccactaggtacagcaaaggcacatgcagtttttctgccacttcttgaatccgaataattttctctactgttctggccccccaagaccctgcttttacagtagagtcattagccattacacaaaccgtttcaccgtttacttttccaattgcagttacaacaccgtctgccggcaacccttcggctttattatttgcaaacatgccgtcttcttcatatttcccgtcatcgaataaaagggctaaacgatctcttacaaaaagcttctgttgttttgcaagtttctctttgtacttctccgcgttgccacgctctactttttgacgattttcatcatattttttctgagattcacccgtatgtatcatgatatctctcctttatgagttatgaaatagtcaccaaaacgtcgccttcgttcacaaaatcacccacggctatatggacagtctctgcaataccagcttgatcgctttcaataggaatttccattttcatagattctaatacaacaacaacttctcctttagctacacttgcaccttgctgaacaaacacattaaataccatgcctgccattgtcgctttgatttcactcattgtggtgctcctcctttatttaatacggttgataataacgatgtgttataggtgcctttttcatataattcttcatttaacaactgcttaaatagaggaatattcgttttgattccctctatgacagcttctgtaaaatatgatttagctagttcaattgcatttgaacgcgtacgaccagtaataataacttttgcaatcattggatcataaaaaggtgtaaccgcattcatatcactgtagccgctgtctacgcgtgcataggttcgctcgggcaagtgataacccgtaatttttcccggagccggtaagaaagtaaacggatcttctgcataaattcgaaattcaatggcgtagttatttgctgctatttcttcttgcacacgtggaagcttttcaccgcgcgcagctaagatctgccacttaactaaatcgacccctgcaatttgttcggtgatcggatgctcaacttgcagccgcgtgttcatttcaagaaaataaaaattttcgtcttcatccacaataaactccaccgtacctgcattataatatccgattgctttagccgcttgaacggcttggttttgcatggcttgtcgcgtactttcttttaaagaaagcgcaggggcttcttcaatcactttttgatttcttctttgtacggaacaatcgcgttcaaaaagatgaacgacattaccatgctgatctccaaacacctgtacttcgatatgttttgcgtttgtgataagcttttcaataaacattccttcttgaccaaaatatgcttttgctcttgctttggttgaggtatacacttgttttactgcttcttcgttatcgcagcgcaccatcccaattcctccgccacctccgcttgcttttaacataacgggatatccaattagactcgctactttgcaagcctcttcaactgacgtcacatcgccttggctgccggggacaacaggtacacccgcttctttcatcgcggcacgagcagcaattttgtcgcccatcatcgaaatgatttcgggagaaggaccgataaaacaaaaaccttcatcaatcgctcttttagcaaatgcactattttccgataaaaatccatatccaggatgaatggcatctaccttttcttcatgactaattcgcagcagctcttctacattcaaatatgacttttgcacaggaggctctccaattcgacgtgcttttgtagccgcttgaacataaggaagttctgcatctgcatcggaatagacagccaccgtttcaatgcccatttgtttgcatgtatgaataatacgaagagcaatttctcctcgatttgcaatcagtatttttttcacctttctctcccctttcctcaaatttctactttcccccatataattctacaataattttaaaactcctctacaatttttgaaaacgctttccattcgaatctccctttccttttgcttcctttctcaaaattgatgcttatagtaatgtattcttcgtatttaactgaaagaattcatttttctttatgcgcattgaacattcgttcaccaatcacgaaaacagaatattttgtatttttgttatataatattagatgaacgaaccaagccagttcgttcgcctagcaaggagacataacaagggggatatgggatgaattacgaagtgaagcatttaaaaattaattttaaaacgctagaagagttcaagaaattcaaagaatatggcattcaagaactttcaatgctagaagaattacatgctaagatttccgataatgaaataaattctccgttttacggcatttattttggaaatagcttagtggctcgtatgagtctctataagcgaaacaaacagtacgatcaatatttcgagccgcctcaaacgtatattgaagtgtggaaacttgaagtgctcagtgattttcagcgcaaaggattaggtcaaacgctcgttgaatatgccaaatcctttcaattacctatcaaaacaagcccacgagtaaaatcgagtgatttttggtcaaaaatggggttcgtacctgtaacgtatgatatcgatcgcgatttgggagaaaaccctcttatttggctaccaaacggtgtaagcgaacaaaaataaacagctgatttccagctgtttattttatatctatgtggtatatatgatcaacatgaagtagggagcattcaaactatcgctttacttttgaactttttctaaatttaaatttttatccacttgaaatttcacttttctacttttttcatcctcttttaatacaaccattttacgagccctctccataatttcaataagagctttatagtcatcttccacaattaacaagttgttttgcaaagcttttttttctttttccaaaatcgttactttctcttgtaaacgttcaatcttttgctgcagttcttcattagcttcgagaagctctgacgagtgtctttgcccttgatctacattttctaaatatttaattacctcattaagcgaaatatgtttctctgcttccatatatgataagcgtgcaggctgctcgtcatcttttgaaacagttcttgcttttaattcttttctctgttttttcgcaagatcaataccagtcttgtattgtttgcgcacaaaagaattccagcggaagccacaagctgctgatgttcgtgtaagtttcttccccacttcttcaaatgcagctagctgagtgccaccttcacgtatatgacgcagtacaatttctgcgagtaataaatcttcatcatgagtccatgcatcttgacgagaagaagtcatttttctatccctccttatccgtacttattaaatgaatatgcacctactagataagatagactattgttcctcttctcaatcaagaaaatctttcatatactttgaagcaaaatgggaaacccgtgattctttcatctttcgcttattaactatattgctatggaaatgcagttcataactatgtttttttaacgatgaccttttgaaccgcttcttcatgctcaggcgactcccacaatatcgagcagcgatgaatttcttgttccatccgattccaaacccggctttgctcccatttctcaatagcgatttctttgtaagcttgcaatacctgggtcggtttatgagtgataggcgctaaccactcctcacacctcatagttagctctttaaacgacgtgacataggaaagaaatccaatttgctttgctcgttctactccatacaactgagcactgtagatcatttccatcgcttcttgataacgcagcttttcaagaagaatggttcctcctccccagcctgttgtaattcctaaattcccttgaataaagcccatttcgctatgtgttgcacttatacggaagtcacatgcaatcgcaagctcacatcctcccccaaccgatgttccattcaaaagggcaactgttggttttgggagtgttaaaatctcataaaggattttccccattttcgttaacatttgagacgcctctttcgaagtctttagctcatgaaatacgcttaaatctcctccactgcaaaatgcatctgaaccagcgcctgtaattacaaaagcttttactaactgatcatgtttcacataatctacagcttgctgcagttcattcataacatcataatcaatagcattacgcttttcaggacgattaatcacaaacgtagcaatgccttcgcttgtagtaaacagctcgctttttttcatgctttttcctccttatagacaaggtatgaatccttttacaacagtaattgtttatttaaaaagagttcttgttctataagaaaaatccttctcttcaaaagggcagagaaggaaaaaaggcaaaaaaataaaagaccctttaagagggtcttttatttaaataagcaattatttgcttactacgtcatttcctttgtaagtaccacaagctttacatacgcggtgtgatagtttcatttcaccacaatttgggcactctaccataccaggaacttgtaatttaaagtgcgtacgacgcgttcttttcttcattttagatgttcttctaaaaggtacagccattattcccacctccttaaaagaattttaaaatcatatgaaggcccgaaagccggatcttcgcatttttatttctttttgtctttaaagaaattttcgagtacggctaagcggggatctactttttcctgctgttcttcttcggtaacaacttcccagtcttttcctgactgtggagctgctcctgccgcttgctgattttcactaaatacctgtagaggaatttcaacaataattaactcctgaatcaaaggttgtaaatcaaccgtttctccctctacaatgcgtacttcagcatcttcttcataatcagcattcacattcaataaaaacgtttcagttgcgttaatttcaaacggatacggaacgtcaactaatgtacgagcacaaggcaacgtcatttctcctgaaattttaaggtgaaacgttactttcgaagagctaatgtcggctcttcctttcacatttacatctgacattctacgaatttgaggatcagcattcataaactctttgccgtcaatcacttcgtcaaatgttagacctttattttgcaactgatacaattgatgtattgtccatttcattgttaatcacctcaaggcaacaaaggttattatagctttcacaagattatttgtcaatattttttctttacactataatgtacttaaatatgcttttttgtaaaaatttcttactttcataaaaaaatgtttttaaaacaaagagctagactaaaaataataaattaaaaggagacattatgcaagcagttggaataattgtcgaatataatccttttcataacggacacgcttatcatttgcagcaagcgaaacaacaaaccggagcagattgtgtgattgctgtgatgagcgggcactttttgcagcgcggagagcctgctcttgtatcaaaatggtcccgcacaagaatggctttagccgctggtgcagacttagtcgttgaattaccctatgctttttctactcaaaaagctgaaacattcgcaagcggcgctatttctattttagaatcccttcacgctgactttgtatgctttggcagcgaaaatggcaatattgactcatttacccgcaccgctgatttgctcgaagctcatgaatcagaactatccgctttaattcaacaagagatgaaaaaagggaacagttatccaaaagcagcttccaatgctttcttacagcttttcacagaggctcctattgatctatctcagccaaataatgtgcttggaatgagctatgtagctgccattaaaaaacagcatgcatctattaaaccatatacaatcactcgaattcaatcacattatcacgatgattccctgtcttcctcttttatttcaagtgctacaagcatacgtaaagctatttttgacagcagcagccatggggacctgagcaagcacatgccagttagtacggcaaatgaattaacagcttacaagcaagcacacggacagtttcatcattgggagcattatttcccatttttgaaatacaaattattaactactccgctttatgacttacagcgtatttatgaaatagaagaaggtattgaacatcggctcctatcttatatttcttcagctacttcatttgaagattttttaacaaatgttaaaacgaagcgatatacgagaacccgtttacagcgcatgtgcgttcaccttttaaccaatacaacaaaaagtgagatgcaacaagctgatccttacattcgcttattaggaatgtcaaagacaggacaaggctatttaaaaacaattaagaaaaagctgtcccttcctattgtatccactgtatcgcaatgtaaactaaaagaaattgataccgatattaaagcgacacatgtttatagtatgccgtttcaagagcctctgcgctctcaatttatgaaacaagaatacgcgcaacctcctatcatttggccataaaaaaatcgtctgcaagagacgatttttttatggtttcagcttttctaaatacgttacggcatccgaaaatgaatctatgggtacaattttcatatcactgtctatttttttagctgtcttcactgcttctcggtagttagagcccgcagcccctttttcatttggtgcaaagaaaatctctgctccttctttatctgctgctacaattttttgcgaaatacctccgattggtcctacctctcctttatcattgatagtccctgtacctgcaacgcgatggccttttgtcatgtcctctttaacaagctgattataaatttcaagcgagaacatcaggcccgctgaaggccctcctattttttcagtatcaatatgtatatcgggcttaacttttagttcttggttcgtttctaaggcaattcctaggcctactcgtttgggctcgtcagggaatgctttaacttttagagtatgtttgctttctttgccatctctttttacataaattgatactgaatctcctgcttttttagtcgatacgtagttgattaagtcctcagcagtttgaatttttttctcgtctactttcgtcactacatctccaacatgaagttttccatgtgcaggcatattttctacgacatatgtaacatatacgcctttattgagataggaaacgctctttccagctgcttcgtatgctactgaaatagcggcattttttgacgtatccatcatatgtaattgccttgtcgagtaatcttcatcgctttcaccttgctgcaaaatttgctttgtagggaaaatttcatgaaagtcctgtattttcgcaagaccatatgaaagaggagttgctctacccattcttacagttgtaagcataaacgtccctttttcatggtatccatcttctaccttaataataggcgcaagctcttctgccattccaggctttgtaatgtagtatggcaaaggataaaaacaaagcattgccaccactgcaataacagccaaatataccaaaattctaattctagatttcactttttttgttctccttccaatgatcaattgcttgcaggatagaaggcaactgctcatgtgctgcttgttcaccaattgaaatcatttcttgaatgtttgtaaacgctctggaactaaaagtatcgagattaggacgaatcataatgtctgaagcaatggtccgatgagctactagctcatcttgcaaaatatctaaactttgcataatgacatcaaaaatggagctgatttctgcattcactttcgcttttgatacatcgactccaatgacaatatcagatcccatttcttttacaaccgatacaggaatacggtccactaccccgccgtctacaagcaatcgtccatcaattacttcgggagcaaagattcctggaattgaaatgcttgctctgaccgcttcagcgataggtccttttttaaacaccactttctctcctgtttttaaatctgtcgctacaatggcaaacggtatagatagctgttcaatagttctattttgcgtaaaggtgcgaaccaacgattttactctgttgcccgtaataaatcccattttaggcacggtaaaatccaaataatactttcgtttgaacgttagcgccattttataaagagttgccagttcaatccctgacgcatatagtgcaccaactaaagctcccatgctgctgccagctagaaaatcaataggaatgttattttctgttagcgttttgattactcctaaatgtgcaaaacctctagctccacctgagcctaacgcaactcctatttttgggctttccactttacctgccccctcgttttaccttatagacttctaaaaatgtaaaaacatttgatgagcttctctatcattgttgccctgtattcggtaggactattcttcattttctatttgttcatttagtatgaagctaaagatatgttttgctcaatacacggtggttattaagcattatactatactgaaggctgttttaagaaattcttactcttcgcttgctgcgtatacgtttttttactccttgactaccctagaagtgcattgatttatgtatatgaattgtatttccaaatgtgacaagacgcctttttattcaataggaatttattttctccttactcataggcataaagtcgatgcatagcttcgtatattgatatatagaagaacttgtacatttgcctaaaactcctcatttcattcatatcaaaatgacgtgagcttagaaaaggagatgaatcgttcgttgaataaatcgatggtgaaaacacttctgctcgggacgagcgtaacgcttctcgctattgcgcttattgtatatccaaaagaagcgctagaaggttcagtaagaggtctcaacacatggtggaaggtcgtctttccttctctgctgcccttttttattgtttcagaaatgcttattgggtttggcgtagtgaagttcattgggatcttactagagccgtttatgaggcctttattccgagtacctggagtagggggttttgctttagcaatgggcatggcttctgggtttccttcaggtgcaaaaatcacttcccggctgcgtcaagaaaagcagctaacagctatcgaagctgaaagactcgtatcatttactaactcatctaaccctatttttatttttggagctgtggcagttggcttttttcacaatccagctgtcggtatcatattagctctctctcattacatagggaatatttgtgtagggctggtgatgcgtttttatggatcagcaaaaccgaaaggacaagtaactcaaaaaccttctttatcgttagcttttcatgaaatgcataaaacgcgtttaaaagataagcgtcctatcgggaagcttctaggagatgcggttacttctgctgttcaatctctcttaatgattggcggttttatcattttattttctgtattaaacaaacttttatatgttactcatattacggccgttttaagcagcggtctagcttatttattttccctgtgtcatatagggactgaactgagccttccctttatttcagggctttttgaaatcacgctaggaagccgtctagcaagtgaagcgccagacacgctgctgtttcatcaaattatcatcgttagctttgtattaggcttcagcggtttctccgttcaagcacaagtggcaagcatactcgccgaaacagatattcgatttttcccgttttttattgcacgcatttttcacggctgttttgcggtagtattcactatctttctatggggtcctcttcgagaatccattactacttttcaaacatctgaagtagcactgccggttttttctcacttggagtccgttacgattctatcgcagtggctaaacgtgtacggtccgctcttaacgatttttacgctgtgctgctatatttatatatattcaaaacgaacgtttcttcatcgttcctagtaaaaaaagaacgtgacgttttcttatcggcaaagaaaacgtcacgttcttttttatcttatttttgagacagctgttcaaatttttccgcaagcgcttctctaacagggggaggaactaattcagaaatattcccgccatatttagctacttcttttacaatactagaacttaaaaacgagtattgattatttgtcatcataaataacgtttcgatttctttatctaatacgcgatttacagatgtgatttgcatttcgtactcaaaatccgatactgcacgcaaacctcttaaaatggtttttgcctgcttttcttttgcatattccattaataatccgctgtacgactctactaccacattaggaagtgattttgttacttctttcagcaaagctactcgctcttcccccgtaaatagaggactttttgaagagttatttaaaacaaccacataaatcgtatcaaatacatttgcgcctcgtttaataatatcaaaatgcccatttgtaactggatcaaagcttcctggacaaacagctatactgcccatacgtatcccctttctacatctaacagctcattgatttagtcaactgattcttcttttttgtatgtataaatagaaacaccaatgataccgtacgtttcgctttttattttttcaaataaaccaatctcattatctaactgtacatcatgagaatgctccgctacaataattcctgtttttgctagaaggttttcttcacttaccgtttcgataagcgctttcaacttttgtgctttatacggtggatcaagcaaaagtaaatcgacagtcagctcccttttctttatcgctttcagtgcacgttctgcatcatttcgatacacttcagcgcggtcttctaaccggcaagatgctaagtttgctttaatcgtctgaatcgctttgccatcccgatccacaaaaataactttatctattcctcggcttagagcctcaattcccaagccaccgcttccaccgaacaaatcaagagctgttccaccttcaaaaaacggtccaatcatattaaaaatagcttctttcaccttatctgttgtagggcgggttgagtatcctggaaccgcctttaacgcatggcctttatataaacctgctactactctcatacttatcactaccttacttttacttccttattcttcattatcctaacatattttgaattacaaagactagcaaaaatcctcaatttattcaatgctgtatacattatgtgcaataacccagcagcttgcttttatgctggacttttacggccgtgtccttagatacactgattcttttctaaaagatgtatctatgaagatcattcggcatttcgttcatagaagaatttctttactttaatatgtcataataaacgtaaatttaccctttttctctgtcatgttatcagtcttttatgtattaaaaagtgaatttcacaagacaggtatatgaacgtttaaaacggacatacttactagtaacaacatcatctaaccgatgttgttgccaaccgcggagaagacttacgtttccccataagttcttcctccggtttctcctctccctttgccttcatcaaggtgcttgtaatcgcagaggtggttacacccctttattgaagggccctacaatgagtagttgtagggatttttttatttactcttaaaatattcagtgatacattaaactacgtgagtttgcttttttaatacataaagggggaaatacatatgattcagcgttttattgagctcggagaagggtattcagatatttatgagctgttagagattgtcaaaagcaacaaacaccgtcttgctcatcttattatgctgcgaacagtaaaagaagatcgacaagtagcttcttttgtcgctgtcttgcatccaacagctgaagggaatttccaaccgctttacgtttgccgagaaggaattgttttaaaacaaaacgacagcaagcgcgttgagttatttaaacaagctgctgaggaagcgggaaaagaaattgtggtactcgatgtcaaaccatctactacatttccagaaacagcactctactatcagcaccttattggcattttgcgaatgaaccgctttattccgccaatgcaataatctcatccctgcctattcatttgctaagggcaagtaaaataaaaaaaaggaatgtacatcacattccttttttgtttaaattcctatcttatagtcatattccttcgccttatccggctttgaattttcgaattctgtttttaaaaacggccgataagaaggatctactttcttcacaaaaggtagagactgaagtttatggattgttttttcaatgccatcttggttgcaatataagacaacatactttaattctttagatacgtaatgtacatttccgtactttcgcaatgcttttgcttgcttaacagaatgcacatacgccacaattccttgacgttcaacaaacatatttagttccccttttgcatacgttatattggttttctttatcataaattcttttatatgaagtaggtgctttatgtatgaatttagatgatatctggatgctctttcttactcattttaacgagcacagagctattgaacaagtcattttcaaaaaaatcacaaatataccctttttgtatataaacacatcaattaagcgtagaaaaatagatgagcttctagaagcttcatctatttttgctacatccaatacaaatgctacgtggcgctcaacttttgtcagaagtcagcatcttacttatgtttatcagcacaggttttacgttccacagcgtaaaatggcctgctgcggaaattcctgtgctgattgcgttcgatttatacagtgaacggcttatgcgctgcacccacagcttccaccagatccgcagccaccgccgcagctgcttcccgtatcgaaaaacggatttcccgtcggtactttcacgtgctctgaaacagcttgaccaaggataacgctaatttcatcaagcagcttttgtaattcattttctgcttttttgaacgcagcgattgtcgcgtgtaaatcaacttgacgctttacatcacgtacttgtctcgtaatggttttataatcaggatgatattttccaaatcgctgaacatcctcatactgttcctttattttcacaaattcagcaattaatgcctgtgcatgtgaatctttatttaatctatataaacattgacgatagttctcggctacgtctgattgtaacaccatgttcgctacgtgatcagactcatcgagtaattcaacagttctcattgttgtcagcatggttgtgcacctccgtttttatcttatcacgttttggatctaaagaaaaagaacttgctaaaacagcttacactgatttactacaagttctactttttaactatataatttcaaccgtaaaggtattcctcacttgataactttcttctttagatttcatcagttcaatcgtaacagtatgagatccttttggaagatcacttaaaacaaaagctgcttgcttcatttctttaaatggttttccatctactgtaatttgaaggaatccactctctgttgaaaatgaaaacccgcttagaatacattcgacgtatacattttgtcctttcacatgctggtgtaccatcagtgaaggttttgtattcattgcaccaaacgttttagctgcccgcggttgagaggaaattttagtttcaggttttggtttatcatggttgcatcctagcagagaaactacacataaggccgtcgttaatagtaagcgcataataccattcctttatcattcgtttctccatagtgtttacaaactctttgtttttactcatgacgtgcaaaaatctctgcatcgctatgtatgcagagatcattgatttttcatggactgaaacatatgaaacatcatgtttgccatttgaatcgaattcgaaaacttttcgactttatgaggaatcgtttgtttgtagtagtgcttggattctaattcaaatttctccagttcttcaggatttctagataaacgccggtaccacattggctgttcacgaacgaagtcgttgagtttaggacgcgactgcatatactcgtatatatcttttctcattgcgtttaatctttcctaaagccaaatggattccctggcccggaagctgctcctccaccggatggcttagatggctgaaattgctgcagtacttgttgaatattggaaatagctgaatttacatttgtgatatgattttgcatttgattcaagtccatgtttttcagcgaggatacaattgtacccataatatcttttttctcctctgttgcagcagctggttcagcctttgcactttcttctgaacgatatgcctcccacattggatcttctgcaccgaataaataccaatcttcataaagctctttccacgttttttgctgctttcgaacctgttctactaatttgggatgtgattttacaaattgtttaaattccacaacggacggatgaagctctcgtttggtttccttcacagtcactcacctcatacttaaatatagcctactatatcttagaaaaagagagctcgtttcgtgcgcctatttcaaaaattttttatagctgtttttttgaagaagcacgaactgtgaaccagtatgtaatgaaaatagataaaatgcttagccaaaatgtaaaataaccaatttcagacatatacgcattgagcatgctgtatcttggcatcatagaaaaaacgtaatcaatgatatcattatgtacagcccatacagcggcaacagctacatgccataatttaatccggtaaaacggtacgtacaaaagcccttgaaaagccattgctgcatgagaagccattaacataagcatcatccaatcaatgtatcctgttagcacatagaccaatacattcattacgacggcccaaatcccgtatttaaacagcgtgatcattgctaaagcttcaaacagtgaaaaatgctttccaagtaaaagaccgataagtacaataacaaaaaacaagcttgccgttggactatcaggcacaaataataaaaacttcttaggtgtttccgctaattgacttccataccaaatatatccgtagattgttcctaatatattcacaattagcaaaagcgttaaaaaacgcttatcttttaaggtataccataaccaagccatttagaaagtctcctttacatttgctctcttctttattatgtacagtttttggacaatagcaagcatctatctcattgatgtaaaacacagcattaaacaaattcaaaaaaaccagccctttggctggttttcattattcttttcctaagttgccgacaaactccgagagcgttttcaattctttatctgaacctttgaaaacaccttttggcatattgcctctaccattttttgcgatcttggcgatttcctcaggagataaatcaattcctgttaaagccggagctgcaggacctccctgtaagttatcaccatgacaggttaagcacgtttgcttttgcatgattttgtagccttctgaatttttgtcaatcgctacttcttctctaattttcccttgctcttcacgtgctttccagtccacctgtgtcgctgattgccacgttaggaaatagactgctgctatagccaaaagcatgaatcctgttgcaaacggcctcttagctggtcttctttctggtcctcgatcaatgaacggagcaagcattaatgcgccaaatgcaatccctggaataataaatgcacctataatattatatggaccagaagcaaatgaatatttaagcaattgatataggaacaaaaaataccagtcaggaagaggcaagtaccccgtatcagtcggatcggcaatacgttcaagaggagatggatgagcgatggttaaacatagataaccgattaaaaaaactgcccctaccatccattcttttagtaaaaagtttggccagaatgcttctgttttccctggaaattcagagtaatcttttggaatattgggttttcgttctgcaggaacacgtgaatctccaacaaacttcatccctttaccacgatgcatgttctccctcctttttctcactgttctagtgaaagtactaacaacggagtatgtgcttgatgcatatgatgactagtgtgattgaatacttgaataaagcgtataaaattttatagtggtcctgaaattccttgtttacgaatcattaagaagtgggcacccattaagccaagtagggctccgggtaaaaagaatacgtgaatggcgaaaaagcgagttagtgtttgagcaccaacgatgtctggatgtcctgagagtaatgtcttcacttgctggcctataattggtgtggattcagcaatttgcaaacctactttcgttgcaaatagcgctttcatatcccacggcaacaaataacctgtaaaacctaaacctaacataacaaagaaaattaacacacccacaatccagtttaactcgcggggttttttgtatgctccttggaagaaaacacgaagtgtatgtaaaaacatcatgacgataaccaaacttgctccccagtgatgcatacctcgaacaatttgtccgaaagcgacttcattttgcagataataaacggattcccatgcattttttatatctggtacataatacatggttaaaaacatgcctgataaaatttgaataacggtaacaaaaaacgttaatccaccaaaacaatacacaaatgctgaaaagtgatgtgcaggatttacgtgctctggcacttcatgatcggccacatctcgccataaaggagtaatatctagccgttcatccacccagtcatagattttattcaacattttctatgcccctccttgtggtttggcttttcctagatataacgtaccgccttttactttttgaacgtatacatctaacggtcccatcggtggtgtccccggtacatttttaccgcttttttcatacattcccccatgacaagggcagtagaaacggtgtggatagtttttgtcaccagcccagttaaccgtacagcctaaatgcttgcaaattggtgacagcgcgacgatttcacctttatcagttttgtacacccaagccgatcttggctcttctgatttatgccacgcatccacttgcttaattttaaaatcgacacgtttcggctcttttgtaatgtctttaacctgcgccacagctactaaatcctgacccgcttctttttctaaaattggatctactgcaaagcgcaccattggcattaacattccagcagccatgaatccccctacaccagtgagcgtatagtttaaaaactgtcgtcttgatacccgatcacccatgcttttcccccctttaaaaaagttcagtccagagaattttggacacatgatggaccattctattaaactaggacataatcatgatatattaatatttctggaaggtcaatacaataaaaacctaaaacatggaaataatctttatttttctaaattttttgtcatttttttgtttgcgcttccaatacttattctacagtctttttaaacactccatttctctacaaaaatcggtaaaagctgttgaacttgttcatgtatgagcgtatacttatgcgactcatctatatgctcaagcggtaaagtaggtatccaaatgcagtacgcccctatttctttttcaaactgcagccagtctcggtcgctagtaagcacaaaaagatgtttgacttcattgtcatttatatgctcattccaacgaagtaatgtttcataaacagcagctactccatctttttttaagtatgtaaaactaggtgttaaaatcactcttcctttaaattgcctctctaactcttcagtaagagcagtcgtatattcactcatagatgcagtaagctttaaatcttctccgaaatcaatcggaatgagtggaaccaatacggtatcaacataacttttggattgtaggtacacatccatttccttggcctgaagcttcaacttccttctcctctcagcaagcctgctaaagcttgtcttatttattttccaaaatgaataaggagataaaaaaagagattgacctttttctaagaagctagccaatccctcgtttatctactgtacataatggttatttaaatattcgcttaagcgctgaaattcctctttatcgttttcatctaatgctttatcaattagttccatgatttttgatcgctgaaatttctgaatagattcttccaatatttgctcagctaatactctgtctttttcatttgtttgattagcttttggcatatacggattgtcttccagtacagccacatattgaggcgatgaatacaacgatcggaagtttaattgaatataaatgtcttcttctcgattcaaacgaatatcatgaaatgatttttctgcatcggttgtcatgatattttctttataaaaacgaaatggagggtcttccacacagtgcgtagacatcaccatcccgcgaggacaaaactgtgcttgctcaacgaagtgaactcgtttcatcaattgatcatggctcatcaaataatttaaaatccatacacattctcttcgcttcagctgataattcgttaaaaaccagcgaacaaattcttttttctcgttgacagtaacaggggtcgtcatattctcacttccctcctctgtgtttaaactctcagttaaaacaccttttacagttatttattccacacggcagcaataaaatcctctgaactattatttattcttctaattgaaataatatgtcttgaatttcatctactgttggatccattgctaataaggcttggaaaatccccttcgctttcgagcgctgtccttcttctaataagaagtagccatactcttctaaaaacgcatactcttctttaaaaacagtgtatgcagattcgtagtattttagcgcttcttcataattttctaattcctggtgagcttttgctaaatcccattcaaaatgagggtcatgctcattatattctgtggcgtgctcgatattctctactacatcttcatatctctcttgactcatataaagtttagagagagttaaaatggcttcaatataccctggatctagtgcaatcgcttgttgaaatgccgattcagcctcttcttctagaccgcgctttaatgctatcttccctttaaaaaagtaaagttctttttgaaattcatcctgcgcaataccttcgttgacagccaccgcagcctcttctagcatctcttcatgttcatatgattttgctaaatataaataaagagaatggtactcacggtctagctcttttagttctgtgaacttttcaatagcggtctgataatgacctgcttgatacgctgaaatcgcatattcaaatagtgtgttaatctcaagcttatcttttagcgcttgatcaaagtaaggaagcgcttcttcgaactggccgatacctgctaaactttcagctaatcgctgacgaagatccgtgccgttaaattctttttctgtttttagcagcgtttgataaaaaggaatcgccttttgataaattccttgactgctgtaaaattcaccgagcccaaaatctataaccggctcatttggaagcatttttttcgcttccattaacttttgctcacttacttcactaaggccttgcatttgatataagtcagctacaagaagcagagctggcacgtagttatcatcttcgctgctaatttgatttaaaatatgaatcgcttcttcttcttcttctaaatcgataagcatttcagcttttaataaatacagctctccttcttctgggtatttagcgatgagctcgtctattaaaggcagcgcatcatttactagtccccactcctgaagctgttcagccattaaaaatttttcttcgtctgtagctttatctttcaattcatgaataagggcaagacctttttcaatttcattggattctacgtaacctatcgcgcggtctagttctttcacacacaattctcctttattattacattcactttttatatacaaataaaacgaattaattttctattttttccaagccgaagcaagaacacatgcttctatacaccatgataaaatagtttgagcgtttgttcaacaaatcaatttgaatacgcttacatttttcgaataaaaacgagattgagacatgactacattaatcaacagctagaagcacctacatacatgagacctgcgttcaccctaacaataaaaatccgaacgagtttgattctctatcaagaatatcaattcatcgttcggattttccttcaaccaaaatgcgtttgttccagcctctttcttattcgcttagtttatcaaaatcttcaaagaaagtaggataggagacgtgaatagcttcacttctcattagtgttacctctcccgttgcaatggctgctgcgaccgcaagcatcattccaattcgatgatctccatagctgtctacttcaccgctttgtagggccgtcttgccttcaatgatgaggccatcagctgttggagtaacagaggcaccgagcttgcttaactccgttgcaaccgtatcgatacggttcgtttcttttacttttaattcttcggcatctttaataactgttttcccattcgcctgagtcgccaaaagagcgatcactggaatttcatcaattaaacgaggaattaaatcccccccaatttcaatccctttcaactgagacgtttcaatcgtcaaatcgccaataggctctccattttgaatacgttcattagaaattgtaaggcgtgcacccatttgctgaagcacatcaataatacctgttcttgtaggattgagtccgacgtttttcaaaacgattcggctgtttggaacaatggctcctgcaacaagaaagaacgcggctgaagaaatgtcaccaggtacgtatacatccgttcggcgcagagattgtcctccttcaatgcttacagtcgttccatctacctctacgtctactccaaaggcgcgaagcatacgctctgtatggtcccgtgatgtaaaaggctcggttacttttgttgtgccttccgcatgaagtcccgctagtaaaatcgctgattttacttgtgcacttgctacaggagaatggtaatgaattgcttttaaagctcctcctcgagtggataaaggcgtatattggccgtgctcacgcccatcaatctttgcacccatagagcgcaggggcaccgtaacgcggctcataggacgcttggcaatcgactcatctccaattagagacgtatgaaatggcatacctgcaagaatgccaagcattaaacgagtagtcgttcctgaatttcctacatctaggatggaagtaggttcacttaacccttcgatacctttaccttccacttcgacatactcgccttctcttttaatcgatacgcccatcttttcaaaacacgaaatcgtacttaagcaatcttcccctgctaaaaaatgattaatcgttgttttcccttctgccatcgctccgaacatcacagctctgtgagaaatcgatttatctccaggaatagaaatttctccttggagagatgaaagattagtttttaattgttttccactcatttcattcacacctttcgtacattaagaaataaacgtctgatattgatgctgatggagacacgctcttgcccgctttctatcttcctctgtttgaaagctcaaacgtaatactccgtatatgtcttctcgtgtttctaaaattcgaatgtttgtaatactgatttcatcttctgctaaataacccgttacttctgaaataatccccggatagtcaggaacatccacataaagatcataaaaggatggaatcgctcctttggttcgtacaggaagctgatctctaaattgttttgcttgtgaaaaatatgtatagatatcgttcgcgtcttttcgttcgatcatatttcgcacgtcgttcatttcttcaagccagtggtcaaacattgaaagaagcgcatcctggttatgaagcaagatatctctccacatcgctggactgcttgaagcaatacgtgtaatatcacgaaaccctccagctgcaagctgcgaaactagctggttgtcttgttggtaatattctgcttgatgaacaaggcttgcagcaataatatgaggaaaatggctgatgacacccgctaatttatcatgttcttttggtgacatcacaataattttagcttttgtaccacttagcaattcctttaaactgtctaaagcctccgaagaagtagaagatgaaggtgtcaatacatacattgcattttcaaataaatgagctttagaagcagctactccgcttttatgagacccagccattgggtgaccgccgataaactcaatgcctttagcaataagagcttccgctgtcttcactacctcttcttttgtacttcctacgtctgtgacgataacagactgtttgagcgtaaaatgttctaactgttttagcacttcagctgcttgagtgaccggaatggcaataacaatataatccgcttgctccgcgccttgttgtaaagaagaagccgcttggtcaattacacctagggtttcggctagctccagctgctcttgattaatgtcaaaacctattacatcaagatgatggtgcgtcttttttatattaagtgccagcgatcctccaattaaccccagacctataacaaaaacattttctttcactttccttcacctcattgtacatatgaagatgagagtgtgaaatcacactctcatcttttactatattaggtattaagctttcgctgctgcttggttaacaaactgctgaagcaattcaatgatttgttcattttgttcttttgttcccactgtaatacgaacggaagttgggaagcctaatgcgttccctgaacgaacaataaatccgcgttgcaataaaaattgaaacacgtcatcgccttgacgaccaaaatcaattagaacaaaattagtgaaagacggataatagtttaagccgttcttatcacagaaagcatagtattgctgcaagccttcttcatttttctttttacactcttcaatgaacgcttggtcttcaagagcaacgattgctgatttttgagccatgcggcttgtattaaaaggttcacgagccggctcaattttttgtagcaatgattcgtttgcaataccgtaaccaatgcgcaaagaagctaagccgtatgcttttgaaaatgtacgaagtacaattaagttttcatattcattcaaaaactctaccgtattcgggtagtcggcttggtctgctgcatactcaaaataggcttcatccattacgattaacgtatgcttaggaacttgtttcataaaagaaattaactcatcgcccttcacatacgttcccgttggattattaggactgcatacccatacaattgtcgtatttttatcaattgcacgaagcatagcatctaaatcatgatctccgccgcgcagcggtacttcacgaatttctgcaccttcaattacggcattgtgcttatattgaggaaatgacggcgtcggcatgacagtatttgtatcagccgatagcaaagctcggcaaataatttgaatgacttcatcagacccatttccaaaaatcagctgatcttgctctacgcctacgtgctttgctactgctgcacgcagttcagctgcatagccgtctggataaagcgccatattttcgatttctgcagcaatcgcctcttttactaaagcagaactgccgtaaggattttcattagacgctaattttacaacgcgatctaaattaaattcacgctttacttcttcaattggcttacctggtttatatggagataaagttagtaattgttcttttaccttcaacgtgttacacctcgcatttttgtataggcgaaacgatggatgcaacatactcctcaatttgatttaatccgtctcggcgtgtatccttatttaaaagaacttgttcaagctggccaattttattaacaattgcacttccaattacaatgccgtcgctatgttcttttaacacctctacttgttcacttgttgaaatcccaaaaccgacggcaaccggtatagaagctgctgctttcacatcttctaaaaaggtgccaatatcagctggcaacgtagagcgaaccccagtaacgcctaaagacgacacgcagtataagaagcccgttgcatctgcagcgattttttggatacgctctttagatgtaggagcaaccattgaaatgtacgcaacttcattttcagcggcaagctctcggatacggccactctcttcgtacggtaaatccggaattagcactccatctatttcattttctcgcattaacgcgaaaaaggattctaaacctaattgtaacacaggattaaaataggtaaagagaattaccggtattttcacacctttttttctcatcaccgatacaagcttaatggcttttgaaatagacatgccgccagataaagctcttttagacgcctcttgaataattggaccatctgctaaagggtcggaatatggtacgcccagctctaaaatagaagcaccttgcttttgcaaagacaaagcaatatccaccgttgcatcttcatgaggatctcctgctgtaataaatggaataaacaatgtttcatgtttaggtagtctcgcttcaaacgtattcatgttcttcttccttcccttctagcaagtttactaatgtatgaacgtccttatctcctcgacctgacaagcaaattaaaatggtttcttcttttgtcatgcttttagccatttcaaatgcttttgccagcgcatgggcggactcaatagccgggatgattccctctgttttcgccagcagctgaagagcttcgattgactcatcatccgttacactttcatattctactcgtccaatagatgaaaggtgagaatgctctggaccgatacctggataatccaaacctgctgaaatagaataaggctctgtaatctgaccattttcatcttgaagtaaatacgtgagcgttccgtgaataacaccttttgtgcctttagccattttagcagcatgaagggctgtatttagtcctttccctcctgcttctacgccgatcaagcgtacattttcttctttaataaaatcataaaacattccgattgcattactgccgcctccgacgcatgccacgacagcattcggaagtttgccttctaccgctgtaaactgttcttttgcttcttctccaataattttttggaaatctcgaaccattttaggataagggtgcggtccaatggccgaaccaattaagtaaaaatgatcttcacaatgttgaacccagtagcgaattgcttcatttgttgcatcttttagcgtttttgttccagaagttgcgggaatgacttccgctcctagaagcttcatgcgaaagacgttcaacgcctgacgttcaatatcttcttctcccatgaatactttacattccattccgaactttgcggctactgtagctgtggctaccccgtgctgacccgctcctgtttcagcaataatttttgttttccccatccgtttagcaagtaaaatctgtccaatggcattattgattttgtgagcacccgtatgatttaagtcttcacgttttaaataaatttttgccccgccgagcgtttcggtaatattatcagcatatgttaaagctgttggtcgcccagagtagttaacaagtaaggatagatactcatctttaaatgccggatctttcattgcttgattcaaagctgcttctacttcttcaagtggtttcattaatgtttcaggtacgtattttccgccaaattcaccaaagcggccaaattcatcaggatgattgtatgtcatagtatgatcttcctttcaatctctataatttttgtatagtccttcgttccatttgtttcaataccgccagaaatatcaatcgccccaggcttgtagggtaacaagttctcaatgttacaagcattgattcctccagcaataaagcattttttacctaacctttgggcagctgattcatactgaggaacgaagctccaatcaaaagcgacgcccgttcctccaaattgttctttaaccttgctatcaattacatacccgtcagcctcttcatatacatgcatttgctgcagcgtttctttattgtgagggagcgctttccacacttcatatccacactgctttaaccgacgtacatccgcagctgtttcttgcccgtggcactgaattacatctaaatttgttacggaggcaatttcaagtatttgatctaacgatgtattaacaaatacccctactagcgagacttgtttttttatttcatccgttacaaactcatttactcgttcaggctttacatatcgtttacttctaggatagaaaataaagccaatgtgagtagcagccgacttttcgattaaagctatatcttgttttgatcgaataccacagtacttaatgagcatattcactttccccaagcagcttttcaatcgctttggtttgattatcctgcctcataagcgattctcctactaaaatagcttttgctcccgcttcttttacgtaggaaacatcatcgtataagtaaatcccgctttcactcactaacagctgatctttcggaacatgttttgcgatttctttggtctgctgcaagctggtttcaaacgtatgaagatttcgattattaattccaataatcttcggggtaaatacagctagcagcttttcaagcgtttctagagaatgcacttctactaaacaatctaactctttttcagcagcttgaagataaagctcttgcaattttaatggttcaagtgcttctccaatgagtaaaatagcatcagcaccgattcttgcactttcttccacttgaatggaatcaatgatgaaatccttgcgaagcacaggaatagagacatgctgtttaatgtcacttaaaaacgttcgatgtccttgaaaatagcgctgatctgttaacacagacaaagcatctgctttccctttctcgtaggctttagcaatttccacagggtgaaaattctcttttattaatcctttagaaggcgaggcttttttcacttctgcaataagagccagctctcgattcggatttgataaagcgcctaaaaatgatcgttttgcaacattttgctgttcgggtaactgtaggttttgaatttcttctttttttgtttcaataattttattgagcatgttcaaccacctttttcgatttcaatcgttgtaattgcgtgtatgcagcacctgattcaattgtttctaaagctacagctactccttcttcaaaagtagaaacgtttccgctaacgtaaatagctgcagcagagtttaatacgactgcatttttagcagttacattacttttatttaaaaatagcgattcaataagctcggcactcgatttcgcatcttctaccactaagtcttcaagcttccctctctgtaagtgtacatcctctggtacaagcgtatattctgtaatgacattgccctgtacttctacaacatccgttacatccgtggcactaatttcatctaaaccgtccctgcccgcaaccagaaggacgtggttagctcccagtacaacaagcgcttctgctaattttcgtgcaagctcaatggaataaacgccaattacttgctttgtgcagttagtagggtttgctaatggacctaatgcattaaaaacggttctaaaccctaattcctttcgagtagcagcaacgtgtttcatagcagggtgataaagcggcgcaaataaaaaggacatgttgaggtcagccaccgcatttttcacttctttttcatttccttgaatccatatatccagatgttctaacacgtctgcacttccgcttttagaagatacggcgcggttcccgtgtttcgcaacctttactcccgcagcagatgccacaatcgcactagccgtcgagatattaaacgtagaggccccgtctcctcccgtaccgcatgtatctactacgtttaattcttctagagaaatagcattcatattatttttcatacctcggacaaaaccaacaatttcatcgacggtttctcctcggtacgttaagatggttagcacgctagcaatttgagctgccgggactttaccgttcataatatcattcataattttttctgcttcttccgccgaaagtgactcgccgcgcaaacacttttttaacaattctttaaacatatacatcctcctttttatcgtagatgtcttgggctaattgaattgttttgattaaagcgctagctttattgcgggtttctttccactcaagctccggttttgagtcagcaaccactcctgctccggcctggatataagcggtctggtctttcaaaagaatggttcgaatcgcaatgcacgaatcaatgtttccatcaaatccgagatatgctacggttcctgcatatacatttcgcgcaactggttcaatttcatttaagatttgcatcgctcgcacttttggagcgccagatacggtacccgctggaaatgcagaaagcagcgcatcaatgggatgtactttttcgtcaaggcgccctgtcactttagaaatcaagtgcatgacgtgcgaaaagttaacctgctgcattaatactggtgtttggacacttccatactgtgcaactcggccgatgtcatttcttgctaagtccacgagcatatagtgttctgcccgctctttttcatcgttaattaagtcttcgtataagcgcgcatcttcttctgcatccctgccacgtcttctcgttcctgcaatcggatgaatttctaaatggccgttttcaatttgaatcaaccgctcaggagaacttccaattaactccacgccttttactttcacgtaaaataaataaggagacggattaactaatcgcaatactctgtaaatatcaaatccagctacggtcgtatcaatttgaaatctctgcgacaatacagcttgaaaaacatctccgcttttaatgtattccttaattttctccacatcttgcacaaatttgtctttttggtatgacgatgtcacgccttcaaagctaacttcgcgctgctcgctttcaaacatcattggcttttctttcaccgtctgcgctattctttcaacatatctattgatctctgctaaagcttcaccgtatttttcttttttctgctgctctttgtcttgctcattaagctgaatgtagtgaatcaccataagctcttttgtttgatgattgtaagcaagcatcgtttgacaatagataaagtgaaaagtaggcatgttcaaatcattttgggcatgtacgtttactttttcaatttgcgatactgcgtcgtagctgataaatcctactgctcctcctttaaaaggaagtgcaaggtctggtactttcactttcagctcttgctgaattttacaaaacacctctttaaagctgtctccttgcagcataggctgaagctgcttgttttttgctagataggttccgttttcttcctcaacatacaaaaatggatttaagccaataaaagaataattggaccatggtgatgattcatcattactttcaagcaaatatacggcttcatcttttacttgttgaaaaagatcaacaggtgtcatgctatcgataaatattttttttataattggaatggttaaatactctgtagagtcttctaaaaaagaagtatacgtgttcgtcatatctttcaatcctccatttcatggagaatgagaatagatgaggttatataaaagaggatataataaataaacccaaagacacatcaaaaatgggtctttgggtatacgaatggtaaaattcactcaactaaactctgctcaactgtctcattctcgtctaccctaatctcaactaaactgtctattgttttctcataactaaaatctctaaactaacttgttaccaattgtagtacgtttcaaattcatttgtcaactactatctacttggctttagacgaaactaagctttaagctcttcattcagcagtttaagaatcacttcatcttctacttgttgaacaaaaggtttgcctatgccttcaagcaataccatgtgaatattgcttgatttagacttcttgtccgctttcattcttacgagcagtttttcagctgaaagatggtttgggacagacgtcttgtagccaaatttttcaaaccatttcgcaatgtcatccacagagaactgacttttctcaagaacattgctgactttcatagcaaacagcataccaatcgctacgccttctccgtggctgatttgtccatagccgcactctgcttcgatcgcatgccctaacgtatgtccaaagttcagatgagcgcgaacgccagcttctgtctcatcttcttttacaacagatgctttgactaaaataccgttttgaatagcataaattaatttttcatcttgtaaatcagtcagcgattgtatattttgctgaagccattcataaaatgcttcatcgtgaataaaagcgtgtttaatcacttctgcaaaaccggaacgccattctctttcgggaagcgttttaagaagattaatatcataaacaaccgcttcaggctgataaaaagcaccaatcatattttttccaagctcatgattaatggctactttaccgcctacagcactatcgtgagcaagaagcgtcgttggcacttgaataaaagaaattcctctcatataagtagcggctacaaatccagctaaatcgcctactacccctccgccaaaagcaataacgagcgcattgcggtcaagctgctgttcgagcgcaaatgtctgacaatcgtagtaatgttgaaatgactttgcatgttcaccgcttggcactacgtatttagccactttaaactgcgtctcaatcgcttttacaaccgcttctccataatatgaatctacagctgaatcggtgatgattaacacagacgacagattaggttttacactctcgataatagaaggcagcttttcaattaatccattgcctaaataaagaggatatgttttggataaagtttgaatattaatttgcaacattaaaactccctcgcatgtgcacgcattttctcaatattttcagcaattaaatcaattcggtcttgtccaaactgttcgattagcgcatcagccaattcccaagctacaacggcttctgctacaacgcttgcagccggcacagcgcagctgtctgaacgttcgatgcttgcctcgaaggcttcttttgtttcaatatcaacactttttaacggcttgtaaagcgttggaataggcttcattacaccgcgtactacaattggcatacctgttgtcatgccgccttcaaagccgcctaagttgtttgttttacgggtatacccattcttttcatcccatagaatttcgtcatgaacttcgcttcctggtctgcgagccgcttcaaatccaatcccaaactcaacgcctttaaatgcattaatgctcataacagctgcagcaatcttcgcatctaatttacgatcgtaatgaacatagctgcctactcctgctggcacgccttcaataataacttctactacgcctccgatagaatcgccatttttcttagcatcatcgattgcttgcatcatgtctttctcaacagctgagtcaaaacatcttactggagaagcttcagtgacttcttgaagttcctctaagcttttgtattgagtcggatttgcctgtacgccgccaatttctaatacatgtccagctacagaaatcccgaactgagcaaggatttgacgagcgacagcacctgctgctacccttacagttgtttcgcgagctgaagaacgttctaatacatttctcatatcgcgatgaccatatttaatagcgccgtttaaatcggcatgccctggtcttggtcttgagattttacgctttacttcttctgattcttcttcagaaattggctcggtgcccataatttttgtccagtgtttccagtcgttattttctaccgctaacgtaataggagatgctagcgtatagccgtggcggacaccgcttaaaatttctgcttgatctttttcaatttgcatacgtcttccgcgaccatgacctttttgtcttcgcgctaaatctgtattgatgtcttcggctgttaaaggaagccctgccggaacaccctctaaaatagtagtcaactgtggaccatgtgattctcctgctgttaaatatcgcataatcgtacctccgcttaatatgtattattcgtcagaatttttccatttttaaatatgactataccatactataacataagaatgtacaaaaagtttcacctcagcttttaagaaaccgcttcaggttgtctcgattaaatggtctttgctttcctgtaaaaaaacgtatcagccgtttcaaatccatacttatgcggagtaaaaacctgttctgtgctacctacaaataagatgccgccgggtgctaaagctctgctgaatttttcatataaagcatgctttgcttcatctgtaaaataaataagcacatttcgacaaacaatcaagtcaacgttttttggaaaagagtctgacagtaagttatgtttctgaaaaacaactgtttttttgattttttcatctaataagtacccggttcctctttgttgaaagtacttatttttcatcgaaacaggcatttcctgaagtgaacgttcatcataaaagcctatttttgctttttctatcactttttcatccaaatcggtcgccaatatagaaatacgcgaaagcggaaaaaatgttgataaaaccatcgctagtgtatatggctcttcccctgttgaacaggcagcgctccacactttcaggtctgtttttccttttacaagagtcggtaaaattttttgctccaatatatcccaccgctgatagttacgataaaactctgacacgttaatcgtcatccgatctaaaaactcctcaagcagttcgttgttactgctcattgctcgataatattcaaaaaaactagaaaaaccttttttttcatacagggaggtgaggcggcgtttcatttgagactgcttatatagtgataaatcaatgcttgtttttatttttattttctccacaaacgcgtcgtattcatctatcatttttaactctcctttctcatttctatacgtttatgttagacgtataaggaaataaaacctttatatacgcttatcttcttattaatatatcggaatacattgtgaaaatgtttatgtagagagatattcgcaatcaatagcctaggacctatgtataaacacaataaaaaagacgaatgaaaattcattcgtctccttgcgttatctaaattagtaaatccaagcgtctgcgtcttttttatagaaagtcagctcttcactttcaaagaataagctgatttcacgctccgcactttctggtgaatctgagccgtgaataatattcttatcgacaatcagtccataatcacctcgaatagttccaggaagcgcttcttgagggttagtttttcccaccatttgacgtgatactgaaatcacgttttcaccttcccataccatagcaaaaactggacctgatgtgataaatttcactaactcaccgaagaaaggtttctctttatgttcaccgtagtgtgtttcagctaattcctgcgaaatatgcataagcttagctccgactaattgaaaaccttttttctcaaagcgagaaataacctcaccaataatgcttctttgtaccccgtctggtttgaccattaaaaacgttttttgtatcattttactctccacccctgaagttcatgatatgtaaacaagttttgaaagcgcaatcacacctcatgaagatattaacattgtttcgagcagtttacaacttatgaaagtaaataaatcaaaatttccgttttccaatgtacttcgcaatttgatgcagcgtttttttcgccttgtttggcggcagttcttctaaaatgctcatcgctttttgcagataacgatcgctcatctcaaatgaacgttcaatggcgttagaagatttaatatcagaaataatttcattgatcagctcttgctcatattccctctcgaaaagctgttctactttatctcgaaactcagcattttcaatggcatacaaaactggcagcgtaatatttccttgcagtaagtcgctgccaactggtttcccaagctgttcttctgatgagataaaatctaaaatgtcatcggtaatttgaaatgacattcccacgtaatatccaaaccaaaataaacgtttatgtatatcttcaggagctcccgctgcaattgcgcctaactgacagcttgcagcaattagcagtgccgttttacgtttaattctacgcagatacacgcgtaagttttggtttaggttgtatttgtccttaatctgttcaatttcaccgagcgttaattccaccatcgtattagataaaattttatgtgcttccacatctttaacctcactcataacttcaagcgcgcgagcaaagatgtaatcccctgtatacatagcaatacgattgtcccattttgccttaattgttggttttccgcgtcgcttatcagcgtcatcaataacatcatcatgaacaagagaagccatatgaatcagctcaagcgctactgccacgtgtttgatttggtcgatgttgtaatgcccaaatttagctgccaacaaaacaaatacagggcgaattcgtttcccccctgcttgtaaaaggtgaagagaagcatctgtgataagtgtttcatcggtatgaacagtttgttcaagttctttctcaataagggtaatatccgtattcaaaaaagcgtacatcatttttagtttcattggactcaccttgcattatatattcattctttactccttatcctacaggctgttgcacctgtaggacaagctttttctcttttatcgtttgtaccctagatgcatcgctgctactccacctgtgtaagatttcacttcaacatctgtcaaacctgctttacggaacatatcagccaattgcttttgacctggaaagtcccttgctgactcttgaagccatgaatattcgtcatagcttttagcgaccatctttccaagcgcaggcataatatacttaaagtaaagcaagtacatttgtcggtagccgatcatcgtgggctgagaagtttcaaggcaaaccacttttccgccaggttttacgacgcgctgcatttcctttaaaacttgaaggtaatcgggcacattgcgcagtccgaatccaatcgttacatagtcaaatgaattatcttcaaaaggaagttccattgcattgccatgtagtaaggtaatatttgaaaaagatgagttttttactttctcttcaccaatctttagcatattttgactaaaatccaggccaactgcttctcctgtttctccaactgcctcagccatagctagcgtccaatccgcagttccacaacaaacatctaaagcttttgttcctttttgaacattcattcgcttcatcgtatctttgcgccatgccttatgacgctgaaaactaataacagaattcatttgatcataatttttgtatattttttcaaatacgccatggacacgctgttcttttgattgctgcatatctctatccttctcctacgacatttttcagcacttctaagctagatgtaagttcacctaagtgctctcttaaaaactcattcatcacaaatttacttcgtaagtatcctctaacaatgtttacagactgttgagtatacgaataaaggtattcttttatttgttcttgattcatgccaatttgtttgcaatagtttagcaagagagtaggctctttatgctgtaatgactttaattgctttaatatcccgttcaaatacgctgcatgttttaaaagttctttccactcttcacgttcaaaatagtcacataagcatcttacaaacgatgattctgctgctaaaaaactattcataacgtcgtgtggattagtagagcgattgttataaatgtgtatcttagcgatattaatttctttaatagcagatgctataactttcattaaattcagctggttgctttgagctaaatagtaatagtacaggccgctgtaataatctccggccaaaactaccagctgccgctcatgcagctttccttcatttccgctaacattttgagtggagactagatcgtgggtatcaagtgcggtttgaacgagcatcacagatagcacagagctgttctttttttcttcttccattgaaagagtatctaagaacgaacacatgtacagtaacctattttcatcaatacgcggatgatgaatatatttttttacatatggatgacttaattcaacatgaagctgttctttcatgttggccacaatatcatagatggtttttacgctcatcatccttgtctccctttccatcactatttgtttaaagttcttttaactccaaatcgatagtgtcaattataacataattacattataaaatatcctttaaattcttttgaagctttttcacggtttaaatcatttagctactcatccgcttgaacaccgttcatctacataccatctggattccttagacagtaatttaagatattgcttttagtttcaccatgtttttcctgttcttattcatttattttaaatataaataaaagcaggaaaatccctgcttattttttcgtatcggattcaatttctccgtgaacagtctgaatgacggctttgccacgaattttaattgcggatgtatgctcagtaaactgcgcaatcattacttcgcctttatctagtttttctgaatgatgaaatcgcgtatctgctcctcgcgttaagccaattacgttaactccatcttcgaccgctttaatgacaatatactccggcgttcctttttgtgtcatattctcttctccttcatcatccacattatgatttaatcagtgataaaacttcagctctagaacttgcatcgtgttctaacactccacgtacagcagaagtgattgtcatagctccaggctttttgatgcctcgcatggtcatacacatgtgctctgcttccactactaccattaccccgtgcggctctaatgtttctacaatagaatccgccaccgtagatgtaattctctcctgaagctgaggacgtttcgcaacagcttctactgctcttgccagcttacttaaaccggtcactcgtccgccttttggaatatacgcaacatgagcttttccataaaaaggcactaagtgatgttcacacatagagtaaaaaggaatatcttttacaagcactagctcttcatggtcttctccaaaaaccgttttaaaatgctcttttggatcttcattcaacccggaaaagacttcctcatacattttagctactcgctttggtgtatctaataatccttcacggtttggatcttcgccaattgcttctaaaattagtctcacggcttgttcgatctgtggtttatttacagatgacatgttgttgccctccaattcgttgcattacgactttatgaaaaaattctagcatatgtatataccaaaggcaaaaaagaaaggtcgcacatttgcgacctttcaaagctcttcatcaacggctatgaataaagccattttatgtagatattattttacagcatctttaagagctttacctggtttgaatgcaggaactttgctagcaggaatttcgatttcttcgccagtttgtggattgcgtcctttacgagcagcacgttcacgtacttcgaagttaccaaaaccgataagttgaactttgtcctcagcttttaaagcttctaaaattgtatcgaaaacagcatcaactgcttttgtagcatccttttttgaaagctcacttgcttctgcaacagcattaattaattctgtcttgttcatgccattcacctcctcccaaaatcggatcatataataactaaaaaccttgttagaaaaggaatctagtaattcgttatatctcattctttaacaaaacaaatggatattatacataacctatgtatcgacaagcctaatcataaacgattgaactaaataattcaatgtttttcattcatctgccgtatgtatgtagtgaaaacagtatgatcgatcgatttctgttaaaagattaacatattgaacaaggcatagcaagcagaaaataacgcaggaataggataaccacgcgatctatcacaatatatgtaaagttttgtatgatatatccaaaaaaagaagaggctcctttatgaggagcctaacgttacattcttataaaataatcgcgattaaacctccagatccttcgttaataatccgttctagcgtttcttttaacttatatcgcgcattttcaggcatcagcgacagctttccttgaatcccttctcttacaattgaacttagagagcggccaaatatatctgaattccaaattgaaagcggatcatcttcaaagtcttgcatcaaataacgaactaattcttcgctttgcttctccgttccgataatcggcgcaaattctgattctacatccactttaatcatgtgtatagaaggtgccactgcttttaaacgaactccaaaacgcgatccttggcgaataatttcaggttcatcaaggctcatatccgaaagcgaaggtgcagctacaccataacccgtttgtttaaccatacgaagggcatcagagacttgatcatactcggtttttgcatgaacaaaatcttgcattaactgcagcaaatgatctcttccgcgaatttctactcccacgatttctttcaaaatctgatcatataagtcatctggagcgtataagtcaatttcggcaatcccctgccccatctcaattccagctaaccgagcctgatcgataaactcaaactggctaaattgctctactacccgttcaacatctctcagcctcttaatatcttttaccgtttctttaacggcttcttgatagctttcacgcagccaatgtttatcttttaaaaccattacccagcttggtagattaacgttgacttctaatacagggaactcgtagagtgcttctcttaagacgttcatcacatcagtatcgcgcatgctttccacactcatcgctaatactggaatatcatatttttcattaagctttgcacgaagcttttctgtatcaggatgatatggctgtacggtattaataaccatgataaatggtttgcctacttcttttagctcattaatgacgcgctcttctgcttccacataatcttgacgaggtatatctccaattgagccatctgttgtaatgacgacaccaatcgttgagtgttcttgaattacctttctcgttccaatttcagccgcttcatgaaatggaattggttcttcataccaaggtgtattgatcattcgaggtccgttttcatcttcgtaccctttagcgccaggcaccgtatatcctacacaatctactaaccgtatgttaacttctagcccgtcatctaccaaaacattaactgcttgattcggtacgaatttcggctcagttgtcataatcgtttttccagctgcactttgtggtagttcatcttgtgtgcgagctctttctgcctcgttctcgatgtgaggcaggaccaccagctccataaattttttaataaatgtagattttcctgttcgaactgctcccaccacacctaaatatatatcgcctcctgtacgttcagcgatatctttaaatacatccaccttttccaaaagatcccctccgatctatgagttcatggaatatgacatccattgcgagagtaaattaggacactatatagttatgacgttgtcctattaaaatatgacttttgatagaaaaatttatgatttttttcatgcacatgctgacttagtcattctgattatcattattggtgtacaagaaagagaaaaccccttctctctgaatattattcaaggagaaggggttcatgacttattttttaaaaaatattggttcattcttatcgttgactgtataaggaagagagtaagcaggtacaaaatcactgttttccacaaggagctttcgtatatcttcaccaggtttgtaggagcttttatgcttttgaatggcatcatacaaatcaggacgataatctacaaatacatctccctgtccattaacaattaaagaaagactattccctgtatatgggctagtaacgacaggaggctctttcatattcaattttttataattaatagagaatacgccgggagcgatgacgtctttaaacggcacgtaccctttatgattttgacggtatatattcaaatgtacgttaacatcttgaatcgtatccgccatccgtaagtctaataatttaaccgtgggttttgtttctgcatccacaagtacgtacgcaaatatccctccgctttcatacgaattcccaggtgcgtcttgcatgtatctaggaacaattttcgtaaagtcaatcggatatttttgataaatcggcgtgtccatatctttcgtttttatcggcaataagcctccgctttcttgtttaaattgatcaaccgccgtttgcacggaagcaacttgatctttataaggaacttgattttgagacattctttccgccgggtacaaacaaccggataatacaaaaatggttaacccaacaatagacgttagcatgaattttttcatttttttcaccctaccatatgtacattaagcatctgtcggcccgctgaatacaacaattaccataataagacctgctacaatcataagcgaataggcaatgaaagcgagtacaactttaccaatgcggttcgtaattttataacgactaaagtaaatagaaaataccgaaataaacataaatacaatggaacccaatgaaatccacatctttaacaaacctggcgacaaattgcatccactccttttttcaccgttattataacataaggacttatagttaagatggatattgatagaactttctaaattaactatttatttaccttccagtgattcatgctctatagtaattactttcctattaaattgacaaattcctgctttttcacataaaaaaatcgaagcgaagggggctcttcgcttcgatcataactaaatattcccatactaacagttctactcatctttatttacacgttattttatgcaagtaaatgattttgggtatcaccaattgcctattttttcatatttctttgcacttaatttaatttttctcctaaaacattcgctaaatcttccatttcatgtgttttagtacgagacataagcgcgtctactgcatcctttgccttcacatcattaaacagtacattatataaagcatcagcaatcggcatttttacgtcatatttttgagatagctggtaagctgctttcgtcgtgcgtacaccttctacaaccattcccatattttctaatacttcgtctaaatttttgccttttccaagaagattaccagcgcgccaatttcgagaatgaacgcttgtacacgttacaatcaagtctccaatcccggttaaacctgagaacgtcagaggattggcaccaagcacagtacctaaacgagcgatttcagccaagccacgagtcataagagcggccttcgcattgtcaccatatccaagtccatccgtgataccagcagcaagagcaataatattttttaacgctcccccaatttccacaccaatcacatcaggatttgtataaacacggaagtactgctgattattaaataaatcctgcactttttctgctgcttgtatatttgttgaagctgacgtcacagttgtgggctgccttctacttacttcttcagcatgactcggacctgataagacaacgatgtcttttgtatcaatttcttgttgaatcatttgagatatacgtaaaagagaatccggttcaatccctttacttacgtgaacaattgtaaatagttcatcggtaagggattttagctgctgcaacacttcacgaatggccttcgttggaacagctaaaataagggtttcaacaccttctattgccttttctaatgacgtaaaacctttaatctgatgaggaagctctacaccaggcaaatatttttcattctgatgcgtctcgttgatttgatcaatgacttgttgtctatgtccccaaatgcgaacatcgtgtccattttccgccaatacgaaagctaatgcagttccccagcttcctgctcctagtacagctattctttccacgccgatcacatcctctgttattttcttggtcttgcaataattttaattggagttccttcgaatccaaaagcttcacgaagcttattttctaagaaacgtttatatgaaaaatgcattagctcaggatcatttacaaacacaacaaaagttggcggcttgattgctacttgagttgtgtaatagatttttaagcggttgccgttgtgagtaggcgtagggttcattgctactgcatccataatcacatcatttaagatgcttgtttctacacgtaccgcatggctttcgcttgcaagatcaatcattggcaatagcgtatgcgtacgttttttcgttttagctgaaaggaatacaattggagcatatgttaagaactgaaaatgctcacgtatattttcttcaaattttttcattgttttttcatctttttctactgtatcccatttgttcacaacgatgacaacagcttttccagcttcttgtgcatagccagcaattttcttatcttgttcaataataccctcttcagcatttaatacaactaagacaacatctgagcgttcaattgcctttaatgcgcgcagtacgctgtatttttcagtactctcgtacacttttccacgctttctcattccagctgtatcaataacaacatattcttgatcttcttttgtaaactttgtatcaatggcatcgcgtgtcgtgccggcaagatcactgacaataacacggtcttcacctagaagagcattaactaatgaagatttccctacgttaggacgaccaatcaatgaaaatttaatgacgtcttctccgtaatcttcgtctttttcttttggaaagtgcttagctgcctcgtctagcaggtcacctaaacctaaaccatgtgttcctgagattgggaacggttctccatatcctagtgcgtagaaatcatagattaattctctcatttcaggattatctactttattaacagctaggacaacgggctttttggatttgtataaaattttcgccacttcttcatcagctgcagtaattccatcgcgtccattcactagaaaaatgattacgtccgcttcatcaattgcaatttctgcctgctgtttgatctgttctaaaaatggctcatctccaatatcaataccgccagtatcaataatgttaaagtccacattcagccactcacctgaactatagatacgatcacgagttacacccggaatatcttctacaatagatactcgctctcctacaattcggttgaaaattgttgattttcctacgttgggacgaccaacaatcgcaataattggttttggcatacgattcttccctttccttgatcttttttatgtatcggcaaccagtctttaatcgactaaaggtatttatctacatgtacaaataaataagatcattcttttttcaaaaattgaggccatgcagcgtggcatgacctctactaatcgatcataagcgataaagcaggctttttatcagctctattctacaccaagctgattaactgcctatccgctgaataagcattactctttcaatcaaacaattttatcaaaaatcaccggtaacaacaatataattttacgaaatctcttcttctatttgtaagtactttgcttttgcctgtgagacttcagcacgtacaaatctaaataagcagagaaataaaccagcatctcccaaataaacatagctcctactgctgttgctaaaacgtcgagtgtccgaagagaccctacttcataagatgcaatatctcgaatgacaactgcgtataaaaaatctcctccaactacacctaaaatgatcgctgcgaatcttttttcaacatctttaatcaccataaagcaaatatataagataagtccagtcaaaatccacttacgatcaataaaaatccatacaggatcatagagctcaagtaaacaaaaaccagcataggcaattattataatgccgcatacaataacataatataactgctgaaacctgctgtagcctgaagcataaacacacgctacccccactaaaaacaaagcggtgtagctacatgaaaactgagccatatgcatgttcattccgcttaggagtatactgattaatataacggctgctaccttccaacgcctaggtgttttgggcataagaaaagtcgcaacaatccatcccatccacgaaagccaataaaagaaaattccgtccactgaatatggcacctcctctacctgtcatcagtatgtatcaatttgggaaaacttaatcggagttttagaatagaaccccttattttggacaacctatcagaaaaaaggagggaatctaaaatgggaaaagatcgtcaagagaaaaagttaaaggaatcaaaacgagttgaatctgaccgtgatcaaggacttcactatccgggagcaactagcttgcaaagtcctgaagaagcgcgcgaattaaatgagcataaataaaaaaatgcgctgactaagtcagcgtatttttttattttaaaactggatgtgaaacaggataggaacgttctttctttcctgtaaacaaaaagagaactcctcccactaacaatagtgcccctgacaaataaaatccgaattccatacttccaagtttatctgcaaaatatccggtaatgtaaggtgcaaagatcgatgacagcatgccgctgaagttgaaaaaaccgtacactttagagtacatggacgatggagtaatatccgccatatacgaaatcaaaatcggatctaatgctaatttacctatcagaccgtacacaattaagccgattaatagccaagaataactctctgtatagggaataaaaaattgacataaagcgcccgctactgacaaactcacaattaatgtttttttatttacaattcgatcagatatatatccaaagaagattgctcctggaatagacgcccaaggtactaaagatgctatgatgcctgtttgagacccttgtaagcctcgcgagtgctgcaaataataaggaagccacgtcagcatcccaaaaaatccgtaaagagagcagaagattaaaatgtatacgaaaatatgattttttgtaaataatacttttagcgactgctttgtttctttatttagcgaatttttttcttgatccctttgcttatcttttacaaagaaagctattaaaatagctatcactattgtcggaatagcaaataagtaaaaagtaaactgccagtctttttctaacgtatatgtaatgtatgtagaaccgataaaaccaagtgatataccaaaagccattccactattaatgagcgccgacactaaacctcggtatcgttcggacgtgatgcttgatgaaattccgtattgtgaaccataatacgttccttctccaagccctgtcagcgcccgcatgagtaagaacataccgaaagtagttgtaagtcctgtaaaaaatgtggcaacgccaaacaagatgtatccagctactaagatcttaacgcgaccaaatcgatctgccaaaaaacccgttggaatttgcatagctgcatacgctgcaaaaaatacggtagacattagcccaagttcagctttattaagatcccactgcgcaccgatatctcccataaccggagataaaatattacgatctgcatacatgaaaacccagcctaaaaagaaaagaaaaattgtaaatataggatgtccctttttcattacgtcacctctttttctgatttttctgtttatttagcttattataaggggctaacgtttgggatttcatgctttttgtcacttcttctgccaacattttttgtttttttaaatgaaaacgcgatcattcatcttttaaagaaataaaaaagcacgcagtcaactgcatgcttttttatgatctgttattaaatgtttttatagatacatttcgctgagtcagccagctatgggtatcccctgtaataactagaggcatttgctgaagcttagcaatagaagttgctcctagcgcagccatgatgaacgttaactcctcatgcagctcggctatctcttctacaactgcttctaaaccagacttcattaaaatggataaaaaatatcctgccattcccgttgcagaagctcctaacgcaatagacttagcaatatccatagaggtttgaatacctcctgaaccaataatggacataccttctacgtgctgagatacttctgctaaagaagctgctgtggaaattccccaatcattaaagaagtgaaaatgttttgctcgtctttcattttcgattttcgaaaaattggtaccaccgtacccaccaatatcaacgatttcaacaccaacatctttaagtttttgcactgcttgagcgctcatcccaaaacctacttctttgacaattacaggaacggttacttctcggacaatgcgttcaatacgacgtaatgcatcggtaaaatcacgatctccctctggcatgaccagttcttgtataacatttaaatgaatttgaagtccatttgcttcaagcatatcaaccgcttttttagcttgttcaactgtagcttcactgcctaggttggcaaaaataattccgttagggttttcttgacgcactactctgtatgattgttcttccttttcatctttaatcgcagccatctgcgacccaacggccattgctaattgaccatgatgagcaatttgagcaaacgaacggttaatccgttccgtttcttgtccgcctccgcccgtcatagcatttataaaaattggcgaacttaacaaaagttcgccaatttttgtatcaatatgaacatcgtgcacgcctgtatttggtaagctattatgaacgaagcgaatatcatctagcccgtgcagcctatgctgtcccgtttgaatcgcatgatgaatgtgatcaattttacgttttgctctgctcacaaatcatcaccattacttatcttaatttttttaattgatccccaatcatatcacctaattggaaaccttttgactcttcttgtaattcatagtcaccgtaatcttcttgttcttcttcctcaagatcacgaatgcttaacgaaacgcgtcgttcttgttcattcacatcaagtactttcaccgtcactttttcgccttcagaaagcacttcatgcggtgtcccgatatgcttatgggaaatttgagaaatgtgtacaagtccttctactccaggtagaacttccacaaaagctccaaaagatacaagtcttttaacggttccttctactacatcaccttggcgaagcttcgtagaaatgttggaccatggaccttctaacgtatctttaatagataatgaaacacgccccgttgatttgtcaacagacaatactttgactttcacagtatctccctcagctactacgtctgaaggtttttctacacgcgtatgtgaaagctgagaaatgtgcactaacccatctactccgcctacatctacaaacactccaaagtctgttaagcgctgaacagttccttctaaaacctgaccttcttttaatgactcaagaacattttctttttgttgtacaagctcttcttctacaactgcacgatgcgaaaggatcacacgatttttttctttatctaattccactactttgactgtaagagtttgatcttgatactctgcaaaatcatcaacgaaatgagtttcaacaagagaagctggaatgaaccctcttacaccaatatctactactaatccgcctttgacaatttctttgactaccgcttcaaacacttcacctgaagaaagttttgcttctaaaccgtcccatgctttttcagcatctacagctcgtttagataacacaagcaaatcgtcttccactttaattactttcgcttcgacttcggcaccttcttggattacatcgcctgctttttcaatatgtaagctcgctaattcactgattggaataataccgtctagtttgctgttaggtacatctacatacacttgcttttcttctacttttgtaatagtaccttttactgtttctcctacttctaatgacgttacctctacttgattcatatcttctgtcatcgtcttttcctcctccaatatccatctacaatatgtattcccttgtaagagttcttcactcttttagctcatcattattgtatatagctctgtatagaaaaaactctctttgttactaacttctaataaatagaatcttttgtcaagtcataaggttacaaactattgatatttttcaattaattcaccaatgcttttcataataacttccgttacttcgtcggctgatgcttttcgttcgcgaagctcatccatctgaattggcggtccgtacactacttttaaccttgcaaaacgcttatatggaccaataacagcgcaaggcacaacagctgcttttgaacgcaaagcaaaaaagcctactccagccatcccttttcctaatttcccatctttacttcttgttccttcgggaaataatccaagcacttttccttcttttaaaatctttaacccttggcgcaaagcttcacgatctgccatcccgcgctttacagggaatgtttctaactttggcagaaccgtcttcagaaaaggtgcgttaaacagctctgcttttgccataaacgaaataggccttggacatgtcacacctacagtaggcggatctaagttgtcaatatgatttgaacaaagcaaaactccgccttctgaagggatattttctgcaccgattacttcataacgataaactggtgttaaaatgccttttacaatggcacgggcaaacatataaaagctcaaaatcatccaatcctttcttttgtaatagaaagtattttttctacaactccttcaatcgataaggaagttgtatcgatttcaattgcatcttcagcttttttaagaggtgctacttcgcgctcagaatccagcttgtctctgcgggcaatttcttcttttaaacgctctaaatttgattcaaaacctttttttatgttttcgtcatggcgtcgctgtgctctttcatccacagacgctaataaaaagattttaacttctgcgtgaggaagcacgtgtgtaccgatatcacgtccatccattacaacgcctccatctttagcaaggccctgctgtctcgctaccatctcttcacgaactgcacgatgtttcgctacgatggatacagagttagttacttctgcagaacgaatttcacttgtaacattctgcccatttaagatgactacctgtccagattcagacggttttaaatcgattactgtttcgttaagcaaatgcaatagctcttcttcattttgcaaatctacctggtttttctgcgcttgatacgttagagcacgatacatcgctcctgtatcaacataaatatatgataaggtttctgctataatctttgccactgtacttttcccagcagctgcaggaccgtcaatcgcgattgaaatttgtttttccataagtgcctcccttaatttcaaaacaggaacaaaccactttcatcttttatacaatgagccgttttatatgaagggtttataaacgaaaaaaagagcagggggtcttctcctgcctggtgttcactgcatgtttctttcctagttattctaccatacgtccgactactggtcgaatgtttcaataattttattaaaattatttttgctaactccctcatactgaataacctttgagaaatatgtactgtgactgctagatagtaaaatacattgggcaattattaaaaacacaaattgaataaccactaatttaattaaaattcgttctattcgattcaccttttttctccttttgtaagaagtaatacctttgcttacagtttaggaaagagaagttttttttatacgctaaagaagaccttttcttcttaggtcgagctgacgctttaaggtataacgaatcatcatttctttcgtttgtttttccatatccataaatttaatagatagctgacctactttacaagaagtcggggcggtaattcgtacaacttccccttttaattcaagatgctgcaaagctccctcacgattaggaagacttaatcgtacaacaaccgaatctttctcattaaaaagcagcgagtgatggaaggagccggctattccacctgcactgatgtttttagtcatgatttccattacatcctgctgttcttgttcactttctatcaccgccttcactgtaagcggcacacggaaaaaatttcttctttagatggattttaactttttatcgcccggttaaaagaacttcacaacaggcatgccttttatttcacgccctgttacttcagttggaaaggtatatacattttgatcatatccaataaacgcagcaagcaattttgtaccttttagtaaaaaagcacttcgctgcgttttttcatttagcggatagctaatataaattacgtcttccgtaaactcaactactttacatcgatatgtttgttgtaatgtagactctctgtgcccgctctctaacgtcaacctcattcccgcttttatcatcttctctctccttcagttccactatatacactttttccctttatttaaatatagttaaatgtgtttattttgtaaatgaaaattagttatttagactcaataaaatattacaaaacacaaaaaccagtgcctatagacaccggtttttatcaactttacacttcattatataatggttctgagttttgcagtttttcgactttttcttcaaaacccgtatcggcattgatgaaaatacgatacgtatcattttttattgtccctaaaaactcatagcatagcacttcttcgtttaaatcattcgtaataattgccaagcggtcttccatcacttttacattcgagttcaacttggtttttgcctgttctttcgaaattttaggttttggaatatctcttgtacgatgttttaataagaagtctttagctgagaaaccaatcacagatccatcttctaaagacattttcattttaactgaatccggataaatccgaactccactttccgtttgctctacgaatgtaaagactcccatgttatcatattgagcgctttcagccatcactaggctttcaaaacgatgatcttttaaaaacttagtcgctttgttcatagcatcgtttaaactaatattttgttttttaatatctcgatcttcgagcacccaaagcggatatccacctttttgtgtaatatccatatacgtctcctgcttagtctttggatctgtaatggttaagctgtacacctcataatcggcatcttttccgctctttacaatatgaatttgttcatttccttttaaatttaaaaacgaacgcgccacttgttttgcaacatcttcactaacttctctaccttttaattgatgaaaagcgtttttttcctgctcattcgttgcgttcataacgcctaaatctgtttcggcaaaagaatccatacttttttcaacggtttttaatccgtcaataatcgtattgtccccttgcttttcttttgtggctagggctagctcaacatccatccagcgcaagttattatcaatgactagatgctgtacttggcgcatttcattttgaatttcgcctgactgatcataaagcgaatttaacgttttatactctttatctgttaagggggatttgcttaaatcccttaccgccactttatacgtaaagtcaccaacatctgaaagaaactcttctgttttattgaacggcaaaagcgataaaggcagctgtcctacattgttatgagcttcagaagttaaacgccatacttctgcaagcgcgggcgaaagctgatctctcgaactcatggcgagcgtgccaccgattttatcatttaacaaatctagctgatatgacaaatcatgaaatgctcgttgatacgtattctcggcttgaagcagcacagcatctttttcttgatgttcgctgtacccccaataccctacacctacaacaccaatagctaataatacaattaaaattgttcgaatcatgtttccttcacctctctttatcgacagaaaatgtgtttcccgatttgcttaatttgaggacgtgaccaaatccatgcgcttgttgctgtatccggattaaagtaataaatagcattcccagtaggatcccatccgttaatcgcatccataaccgcttttttagatgttggattgggttcaagccaaatttgcccatctgctacggcagtaaatgcacgcggttcaaaaataactccagcaactgtatttggaaatgacggactgttaactcggttcaaaataacggccgctacggctacttggccattatatggttcaccccgtgcttcaccatgcacggcatttgccatgagctgaatatcgttttgtgaaaaaccgcttggtacattcaccgctgttggcttttgtgctttttctttctgttgttcagaatttcctttagacgtattacgctgcggctgactggcaggtttttttgcttgagaagatccgctttgtgctttttgctgaccattgttcgcgctgcttttcccactgctaccgcttcctttagactgttgatcaagaggctgaccgccatagtgcgtaaacttattcccttttctaatttgatttttcacatagttttcgtgatattttgtggcgttggctaatttaatctttgtttgccagcctgctaaaccgtcaatctttttaatgccaaattcatattgaaaattgcgcagtgcccaatatgtgctccatccaaatacaccgtcaattttcccattataataacctaaatactgaagtctcgactgcagctcaataacgtcatctccaactgctccatgttgaatgacttgatttgaaaacgcgtgagcggcctttggactcacaacggacgctgcaataaatgaacatatgcatatgagacatgcatactttttaaaacatcgaaatgataacatgacaaaacctcctacatcgtatgtaactgataagatgataggagtattttttgtaaaggttgtttttttatacaagatgcgcaaaatttaccgaaatgaaaaaaactcagctcgtaaatctctcaaaaaagatttacaagctgagcctagacaatcgatggctgtttggccttttttacttttcttaacgccagccaccataaataaatcataaatggaataataataaatacccaatgatccattgtttttaaaatataatcatatgttccatgtaaaatgagcggcgcaaatacggagtacagcgtccacttcgttttttcctttccttcagaaaactttgctttccctaaataataccccataatgacgccgaataaagcatgactagatacgggtaaaaaggctcttcctagcgctgattctaaaccatttgcaaataaatataaaatattttcaacggtagcaaaacctaatgaaacagctgccccgtaaacaattccatcataatgctcatcaaattccacatgctgataaatcgtgaaatataaaatgaaccatttgaaaaattcttctaaaaagcttgtcgtaaaaaatgcttgaagaaaaggtgattgaaaaacgtgttcttcaccaaatacatattgaataaacataattggcaaaacaagcattgctccaaaaataaatgtttttaataccattgaaataggctcagtttcatattcatctttcaaataaaaaaaacttaacaatgccaatcctggcgcaatgcctgcagatacaatcgccaacataaatagcgcctcatctcctctattttttttaatagtaacatgttatctttaggatgaaaatctccgtctataatgtccttatctttatatgtaaatgctcacataacttgctgtctatttacaaagcctaacaaagaccttaaacaagtataccaaaaaatgtatcatacttatatgaaaaattgaaaggagctctctatgaaaactgtttatattcttcacaccggcggcacaatctctatgaaagaagacatggcaactggatcggtaacaccagatattcaaaatccgcttcaccgctccacatcatctgtttcaggtatggctaatgtaatcgtagaagaagcatttcatctgccttctcctcacattactcctaaggaaatgcttatactttcaaaaaaaatacgcgataaaattaatgaaggcaaaattgatgcaatcgtgttaacccacggtacggacacgcttgaagaaaccgcttattttttagatttaacagtgcatacagatattccaattgtcttaactggagccatgagatcaagcaatgaaattggttcagacggtccttataattttatatctgcggttcgggtggctattagtgacggtgcaaagggaaaaggtgtcttagttgtgatgaacgatgaaattcatacggctgaaaatgtgaccaagacccacacaagcaacgtggcaacatttcaaagccctcagtacgggccaataggattaatcacaaaacgcggcgtatcttttcaccacatgcctacagaacacgaattttatcccgtcaatcagatagataaacaaatcactttattaaaagcttatgcaggaatggacgaccatttatttcaagcagtggcttcaatgaatgttgatggacttgtaattgaagccctcggccaaggaaatctccctcctctcacaattccaggcgttcaattgcttttggagcgaaagatacccatcgtgcttgtttctcgctgttttaatggaattgctcaagatgtatatggatatgaaggcggtggcaagcagttgaaagagatgggcgttattttttcaaatggcttaaatggtcctaaagcacgcattaaactgttagttgctctccaagtaacaacgaatcatgatgaactgcagcagctatttaatcattagtaaaacaacgcatagaagcctatgcgttgtttttgttgataatatgagaagcaattgattttccatgaaaacgtccattttcgataaaaatctcattagcattgtttcctgcagcaatcacaccagcgatataaattccttctacgtttgtttccatcgtctcttcgttaaaagaagggcggcctgtttcatcatctaattccacacccatttttgttaagaacgaatgatcagggtgatagccagtcatggcaaaaacgaaatcgttattaatcgtagattctttcccttcctgctcatatgttaccgtttcatccgttatctttgttacatgagcattaaaatgcatcccaattgttccatttcgaaccagcgcctcaaattcaggcaatatccaaggttttacgctaggtgagtaatttgagccacgataaataaccgtcacccttgcatcacacttcaccaattccagagctgcatccacgctagagttttttccgcctataacgactacatctttatcaaagtacggatgcgcttctttaaaataatgaaatacctttgataaatcttcaccaggcacattcatataattaggatgatcgtaatagcccgtagctataatgacattctccgcttcatatgtctctttagatgttgtgacaataaattggttttccgcttgtttgtctacttgcaagacacgttcaaacggctgaattcgaacttgcttgcgcttcaccacttctcggtagtaagcaagagcttggttgcgcacaggcttacgattctccgtaataaaagggacatccccaatttctagtttttcactcgaactaaaaaacgtttggtgggtcggatagttataaatggcattcacaatattccctttttcaattaaaagagcatcaatacctgtatgttgaagctcaatagctgctgaaaggccgcatggtcctccgccaacaataattactttttctttcttcatgcctgtcactccttcagttgtaaacgcaccttttttttattttaacgcagtgtaaaacaaaaaaatctcctcattaatgataggagattttttctatttacgcaattgttctgctgttctgtttttaaatccagcctctgaaacgagagccttctgccatttttcttacgcctatcatataagcagctagacgcatgtcgacttttcgagttgtagaggtttcgtagatgttattaaatgatttaaccattactttttcaagcttttcttctacttcttcttccgtccaataataaccttggttattttgcacccattcaaaataagagactgttacaccgccggcacttgccaaaacgtctggaactaataaaattcctctctctgacaaaatgcgcgttgcttcaagagttgttggtccatttgctgcttctactacaatactcgcttgaatgttatgggcgttttcttctgtaatttgattttcaatcgcagctggaactaggatgtcacagtcaagttcaagcagctctttgttgctgattgtattattgaataatttcgttactgtaccaaagctatcgcgtcgatctaataaataatcaatgtctaaaccgttagggtcatgcagcgctccgtacgcatcggatatccctacaattttagcgccagcgtcgtgcataaacttagctaaaaagcttcctgcatttccaaacccttgtactactacccgtgcaccttgtaattcaatgcctctttttttcgctgcttcacgaatacaaatagttactccttttgcagtcgctgtttcacggccgtgcgaaccacctaagacaaggggctttccagtaataaagcccggtgagttaaattcatcaatccggctgtattcatccatcatccaagccataatttgtgaatttgtaaacacatccggcgctggaatatcctttgttggtccaacaatttggctaatcgcacgaacatatccgcggcttaaacgctctaattctccaaaagacatatttcgaggatcacaaacaattccaccttttcctccaccgtaaggaaggtcaacgattccacattttaaactcatccatatagatagagcttttacttctttttcagttacgtttgggtgaaaacgaattccgcctttcgtaggaccaactgcatcgttatgctgcgctcggtgacctgtaaaaatcttaactgatccgtcatccatacgaacaggaatttttactgtcatcattcgtaatggctcttttaatagttcatacacttcatcaggatagcctagtttttctaacgctttatgtatcactgtttgtgtagattttaaaacatcatgcttctcttcttgactatttttactgtcttgcatcttgtcggctaccatctgtaaacctcctaaaatgtatcgaaaattattcgtttttaattgaatggtgcttctttcatgacatagtatacacccttagttttacattgcaaaggaaaatatcgaacttttagtattttttgtgttcttctaagaaaacgcttccattaactttacaaggtatgctacaatgttttaagtctgcctcttttctagtatgctttaatcgtctaaaaaaaataaaaaacacccggtgataaagagcactttcaacaactttgtaaaagctgaaagtgcagccactcttattttaataaaagtgctttatccttcacgggtgtaattatttcaattaaacagttaagaaaagacagagttaatatactccaaagctctcttttctactaacatttttccatattcatttacgcggtgctttgtaattgtagagggatttccatactccgccaaaaccgcaatcatattcccaacttcagccggtgacagcatgtgataatccaacagcacgtaaaaacgtttttcaaatgaatagagcacgctatctgtatcgtaaaagtttgacatgcgtttggtcagctgaatgacatcttcaaatgaatcaaactcaaaaaacatgtcttcgctttcatctagcatgacctgcatttcaatgaagtcttcgaactcgtcttcatcgaactcaccgtagctggtttcttcttcatactgttttgtcacaaatacaaccattccctgtgcttgaagtgaaaaaacttctaccgaaagagaatttgtaggttcaaagttcagttcttgagaagcttgctctatcatctcacgaaagagctgttttactttgaatgtatctgtccatagatcttcttttgttaaccctctttcttttaaatcatcgtaggtcaaaaaaacttttagcttattatagtttaatcgttcaagcctcattagcgtccctccccgcttgcactcataaccacatggttcgataatgcagtatatgtattttttggaaaacggttcgtgatgtttacttacgagtttacaggtttatgatgggaaagacaagctattctcaatcaatttctgctaatttttttgttagccagctgttccactcttcttttgtatttcctaaaataaacggctgggcctggccttttcttttgctatctaaaccatcaaacacataaccgcctaatcctactttgagatgcgggaatttctttatcatttggttcgtcaaatttagtgttttctcggcattttccatcattgtgcatgacataaataaaaacgttgggtctacttctttaacaattaactcaacatctttatcttcaatactgcttcctaaataaataacctcaaaccctttacggcgtaaaaatagcgtaaagactaggagtcccacttcatgtgtctcgttaggtccgcatacagcaatcgctttaggtaataagccatttgaaggcagcgaataaaaaatcatgctgatacgcgtttttaatacttgagtcgtataatgctcatgagcacttgtaatttgccctttttcccacatatctccaaccgtcacgagtagagaacccaaaatatcaataaccactttttctaccgaatacaggctaaaagcatgattaattaaatcctgtgcttttccttcttcaaaagataaaagcatcgttaacagctcatccctaattttttgaggggaatctacttctccttcttcttcaaacgttcctactgtactactttccgtttctaataacgaaaccgcttgacttatggtaaaacctccgctcactttttccgtgagccattttaatttccgcaaatcttcctctgtatataaccgatgccccgaatcgttgcggacaggatttaaaatttgataacgtcgttcccatgcacgcaaagttcccggctggattccgaccatatttgagatggctttaatattatacttcccttcgtgagccatacgtaacctccaactactcttcgtgaactgtatctattaattgaattataggataagttatcctgtgtgtaaaatttgtatatgctatgtaaagagtttgttcaaggctattctttcctttttaaagtgatataatgcgtttgggctctagcttgtaaacggagaggcaaagaggttgtaccatatccgttactgacaaaaagaggaatctttcttttttctctcagccctcctaattcatacataccaaaattaaataagcgtatctgtcccccgtgtgtatgtccgctcaaaattaaatctacttttgaatcttcatctacataatagataacatcaggattgtggcttagaagaatggtaagctgttcaggttcaatgaaagagacagctctctttagattcatctgaccttctgataaatcatctacccccgcaaaatggcatgtagtaccatatttagaaacggcaaagacatgctcgtttttaagggcaataacttcttcatctttaagcatctgcttcaattgcatttgacttacttcgtaatcattatttccccacacaaaatagacgggtcctagcgttttaagcttttgaatattttgacgagcccgcaataaagggactcctccttctagtaaatcaccacctatgatcacaaaatctacttcgcccggtattttttccaacagcttcgacgaaactgttcgcttatgtatatccgatataaaaaacaggcgcaaaggctgctgattttcaggaaatcttgataaatgaatcgttctttcttcgacatatgtacgatgggcttctgaaaacataaaaatcagcaagcctatgcctaacgctaaaacaattaaaagaataaccatatattctccttcttttcattttatacccgatgtgtttctgttaaagaagaaagggcataaattatcgcaattgttaacaaacctactacttgataaagcgcaattgcacttaacgataaaattcctatcacacatagacatgaaacaaggtattcatgccattttaccttatagccttttagaagcaaccgactttgcagaaacactttacgaactgccgccgatagacaaaaaagagccgtgaaaaacaagattataacactaaacacatctaacggatgtaaaatcatttgaataagtaaataggttaacgaagcttttgagcctacagccgttaaactgctgatataataactgcataaccacgcagccagcaagttaaaccaatccctcacaaaaaaacccccttcactaaacttctatgtaaaaagaggctttttcatgcgattctatttgttttcatgatataaattaattccataggttgactgcatccagcggaacgtttcttttcggtgctcccatgtttcaggcgtcgcccatagctccttgcttcttttaataatctcacagcgcaaatcttgaaaagtcttttctgctttctcgctttttttctgcagctgtacagtataaaagtaaagtgagacggtaagcaatagaaacatcaaatgccccatgttgcctaacaaaaatgaaaaaaattcgctaaacgtcgtaaaaaaaccgctttgaaatatgaaaaaaaagtagctaataacagccgttacactggctaaaaacaaaaccttccattttttctctttagctttcagcttattgactgtctcttttcttttaataacgctcgctaatatatattgaagtgtttcatcgctttcaaagtctatcattttgttttccatcattccaccccctcgtatgctagtacaacatatgagggaacataaaagattatgtgggtagcactgaaaataatggctgtttccttaacctttactgcattagttcttctggctgtgcagattccccttttgattttcgtatctgcaggcctaataaaaaatcaatgagaaaatgagtaaaaatcgtgacatacaaattttcagtccacaaaaaaagtaaccctattaaaaaacttaaaaacacaaccgaaataaaaagaaaccacttttttaaatatcgaatgtgaacgagtgcaaatacgatactcgcccaaaagaggccaaactgaacttgtataacccctcgaaataatatttcttctgaacatgcaacgattaggcaaataaggaccagatgaggaacagaacgattagcaaataaacgttcattgatccctccgtcatcgtataaatgctcaggtacgcatttcattagaagtatatctcctcccactaccaagagagctgttcctcccccgtacaataaaatagaagaccaatccacctgaaaaaactgcaaaaaggaattccacgaatcgaatgtaaaaaaaccgatgcctaaggcaatgaagcagatgagcagctgtgttacatataaatttttaactagctctgcatctgtcatggatgaaataagctcttgctgtgattttgccattatatctctccttgacgaagcaaacgagctaattctaattcccagccttgaaatgtccattgctcctgctcaccatttgtttttttatagttttctaaatccaagccgcagcaatcgcaacaattctcacgctctgattttcccgtttcatcgaaatagccaagcagcacgtgacgacggcattcttttgtctcaataaaccccttcattgcacgatacttgtcatgtttgtttcgaagacgtttatttacagctgcaacaatcgtttcatgcagcgattcaggaattttccagggttcaacatgttcatttttcactacattttctctgtacaaataataacgaataaatcgccaatgtgtttcttgaatacccactgtataaagaaagtgagactctacttgttttaaaggaatagcctgatcatggtttcgtaaatacgacaagcagtataagatgatatctgaagaaggaagttcaatttcaagtaaagaatgagcaaaatcatcgtctccttcagcataaagcaagatcgcaatactgtttcgctgatcgcgtccacttcttccaatttcctgtacatatgcttctagctgcgtaggtgtatgaaaatgaataacaaagcgaacattcgatttgttaacccccattccaaatgcacttgtgcagcaaatgatatcaagctgattttctaaaaattgctgttgaacaagcattctttcattcggttccattcccccatggtaatactgcactcgctgtatcccattttcctttagaagctgtgttaatgcttctgtccaagatcggctggaacaatagataattcccggaccttgcagttcactaacgtacatcagtaacttctcttttttttcttcaatacttgcaacaaaatcaactttcatcgcaatattacttcgattcatggaatagatgtgctcgttgacagcaggcagcgataaatagcgcttaatatcttctactacttccctagtcgcagttcccgttagtgccagacatagcggactgccaagttccttccatatatctcctagctgtagataatctaaacgaaaatcatgtccccactgagaaatacagtgcgcctcgtccacaacgaaaaggcctacctttgcctgctttaatgcttctactacaacagcattttgcaaaatttcaggagatgcataaataaaacgataaaaagctaaattttttagcgctcgttgtttttcttcttgttgtaggaaactatttaaggcaataactcgtttttctccgcttgcttttagttgttgaacttgatcttccatcagtgaaattaaaggagatacaatcagcaccggtcggtttaacaaataagctgggagctgatagcacagtgattttcctgttcctgtaggaagaaccgctaacacattatgacccgttaaaatatcttgaataatctctttttgccctagtcgaaattggctatagccaaattgtttctgtaggagttgttctatcttcacatcaaacaccactttttttagtatcaggtaaaatgttttgctaatacgagacgaatctgaaaataggtaacgtcgtcttttacttcttcttttatcacctttaatttatttgtacgcaaaccttcaaaagctgagataatttcttcctgctgcttaggcgatacgtatgcatcgattgaaaaagctggaacaaacagagctaattctgcaatatgatcttcaattgtactttcttttaaacgccttatataagcaatttcttcaagcgtcttgcctttttgaagccagctatacgtttttagcgtcgagcttgtcaaaggcaattctaaatatagatcacgtaaaaaagaagaaagtacatgaaagctttcattattttcactcactttttcaatgatatggtgaataacccctaaaagttgaatatgaacataatgctcatcgagttcatattgatatgctaactgattttttgtaaagcctactctttggtatccagtcagttgcaaaacaaaaagagacgcatcccgttccctacaacctttcaagcacgttcggagctcttcgaatagctcggcagctaactcttgacgcgtttgcttttgagacataatatacgttttgacccattgaatgacctcaggatttttggaaatgggtaaaaaccctttttgaaaatactgtaggtttgataaggtctgaatgaacaaagtgattcttgctaaaaataattgagtactgcttgcgaatttccatccgtctaaagctggatgaaagggtcgagccgtcagttcatcttcaaggcgtgcttgtcccttatctgtcatcacatacttttgattttcagtttcttcaatatactgctgttcttttaaatatgcaacgcaggtttcaaaagaccgtttatctaagtaaacaaatgactgaaaaagaaacgaaatcccaaaaatttttccgtcttgaatcgtttgagctgactttttacctgttaataaatgataaataccataggcggttcgctcaccttttaactgttttatacaaaataaaatgctaacttgaatataattcaaaggtgtcaacttcctttctcattcattgtaccaaaagtgaccaatagcatgtgagataaaggctttttagctctttcctttatgtatcaaaacgtttgggtaagtgaagaaaccttgatttgataagcattctcagtgacttttctattgaaaagttttataaatcattttacaatgaataaggagaaatttcactcttgattcgcgaagagattatataatgagaaattttcgaacactttacaggaggtcttgttatgccaaaatatacaattgttgataaagatacttgcatcgcatgcggcgcttgcggagcagcagcaccagacatttatgattatgatgatgaaggtattgcattcgtaacattagatgataaccaaggtgtagtagaaattccagaagatctagaagatgatatgatggatgcaatggaaggctgccctacggattcaattcgcgtagcggatgaaaaatttgaaggcgatgctaataaattcgaataagtatttaacaaacctgtagtgtacatgctgcaggtttttttatatataaaaatcgctctccctgggagagcgattgaatcaaacagcaatgcgacgcgtgatccattgcttcatttttgaaaataataagacaaagataacccctgttgctgctccttttattaagttaaacggcaaaatacctgcaacgatatattgacgtgcttgttcactagacatttctggcgattgtaagaagattgtatacgctggtaagaaaacataataatttaagacagccatgagtaccgtcattacaaccgtacccgtaaccaaacctatcgttacgcctttagccgttttaaatcggttgaacatgtatgatacaggaagaacgaacagtaaaccagccacaaagttcgccacttgaccaactggaacccctgtagcacttccttgaattaaataattcaataaattttttattccttctactataacagcagccatcggtccaaatacaagtgctgctacgagtgcaggaatttcgctaaaatcaattgttaaaaacggaggtaatccaggaattggaaaattaatcatcattaaaatataagcaatactacttaacattcctagtacaaccagcttttgagttttcttactttgttgcatcttgcctctctccttctttgtgatccactcttcaaagaagaaaggttcaactttatatccccacgcaaaaacctcccaacaaatgattcgttgagaggagacatggcgggcatatttaataaacgttcatcacattaggttttgaacgctgaacctccaccttctcccatccagactgtactgtcggctttggaatttcaccaaatctgctcgtatgtattacatataagctcgcgggctcaaaacaatttgttttttaccgccggtcgggaatttcaccctgccccgaagatagaccaatatttaattatgaatttattatatgttatctcgaattaaaagtaaataaagaagttttttaattcctattaaattgatgttttttataaacttcattcttgtttttatatgtaaaataaggaaataagtgcataaccaacagcgttatgacatatttatagtttcaattttacgtttataattgtgtatttgataactaatcgtaaagtttgaaaaatataattgacagaatttttttaacatggtaaattatcaaatatttgatgatagtaaaatccaagggagatgttcacgtcatgtataatgtgttagtagctgattcaattagcaatgaaggtcttgctccactacttgaagctcctcatgtgactcttacgcgaaaaaaagttgaagaagttgagaatgatttgcatacgtacgatgcgcttttagtacggagtgctacgacggttacagaggatttactggcaaaaatgcctaatttaaaaattgttgctcgcgctggagtaggtgtcgataatattgatattgaagcctcaaccaaacgaggggttgtcgttattaacgcgccgaacggaaataccatttcaacggcggaacatacatttgctatgatggctagcttgtttcggcatatcccccaaggaaatgcttcagttaaagcgcgcgaatggaaccgctcagcatttgttggaacagagcttaatcgcaaacacctgggcattattggatttggacgaattggctcagagcttgccaaacgcgcaaaagccttcaatatgagcgttcacgtttacgatccttttttaacctcttcccgagctgaaaagctaggcgtagaactattatccctggatgaattactagcagcagcggatgtaattaccgtacacactccgcttacgaaagaaacaaagggattgctcaatcatgacacattagccaaaacaaagaagggtgtgtttttattaaactgcgcacgcggcgggatcattgatgaaaaagccttagttcattatttagaaattggccatgttcaaggtgcagctattgacgtatttgaagttgagccgccgattgataaccctttgttacattttgatcaagttattacaactccccatttaggagcttctacaaaagaagcccagcttaacgttgctgaagacgtggcacatgacgttctgcgttttctagaaggcaatcctgtaagctcatccattaatttgccaacgctttctaaagaagtttttgaaaaaattcagccgtttacaagccttactaaacaaatgggagccattttatctcaatgcatgcgagaacctgttcagcatatctctatctcctacggaggtacagtgacggatttggaaaccacttatgttacacggagcttgttatcaggctttttaactcatcgtatcgactcacctgttaacgaagtcaatgcttctatgattgccaaagaacgaggaattacatttggtgaaaaaacatcggaagatacgcaaggatattctaatatgattgacgttaccgtaacaggcgaacagcgtacatttaccattacgggcacctatatagcaggctatggacctcgaattgttaatattgattcgtttgatattgatttttatccggaagggcatcttctttatatccgtcacagtgatcagcccggagtgattggaaatgtagggaaagtacttggagatttacgtattaacattgctaccatgcaagtgggccgtaagcaaaaaggcggagaagccattatgatgcttacgtttgataaacttttagatgattctgtcatcgcttcgttaaaacaaacaagcgaaattgtgaccatacagcgtattgaattgtgacattaaaaaaaaagagcctgagcggctctttttttatggacttatctttaacacttgtcctgcatttaacatcatattttctaaatgattccactttcttagctgatcaatatctacttcatatttgactgcgagctcagataatgtatctccttgatggataagaatacagttatcagaagtctgatgtaactgctgaaaaaccgtggcagctaaatcgctttttacgtatgccgatagtttttgcttgtccaatttggcaagtgggtttactgcattggttttatccggattccaacttccttgatgaacttcaaaatgcaaatgtgcacctgaagatcgccctgtattgccaactcgtccaatgttttgacctgcggctacacgatttccttctgcaacaaaacgttcctctaaatgagcatagaccgtttcgtatccattcgtttgtttgataaaaacaacctgtccgtatgtatttgaatagtaagagcggctcaccactccttttgcaacagcatacacctgtgtaccaacaggtgctgctatatcaattccaaagtgtttagcgtgacgagaaccaaatatatcagttaagactccttcaaccggccactcccactgcttctcttctgcttttaccatttgcccgccccaaaataaaagacctatacacaatcccattactaatacaaccaatattcttcttaacacgtcaatcatgaagaaagaacctcctatgtagatcattgcacacaaaacatactatatgccaattccttctcttttagacttgtttatagaaaaaataaagagatgtgattctccactgaatcacatctctttgctattcttattatttcagccgaacaaactgttatttagcatgtgtttactttggcagtttaataaagaaagttgttccttcatttaattcactttcaaccgcaatgatcccttgatgtgcctccacaatatttttggcgattgcaagcccaagaccagttcctgacttccctctcgttctggctttatccgctttataaaatcgttcaaatacaaatggaagatcttcttttggaatgcctgctcctgtatcttgaacagaaagatggatttcggattgacttttatcaagatgcagctttacttctccgtagtcatccgtatgacgaatggcattatcaattaagtttgtcagcacttgttccatacggtctgaatcaatcatcgcttcaaattcatcttctatttttccattaagagacagtttaatatgtttttctttagctaacccttgaaacttacgcaaaacacgttctgtaaattcaaccattgctacagattctaagtgaagctgcacatgtcccgcttccattcgcgccaaatctaaaagttcatttacaagccggcccatacggagtgattcatcataaatcacctgtgcaatttctttcttttcttcatccgtacttgcaatatcgtcaataatagcttcactataaccttgaagcatagaaataggtgtacgcaattcatgagacacgtttgcaataaaatcttttctcgatttatcaagtttacgctcttcagacatatcccgtagtacagctacagcaccgcgaattttcgtttgattatagagcggtgacattaaaatgacccacgttttcccttgaattttcaattctgcacttcgctccgtttcagtctctactaccgtttgaaacaaatggacgacgcttgctggaagctcagggacctgctgattgttgacatcctgctcgtaataccaagtctgaagaaaatgctccgctgggggattggtaattaaaatggatccgtctctactaaacgtaataacaccgtctgccatactgcttaaaatacttgaaagctgctctttttcctgattgagcgcattgaggttaaactttaactgcctgcccatttgattaaaagcaatcgctaactctccaatttcatcgtgagttaaaataggtacttttgtatcaaagttgccttttgttacttcaaatgccgcctgcctcatttttctaagaggcgctgtaattcgagtggataagaaaaaagcaaagatagtagttaaaataatagcaatacctgcagccaataaaatgaacttagtcgtatattgagcgggttcttcaatttcagaaagagattgatacaaataaacgccgcctgtcggtttgttatctttcattaaaggtacgccgacaacaaacattaaaggctcatcactcgtgtctttctttgtagtcatgtacattttttctcgtattactttacctttttcaaccacttgatttagctgatcgttttgtttaacaatggccgaaatagctttcttattttcttcatcaggatgtgtggaatgccaataaaaatctttgtcttgaacaataactacacttgcttggtctgcaagttcacgagcaatggatagtcctagtttttcatcgtccgtttcctgcacaatggtagagattttagcagccgttttagttaaacggttttctgcatctacaacatgataattttcaaaaaactgaagcagtaaaatagtcaaaataaataaaacaagcgtgacgagtaataggatagtaaaccatagtttaccaactacacttctccaaaacatcagttattttcaacctcaaatttataccctactccccatacggttacaatcattttcgccgcttgtgacgatacacgatttaacttttcacgcaaacgcttgacgtgcgtatctaccgtacgcagatctccaaagaaatcataatgccatacttcacgcagaagctgctctctgtcatatactttatctggcgtttttgcaaggtagcataataattcatattcttttggagttaagttaacttcttttccgtctgctgtaacgcgatgtgcatcattatcaatcgttaagtgatcaaagacaataagatttttcacgctcgtttctggttgaataaacgttgcttgagaagaacgtcgaagcagtgcttttacgcgaagaaccacttctcttgggctaaacggcttaacgatataatcatctgtacctacttcaaacccttggactctgtttacttcttcccctttagctgtaagcatgataataggagttgcttttttctcccgaatttgtttacaaacctcaataccgtctatgccgggcatcattaaatctaatacaatcaaatcataatctatgtgtaacgctttttcgattgcctcatgcccatcggctgcttcttcaatgatgtatccttctttttctaagtacatttttaacaatcgtctaatgcgatcttcatcgtctactagcagtaatctttgttcgttttgcatgtgttttcaacctcctagtcttagtgtacaaaaaaaaaccggcgagttctacttatgatacccaaacaatgtgacaattcgtgaacacctttacgaaaaacagcttttttcaccaaaaagaggttgagacgcaacgaaatccatctaacctacaaacgaacaaataaaataaagaagctagtagggatcgcttgttccacggctataagcacctacatacatgaaccctacgttcaccatctcaatgaaaaaatccgaacgcatgagattctccatcaagaatctcatgcgttcggatcttccttcaactaaaatatctttgtttcagcctctattctatttttaaaggttacgcatatgaatgtaaacctgcaataattaggttcacagccactaagttgaacataatgatggcaaacccgccaactgccagccaagctgatttttcaccgtgccaccctttagacagccgaagatgaagaaaagcggcgtaaaataaaaaggtgatcagcgcccacacctctttagggtcccacccccaaaagcgcgtccaggccatctgagcccaaatcatagcgaaaataagtgctcctagtgtaaaaataggaaatccaatcgccactgctctgtagcttacttcatcaagcaagtcgctgtttacctgcttcacaagcggctgcagcgcggctccaattcgcttccgtaaaatgaaacgaatcagccaatataatacaaagccaccgcctaacgaccaaataaccgtatttaattttttagcattgataatagccggcatatcaataagcggctgtatatcgttcccgtctgtccactcactttgatgcggccccactagagggaccatatgatatacgacttgctcttgttctccacttttattaatccaattaaatgatgactcgtagtgagccgcattaaaagccagcgtcaccgctacaaacccaagcgtactaataagcgtatacaggatgaattccagccaaaatgcttttttatttcgcttggattggtcaatcgttttgattaaataaatcaatcctgcaacaaagctaatggaaagcacggcttcacccgtagcagccgttgtaacgtgaatatgcagccaattcgtttggagagccggtatcagcggcgtaatttcagttggaaacatgcttgcataagcaatgatcaaaagagccaccggcaatgcaaaaagtccaagcatgctaagacgataaataaaataaataacaataaatgcgccaacaagcatcatgccaaagaacgtcgtaaattcaaacaaattactaacaggagcgtggcctgatgcaatccaccttgtaataaagtagccaatctgtgcaataaagccgatgatggtaaccgcaattccaaacgttgcccactttgttttcttttgagctgctcgcttatctcgaatagctcctccgaaaaaaaaggttgcaactaaataagcaataaacgccacatacagtaaattactacttatactcgcgtaatccatgctttttcctcctattttgtttctttatcattttggtccttcagctgtgtaagggatgttgattctaataaaccatttagttcttttttaagcccataccagtttttatttgtatgtgcggccaaccatatctcattattgactttttgaatccacatgcggcgatgattccaatacatcccttgaatcacaccaatcataaagatggctccgccaattcctaaaaaccaaagcgtatagtctctgcgaacggttaatcccgttacatttttcgtttccacaccagcaaaggtcattttataatcgttatttcctagcggctccaagttctctctaattccaacaaaagcaacttccccttttttatgctgaggcgtaatcattttaaatacaaaagccggattgttaggcactctggtctttgtatttggatttccttcatcatcaaagaagaagtctggaaagtaactcatgagcttgactttatatccgttttttaaatcatatgtttcttttggattatgtaaatctactgtaagtgaaccaacgtttctatttgcatttttatctgttaaatggaaagacatagagctaaactcatttaacttgaaatccacttggtacatggcatatccttcaaacttaagcggctgattcacacggatctctgaatcttttattttctttaactttggatctgctcccggtataagctttccttcgcgcttatacagactaacatccgcttcatattttttggctactttattattccctgcacgatcaattgcttcttgaaacacggcgctttcgctatctttatcatacgtttcaacagtaaaacgatggtttttcaaaaaatactctccgttcgtcccaggaataacttttgtttcaccttcacgtatccaaagaacttcatctatatacatacctggtacaaatctaagcatagcacctagtaaaaagataatgagaccgatatgattaatgtatggaccccatcttgagaagcgtcctttttcagccagcagattgccgttttcttcacgaatagagtatcttctttttttaagcatgctttttacatgttcataatcttgatccgtccacgatgatgaagtgctatataaacgctgtctttttaagaagtttggatgtttggttacactctgcttttttagagctcggtacaaaggcacgactcgatctaaactgcaaatgactaacgacattcctaaagcagcaattaaaagtaagtaccaccacgattcgtagagatgatgaaaacctaacttataataaagctctcctgtccatccatattccttttggtaatactcatctgctgtcacattaggaggtatataagcttcttgaggataaatggttccgactgcagacgcaacaagcgtcacaataatgatccaaatacctacttttacagaagagaaaaagttccatattttatcgataattgttttattgtacgtttgcgatcgccttgcgcttccttcataacgcatatctactaatttatcagttgtttcttctgcaatcggcttaccacaggcttcacacaaaatcgtaccatgcgggttaacgtgtccacattcacattttacgtgtttcattgtcaacactccctatggtttaatttcttccatatattcttttattttagactcttccaatcctccaataaaactgtctacaatttttccgtttttatcaattaaaaatgtagtcggcagaggatctattccgtatgcacccaacacttgtgaatctttatccattaaaatcggaaatgatagcccatattgtttagcaaattgctctactgctatattcgtttctgcaacgttaacagctaaaatttcaacaccttgctttttatatgatgcatactgcttttccatagccggcatctcttgtttacagggcttgcaccatgttccccaaaaattcaaaaaaactcctttgcctttgtaatctgatagctgatgagtttctccattaacatctcttaatataaagtcaggtgccttatctcctactgataccttttgtttatcagcaaaaaattgagcataaagggtatatccaaccgcgcacagcaaaactgccaatataactgttcgaataatcaagcgcttttttttcatggcacgaactccttttaaccgctttcaatacgcttttttctaccattatatcatttttgtggtagtggctttccaataatatttcgacgtttctgtgaagtcttcctctcattctacaagttcgacattttttcaaaaaaccttgcttgtttttctaattcacgacatttttcataaaaaaaacaggtaagtgaaaattacttacctgtttgagacattgaatataattgtttaacttcatgcgctgtaagctcacgagcttctcctgcatttaatccgcgtaaatctaaaggtccgtagcgttcacgttttaattttaatacagaatgcccaattgcatcgaacatgcgacgtacttgacgatttttcccttcatgaatcgtcaattccacaatcgccgtctgcttgcttttatcaatagaaagaacttttgcacgagctggtgctgtttttccgtcctctagcatcacaccgcgctgcagctgtctgattttttcacgacttggaattcctttaattttagccacatacactttgtccacttcaaatttagggtgcattagctgattagcaaattcaccgtcgtttgttaaaagaagtaaacccgacgtatcatagtctagacgtccaattggataaattctttcttctacatgtggaaagaagtcaacgactgtttttcttcccttgtcgtcgttagcagctgaaattacgcctcttggtttgtataacataaaataaacgggcgcttcgctttctaccggcacttcgtctacttcaattttatcgttaggacctactttcgtgcccaattctcttacaacttttccatttactttcactcggccttggccgattaattcttcagccttacgtcttgatgctacacctgcgtgagcaatcactttttgtaatcgttccattaacacttcacctcttgtaacatcttacttgtttacgaagtaatacacaagtctatttgccactcagaggtagaatttccgatttcttaccggccaaacacaaggattacaatgacaactgaggcaataattcctaccaaatctgccagtaaaccaaccttcagcgcatctcccatttttttaatgccaaccgctccgaaataaaccgttaaaatataaaatgtggtatctgtacttccctgcatggtcgatgccaaacgaccgataaaagaatcaggtccgtatgtagaaattagatctgtcgtgataccaagagcagccgttccagatatcggtttgatgagagctaaaggtacaatttcagccggaacgccgactgcttgcagcataggttttaaaacagataagaaaaaatcaagggctcctgaagctcgaaaaatagagatgctcactaacatgccgactaagtaaggaatgatagaaaaagcaatttgtaatccgtctttccctccctctacaaacttttcatacgtaggaatttttttataggttccataaagtaaaatacatcctacaataagaggaataaacatcaatgatacttgattaagcatagtcattttcgttttcctccttttcgtgtacgtcgataataaaagaagcgatcaatgatgatagctcctatcgtagctacaacagttgctaaaagcgtagtacccacaatttcagtaggattagccgagttatacgtaattcgaattgcaataactgtggttggtataagtgttaaactggttgtgttaagtgctaaaagtgtgatcatagaacggcttgcttcgtctctatcgccgtttagctttttaagctgctccatcgctttaatgccaagaggagttgctgcattcccgagtccaaacatattcgccatcatattggacaatatgtaccccaaggccggatgatcttttggaacatcaggaaaaagtcttgtaataatgggtcgaaacaatttcgctaacttgtcgagaagccctgcactttgagcaatattcatcatccctaaccaaaagaccagcacgctgattaaccctatgctgatagtcactgcttcgcctgctccttgaaaaattgctttgtttacatcaccaattttcccatttataatcgcaaaaacaattccaataatggtcagcagcatccaaataatattaaccatctgttttggctccagactgaataaacattaatcgcttcactctatcaaagaaacctttttgctgctcggcctgcttttcgaaataaataggaacactgtcaatcgtctctccacttctataaatatcgagctttcctaccacatttggaacttcccctgtttctttccactgctttttaggctgaattagcgttgttttcacttctacagagctttgttctttctttgtgagcggatagacgacatttcgtttaatatacagctgatttttataaaaagaatcctttatatctgccaattcgccttttgcagctaaactggtcatatcatatttatcaaatgcattttcatacatggaaatgtgatcgttccaatcatctggggcattgatcgttacggcgattaaatccattccatcttttgtagcagttgtcacaagcgttcgttttgctaattttgtataccctgtttttccgccagtacagtatgcatatagtgttgtcagcagtttatttttgtttttccacactcgatcccatttctcttcaggatgcttcattcgatagacttttgttcctgaaatctctttgaaaattttattattcattgcatagcgcattagcagcgccatatcgtgcgctgttgagcgatgattttcatgatcgtctaatccatgcggattttgaaatgttgtatttgtcatgccaatttcttctgcttttttattcatcaaataaacaaatccatcttcgcttcctccaacggcttctgcgatagctacagcagcatcattacctgaacgaagcattaagccatatactaaatcttttaattttattttttcaccttcaactaaatacacagaagaaccttcaacaccaactgcgctgtggctaacggtaactgttttatttattttgccagattcaatcgccagtattgctgtcataatttttgtaatgctagcaattcgactaacttgatctgcatttttagcatataacactctccctgatttctgttccatcaaaatagcactacgagcacttacgctccccgctgcagatgatgtggaaggccaaccgctgagacatagcaatacaataaatagatagatgatactttttttgcttcttttcatgtcatccccgtccctctacctgtttgtacaagtttatgctcgtcttttttggttatgaatgaaaagatttgtccatacaaaaaagaacatagaaaaaactctatgttcttttacattttcacttcatttcttgaaacgattggaaaaacaaatctgcttcttgatcggttccttcttgtaataaatcttctggaagcggcggcagctcttcgatacttttaaggccaaaatagcctaaaaactcttttgtcgttccgtataagatggcccgacctgcgccttccgctcgtcccacttcctttaataaaacctttccaattaaagtttgaagaggtctttccgttttcactccgcgaatctcttcgatttcagctcttgtaattggctgcttatacgctacaatagctaacgtttcaagcgctgcctgtgataatgattgattagcgggagcttctacgagcttctcaatatatggtgcatactctttttttgtgacaagctgataggcccctcctatttcaacaagtgtaactcctctgaacttacactcttgctctaagctctccaaagcaccttgaatgtcttcatgaggcttttctataatctcagctaaccggctaatggatagaccttcatcaccagaaacaaaaagtaagctctcaataatagcctgtagattattcgttgtcattcctcttcattcctttctcgatacgatacataaagctcatctagattgtgctgctgttccacaacgatttcattttctttcattaattccagcacagctaaaaatgttacaacaatatgatcacgctcttgataaggaaacagctgataaaaactttttttccctttaaaggcttttaattcgttcacaatttcactcatgcgcttatcaattggaatgtcttgccttgctattttcgtctgcataggctttttgttttgctttcgtttcatcaacttttgaaaagcacttagcatatcataaagtgatatatccaatccttcgtcctgaggctgcgtacgttcttctgcatttatttgcacattacttggaggttttgtatacacatgactttggtcttcttccagtttttgaagctctaccgccgcttctttaaactttcgatattcaattaagcgctgcatcaattcttcacgcggatcttcttcatcgaccatttcaatttcatccatatcttcttcatacgtaggcagaagcattttacttttaatttgaagcaaagttgctgccatgactagatactcactggcaacgtctagctgaagctcattcattgtatgtataaacatcatatattgctcagtaattgtcgctactgggatatcgtaaatatcaatttcaaatcggttaatcaaatgcagaagaagatctaaaggtccttcaaacgcatctacttttacactatactccacttttatctcaccaacacttttcaattgcttatcatttctgctgctttatataacgttactatcattagtatagaggattatagacacatgtccaatacaaattaacgtaaaaataggtcatttgcccatacaaaaagtttaaacatgcatacgatgtcaaggtaataaggttttgaaatggctgaaggaggaactcgcatgggtgaaaaatcttgtggatacggtagcggtttcgctttaattattgtactgtttattttattaattattgttggttgttcttgcttacgcttctaaccacacatattgaataaaaacaaacgtgttcgccatactttgagcacgtttgtctctttaaaggcaccgcgctgatgaatagctaatttttgtgatacactacatatagagtcttaccaggagggaacaagattgtattcacaagcctatattgattatttagttcattttcatggcgaccgggattactttgaatgtcatgaactgctagaagaacactggaaaaaagacgaaagaggacaccgcaatattatttgggttggccttattcaaattgctgtttcactctatcatcatcgacgccaaaatttcgccggagccaaaagaacgatgcaaaaggcgctggcaattttaacgaaggaagaagaaaatattgcacaacttggacttaattatccttcactgcttaaacttcttcgcaaacaattagctttaatcgatacctatcagccatataaaagtattaacttgcccattgaagatccagcattattacgagcttgcaaacaaagaagcactgataaacagcttgtctggttatcagcttctaatctgcaaaatgatgcgattgttcatcgccacagcacgcgagatcggtcagatgtgattgcggaaagacaagcgaacttattggcaaaacaaaacaacaggtagctagaagctacctgttgttttatgatgactaagatatgaaagaagctttcgcacctcacctaatcatgcttttctttattcatccgcctgacacttttcataaaacggagcgatgatttcactcggcttaatttgtgcagtcgtatacatttctttaagagctttaatcatttttttgccaatgccctgttggcggtgtgaagggtttacactgacgtgttggacctcaatcaaacttttatcgagcatggaaatgccaacaatcccaataatatcttcttcttgcttccaaagatacagctgccaatgttcgttttgctcatattctttcatcgtttgttgaagtttttttaaatctttttccgtaggtacaaacgatagaagacccatggcaattttttcatagtttcgtttatagcgaataagcatacgattctccctcgtcctcaaactttcctacaaattaatgcgctgcgttttttactgcttttatcatacaaaatttataagtaaatagcaatattacacaaaagcttgtcctatgtcatgcgtgtatgagaaacctaatctattacgctttttgagctgttgcgcgaagaaaaaacgccgtaaccccctgtaaaaggttgttatgacgttttatcagctaatatccatttatagcagtatgctcttattcttcccagacttttacttctttcattacgtcgccatttttcatttttaacactgtatcaagtccttctgttacttttccaaatacagtgtgaacaccattcaaatgaggctgtggctcatgaacaagaaagaactgactgccgcctgtgtctttaccagcatgtgccattgatagagaacccgcttcgtgtttgtgagggtttccttctgtttcacatttaattgagtagccagggccgccagcacctgtaccagttgggtctcctccttgagaaacaaatccagggataacgcggtggaacgttacgccgttgtagaatccttcattagccaacttttcaaagttttctactgttcctggtgcttcgttcggaaataaatcgattagaattttttcgccattttccattaaaatacttgcttttttcatataaatgacctccaatatatgtattagtaccgctataggctctgttttccctatcaaagcggcaaaacgtaaaagttgtaagtgccacctagagtagaacacttacatttataaactcactctattctactacaaacaagctcatgaattcaatgaatgcactttttcactttcttctcgtagggcttaaataaaaaaatagtagttgtgagatgaaactttttatagtatcatccgtctaatacagtgatagagatacatagatttcatttcatatagaaatctacgcctctagactgatttatgggaaaatgatgaattgactctgttacttcagacctgctcgtattataatagggcaagtatgggattaaaggaggaaaaaggtttgaaattaacgataaaagctatgatggtgacattaggtcttcttctattcctaaccgcacccttaaaaagttttgcagatgctgctccgggcgatgttattattacattaggtcaggacttaaccagctctcagaagcaacaggtattaaatgaccttgatgcaccaagcaatgctcaaacagtaaccgtgacaaaccaagaagagcatgaatatttaggtgactttattccaaaggctactattggatctcgtgctatttcatcttctagtattacccttggttcaaaagattctggtttaagcgtatcaactcaaaatattaatggtattacagacgacatgtatattaatgctttgatgaccgccggcgttaaagatgcaaaaatccagattaccgctccatttgaagtatctggtacagctgctttaacaggtattatgaaagcatatgaagttcaaacagatcaaaaaatcccagaagaagtaaaaaaagcagccaacgaagagatggtccagacatctgaacttggtgaaaaaatcggtaaagaaaaagcagcgcagtttatggcaacgattaaagaagaaattgccaaagaaaatcctcaaacaaaggacgatttacgcacgttaattcagcgagtggctgatgatttaggtattaaattaacagattcagagcttaatacacttgttgactttttcaatcgtttaaaagatatgaacatcgattggaatcaagtaaaagaccaactttccgcgacaaaggaaaaagtaacaacatttcttcagtcagaagaaggccaatcatttcttgataaattaaagcaattctttgttgatattattaacgctattaaatcgttattctcataaaaaaagagcctcttgttcaagaggctcttttttcacgttaatcactcgttacttttttaccgtcactttgtatttcacgtcattttttacaatgtcttcatacgtttcgcgttttacgactagctgtgcttctccatcttctacgaacacgacagctggctttggcaaacggttatagtgacttgccatagaataaccgtatgcgcctgtacaaaacatcgctaataaatcatctgggtttgcttttggaaggtgtacatcccacatcaacatatcccccgattcgcagcacttacccgcgattgatacgagctcatcactcttatcattcattcgattagcaatgaccgcttcatatttcgcttgatacagcgcaggacggatattgtcgttcattcctccatcaatcgctacatattcacgtacattaggtacatgcttacgagaaccaattgaatacagggtcgttccagcatctcctacaagagagcggccgggctcaatccaaatttcagggatttctacctctaactgtttggactgctttttgacctcttctataataacttccacatactgcgaaacaggaataggctgatcttcttccgtataacgaatgccaaagccgccgcctaaatttaatacttgcggaacaaattctatacgttgtttccattctttcatttttgcaaagagcttttgagtcgccataataaatcccgttgtttcaaaaatttgcgatcctatatgacagtgaatacctaaaagttctagccccttgctattttgcacaagacgcacagcctcatctgcttgaccgttttgaagatcaaacccaaacttcgagtcttcctgtcctgtcaagatataatcatgtgtatgagcttcaattccgggtgttaatctgagaagaacaggcatctttttttgatactgctccgttatttcctgaagcaatgcaatttcataaaaattatcaactacaatgcatcctacatcttctttgatggccatttctagttccgcccggcttttattgttcccatgaaaatgaatccgttctttcggaaagtcagctgctaaagccgtatacagttctcctccagaaacaacgtctaacgaaagaccttcttcatgaacgacttggaccattgcaattgtagaaaaagctttgcttgcataagcgacctgtgcttttactccatgcttttcaaatgtttctttaaatcctctagcacgctgccgaattaaagccacgtcatatacgtaaaggggcgttccaaaatttgacgctaattcaaccgtatcaactccaccaatttcaagatgaccctgcttatttatgcgacttgttccgtgtaaaaacatgtttagaccccgttcctgtgtatagtgtaaaaaagacagttaacggcaattcgctgctaactgtctaaatatttattattttccatatttaaaacaaatctatcacatcttcatacaggtttcaaccacatattttgtttaaggttttgcaggctggcggtctttgtcctgcggatgcacaatactaggtcgcggatttgctccaggaaccggtgtgcgaatgagaatctgccataaagcctgcgggttgaatggcagaaacggccacaaataaggcgtattcaatgattttagtcgcgccatgtagagaatgatacacgttgttgcaataagaaaccctggagtatgaaaggctgcaacaaaaattaaaagaaacaatcgcagcattttatttgccactgctaactcatagcttggcgttgaaaaagaaccaatggacgcaatagctacataaagaataacttccggaacaaacaatcctacatcaatggcaatctgtccaatgagtgctgcagcaattaaacccatagcagtagcaagcggtgtcggtgtatgaatggcggccatcctcaggaactcaacccctagatcggctaagaaaatctggataactgtcggaatatttgttgcttcgtttggcccaacaaattgcaattttgccggcagcagatccggctcaagtacaaataacagccatagcggtaataagaaaagagacgcaagaattcctaaaaaccgtatccagcgtataaaggtacctacagaaggagactgcctgtattcttccgcatgttgcacgtgatgaaacagcgtagttggtgtaataataacgcttggtgacgtatcggtaataataatgacatgcccctctagtacatgggctgctgctgtgtcagggcgttctgtatagcgtaccatcggaaaagggttaattccttgtttgactaaaaactcttcaatcgatttgtcagccataggcaaaccatctacatcgatagcttccagttcatcttttataagtttaaccagtcctggatcagctactccctttatgtacccaatcgctacgtccagtttcgatcgttcgcctaccttcataatttcaaagcgaaatcttccgtcacgaattcgtcttcttgttaacgctgtattaataatgatgttttccgtgtatccatctcttgctccgcgaatcactttctctgtatccgcttcttcaggggatctgccaggatatgtacgcacatcgacttcaaagccaacttcttcaccgtcaattaaaacgaatagcagtcctgataaaaccgaaaccattccatcatccagcgtctttaaaggctttacttgctgatgaataagacggttttcaacaatatcctttagctttgctcgttcaacttcattatcattaatttgaacgagcacttttgtaatttcaataataaatgaactatcgcacagtcctgttacatagtaaacatgaacttctcgatccaaaataagtagtttacgcacgcccacatcaaagcttgtgttcatactagcgttttctttgaaccactgatcgtttttttgtacttttgaaaaaatagctgttttctgctctgctggcttacccaaacgaaccgctcctttctaaaataagtcttgctgctttttctgtaataggacaccccagtttaacatcatccatcctagccattttgccgatatcccctattcctacaactaagggaatatcgagctgatccaagcagtaaactgtatctccattaattcgtccgacttctaactcttgaattccgcttttatccacgccgtaatgcgatatttccccaaaacgatcaatggtcacatccactcttgtccattcgctttgatgagtacgtgatgccacggcgatcactccaagaacttctacttgaggatgctttgctacgtgcagcaaagcaatttcccctggtccttcctctaagaaaccgctatcgtcgaacatcacaaagacgggatcatatggtgcttgaaggattaaatctaccgtttgactacctgttagcgtagtagggtttccatatgatctcgaaatgcacctgccaccaaccgatttagctacatgctcaattgctttgcgtgcatattcatcgccatcggttacaataatgatccttctttttgtcataatcttttatcctttcggtttaaagattaacgcgataataaaagcaaataaaatagctgctgaaattccagccgaggtaagttcaaaaatcccaatcccaatcccgataaatccatggtcatccgcttgcttcatcgctccgtgcagcaaagaatgaccaaagcttgtaattggaaccgtcgctccggcgccagcaaattcaattagcttatcataaagaccaaatccatctaaaatcgctcctgcaactacaaacgaactcataacgtgcgctggagtaagcttagcaagatcaagcagcagctgcccaataacgcaaatgattcctcctacagcaaaagctattacatactccattgatcatccccctccccaatatgttctaagacgacgccatgagcaattgttggaattgactctttttgctgaatcatcgttggacttaaaagagctcccgttgccaccataaacactttctttaagtttcctgattttaattcatttaaaatatgcccatacgtgacaatagccgagcagccgcagccgcttcctcctgcaaatacattttgatcagggcgatataccattaatccgcaatcattatgattggttgatatatcgtagccttcgtccttgagcagctgttttaagattggacttcctacaccagataaatctcctgttaatataagatcatactcgcttggagcaacgtttaagtcttccaaatgtctttgaatggtatctgcagcagctggtgccatagcagaacccatgtcgtttgcatttttaatcccgtaatccatcacccgaccaatcgttgcagacgtcagacgcacaatacctttttccttcgagacaagcgctgcccctgctcccgtaatggttgccgttgctgtatctggtttttgtcctccgtactcggtagggtttcgaaattggcgttcagccgttgcgttatgactgctcgctgatgcaataacacgattagcaaaccctgcatctacaagagctgctcccgttgcgagcgtttccattgatgtggagcaagcgccaaacatgcatagaaatggaatttggttatgccgggctacaaaattagccgttacgttttgatttaataaatctccagccaaaaacaaatcaacgtcttcataggataaatttagtttttgcaagcaggaatcaatggactccgtcatcagccttctttcagccaactcccagttgtcttcttcacagtgcaaatctttatgtgtaatatcaaatgtttctcctaacggtccatctgcttcttttggtcctacagctgttcctgtggcattaatataaataggattttcataaacccacgtttgctttccagtttttctcataatccccctcttttcatagcaaataagttttaaaaaggtagcgaatgattcctacaacgtaagccgaaaccgttccaaatacaatgacgtttccagccagtttgaacatgttcgtcgcaattccaagaacaatcccttcacttcgatgttcaagcgctgcactcgtcatggaattggcaaaacccgtaacaggaacggctgaacctgcacctgcgaattgaccaatacgatcgtatatcccaaacccggttaagagcgcagatattaaaataagggttgcaacggtaggattacctgcatttttttcattaaagtcaaaaaatgcaatatagaaattttgaattgcctgtcctaatgtacaaatgattccccctaccaaaaaggcttttaggcaatttgccacatatgaaggtttaggctgaaatggtttaatgctttcttgatagttatcttttaatttttgattatttgccatgttacatacatccttttcttattgattaacaaaataaatccaatgaaataatgatccacatactttgcctagtacaatggccattaacaataaaataagcttgccttccattcctattcgtttcgttaacgtcggcaatacattaagcacttctgttaacgctgctgccagcatcccaataaaaataccgctcgttagacctatgatcataataagcaccgcaggaaactgccacgtgtattgatgaagactgcaccacccgcctgtaacagcaccacccaccactccccattcatatgcttgaatatatttcatggttttagtcagctgcatcaaacgcggaataatgcccagcaccgttaaaaatgctacaaacccagcacctgcagccagtcctcccgcaagtccaattacaatggtcatcacaatgttaatgatcatcaatttttttcatactttctttattctcgtgcataatgacgtattgatctaagtcttgctggtaattaaacatttcgacttcgagaggactaggctcttcattaattcgttttctaaagacatggttgaaaaacagaatcattcccaagcctaaaccgatagagtaaggcacttgaatcagcaaaggctgcttatctctcataccggtcagcatatagaacaatttttgatgtacttgtctcatactcacatcttcgtgaaagttcataattgctaaagcagctccgatgaagagaagaaaccaaacagctagaaaaaacaaaaaggaatactgtttctttttatacacgacctctacaatcgtttgagcgggtccaatcgtctgaatgtctaaatgcggatactgagaggcaactttttcaattaccttcattaaatcaacaatgataatatttcgatcactcatacttacttgatatacaactagcttttcaatttgcctttgaacagaatctcctgctataaccattgctaattgtccaatatttacagcctcatcaggttttacttgaatacgatgcctcattttaagataaagaacgttttccattcatatcacaccttacgattcattatctccctgtacgtgtagtatggattttcttaaattttctaattcacgtttctggacagaccattaattaccaaataaaaaaagcaatccgtttcactattcttctttgaatagcaaaacggattgcttcttaagtattacgtgtcattcatatgcagcttcatttgttttaagattttcttctcaagcctcgatacctgaacctgggaaattcctagccttgcggccacttcggactgagtttgatctttgtaatacctcaaatagacaatgagcttttcacgctcatcaagttcttcaattgcttcttttaaggcaattttatcaaaccacttcgcttccgtatgatcagcaatttggtcaagaagggtaattggatctccatcattttcatagacggtctcgtgaatagacgaaggagcacgattagcttcttgagctagcactacttcttcaggagtgagatccaaatgttctgcaacctcagcgactgtagggacgcgtccaagtaatttggaaagctcgtcttttgctttacgtattttattgctcatttctttcagagaacggctaacctttaccgtgccatcatcacgaataaaccgctgaatttcaccaataatcattggaacagcatatgttgaaaatttaacatcatacgataagtcaaatttatcaacggactttaatagccctatacatccaatttgaaataaatcatcgggctcataaccacggttaataaaacgttgaacaaccgaccaaacgagccgcatatttttttggacgattgtatctcgtgcaatttgatcaccttgctgactgcgcttgatgaggtctttaacttcatgatcctttaaatacggttcgtttttattttttttgacctccacatccattggcaagtctccttaattacatagcgctttactatttgttaagtgcttttttaaatataaggtcgtaccttctaatacagttgactccactcgaatttcgtccataaagttttccattatggtgaaacccattccagaacgttctagatctggtttcgttgtgtataaaggctgtttggcttcatccacgttatcgataccaattccttcatcacgaatcatcagctcgactacactgtcttcatgaagcgtcacagaaatgtataccacaccatccggattgctttcgtagccgtgaataatagcatttgttactgcttcagatacgactgttttaatttctgttagctcatccattgttggatctaactgcgtaataaatgatgctaccgtgacgcgggcaaacgattcattttgactaagcgcggaaaattggaggttcatttgatttttcattatgccacccccaatttttgaagcgcgttttcttcattaggctcaaaacgaataattttaaataagcctgacatattaaacaaacgttctacggcaggagaaatagcgcatacaaccatttccccgccgttattatgaacctgtttgtatctccctaaaataacccccaagccagagctgtccataaaggttaaatgctgtaaatttaaaatcaaatggctgatagattccttctctatcgcttcggtgattttgcttcttagctcttctgccgtatgatgatctaattctcctgttaatcgaaccaacaagacatcttgtttgaattccaattcaatcgaaagactcactatacaaacctcctcggaaatcttatagtcagtctttcgctaccgacagaatagaatccttctcaccgacaaaactagttctatttcgtcacatttagctgtttaagatgtttgagagaaaatagagaatgtacgtttgaatatcttccaccaagaagcagcatcgatatcttcttttgcaagaagcggtgaagaactaactactttgttatccttcttaatggtcaacgttccaattttgtcgcctttttgaataggcgcatttagcttctcgttcattttcacttctgttttaacgtctttggctgcatttccttttttcaataaaacagaaataggctcggacgtaacagctgttacctgatcttcgctacccttgtttacatctatcttggtaataacgtctccttttttgtataaaggcttcgttgtatattgactgaatgcgtagtctaacattttggttacttgattattgcgatcttttggcgtgcttgcaccgaatacaaccgctaacacacgcatatttccctttttagcggtagctgtcaggcaatacttagcttgacctgtaaatccggttttgagtccatcaacgccgggataaaacttcactaagcgatttgtatttactaaccaaaacttcttatctgtatccgtgcgcaaataagcttcgtatttacttgtatagttaataattttttcatactttagcagctctctgcccatcatggccatatcatgagctgtactatagtgattttctacgggcaggcctgtcggattttgaaattttgtatgagtcaaaccaagctctttcgctttttggttcatctttgctacaaatttttcttctgatccagctaaatattcagccattgccatagaagcatcgttaccagaacctatcgcaatcccttttagcaaatcatttaccgtcatttcttctccgggctctaaaaagatttgtgagcctcccattgaagcggcatattcacttgcccgcactttatcttttaaggtaattttccctttatccaaagcctccataattaaaatcattgtcataattttagtcatactagcagggggaagttcttgattactatttttttcgtatagaatttttcctgtatcccgttcaattaaaatagctgacctagcactgtcagcaagctcagaattctttttttctgcggctaaaacaggttgcgtcataagtggaaataaaaatatgacaacgagtaactttacaatagttcgcttcatctccacaaacctccattctttatacaacctattttttccaaggtataatcgatttatactaagggaaataaaaaaagcatcgagaaattctcgatgcttgaagtcatattttcttcttatttttgataagctggaagctgctttactacttcttttacaagcgataaaaactgctgttttactttttcagtcgtttcaattacttcttcatgatttaacggctgatctaaaataccagctgccatattagaaatacaagaaatacctagtactttcatacctgcatggcgtgccacaataacttctggcactgtagacataccgaccgcgtctcccccgataatgcgaagcatgcgcacttcagcaggcgtttcatatgttggacctgtatttcctacatatacaccttcttgtaaggcgatatttaaatcagctcctactttcttcgctaattgacgaagatccttgcagtaggcagttgacatatccgggaaccttactccaaaatcagagtcattaggtccaatcaaagggttggttccaaagttattaatatgatcagaaataatcattaagtctcctggattaaaggattcgtttactccccccgctgcattcgttacaatcaacgtttctacaccgatttctttcattacgcgcactggaaatgttactttatcaagggcatacccttcatagaagtgaaaacgtccctgcatagctacaaccggtacgtcatgaatagtacctattactaattgacctgcgtgaccttcaactgttgaaaccgggaactcaggaatgtcgttatacggaatttttaccgcgccttcaatttcgtcagctaatacccctagtccagaacctaaaataagcccaattgttggtgtaacagctgattgatttttaatatatgctgctgctttttcgatatattcttttttcatactccattccccctgcttaattcaactcttttaaaaaactttttccatgcttaggcattgctacgccaaaattttctgctaccgttgcgccaatatccgcaaacgtttgacgaatagaaagttcttttccttctttcatgcctttattgtacacaagaagcggcacgtattcacgcgtatggtctgtcccatgatgaacagggtcatttccatgatccgctgtaataatcaataaatcatcttcttttaataaatcaaatacttcttctaagcgtgcatcatattcttcaagtgcttgcccatatccttgtggatcgcggcgatgaccatagagagcatcaaaatcaactaaatttaagaagcttaagcctgtgaagtccatgtttaatgtatcaactagcttatccatgccgtccatattcgatttggtacgaagagattttgttaccccttctccgtcgtaaatatcagaaattttaccgatagcaataacatcgatatcattatcttttaattcattcattactgtacgtccaaaaggctttaatgcatagtcatgacgattggatgtacgtgtaaagttacctggttcacctaaaaacgggcgagcgataacacgtccaatcatatatggatcatcaagcgttaattcacgagcaatctcacaaattttatacaattcatcaattggaacaatttcttcatgagcagcaatttgcaaaacagaatccgctgatgtatagacgattaagtcacctgtttccatatgctgttttcctagctcatccaaaatttctgtaccagacgctggtttgttcccaatgatttttcgacctgttttttcttctaattgtgaaatcagctcttctggaaatccatctggaaatacattaaaaggcgtatcaatattgagacccataatttcccaatgacctgtcattgtatcttttcctgcagaagcttcctgcatttttgtatagtaagccaacggtttttcggctttatcgattcctttaatttcacggatattgcttaggccaagcttagccatattgggcatatgaagaccgttgcagtgctctgcaatatgaccaaacgtatcagcacctttatcattgtatttttcagcatccggtgattcaccgatacccactgaatccatgacaattaaaaatacgcgtttatatgtatgcgccattttattccctccaaatatcaatttatttattctctataaaattcccgtttggaaataatttaaccatcttctcttattggtcagaagtctgacctctctattagtatagacgctttttatttttttgtacacatgaatgaaagtgttttcaatcaaaaaaccaatgtctatgaactcattggacattggaatcttcctacgctcgcggatgaaactgattgtatacatcttttaaacgtgtttttgtaacatgtgtataaatttgagtggtcgaaatatccgcatgcccgagcatttcttgaacggctctcaagtccgcgccgttctctaacaaatgagtagcaaacgaatgccgtaacgtatgaggagttaattctttttcaatttttgcttcagaagctaacttttttaatattttccaaaacccctgccttgttaaacgccttccgtgatgattaacaaagagtgctttgtcctgttccttttgctttgttaaaacactccggctatgctgtaaatactcttcgatagcctccgttgccaaccttcctatggggacaattctttctttattcccttttccgatacaacgaataaatcccatcgtcaaatgtgcatcatcaatatttaagttaaccagttcagacacacgaattccagtagcataaagcaactcaagcatcgctttgtctcgtatgccaaaaggcgtcgaagtatcaaacacatttaacagcgcttctacttcttctgcatttagcacttttggcagcttgcgctcaagctgcggggtatcaatatgaacggatggatctgtatccgctgctttttctcttagtaagaattgatgaaaagatctagttgaagctacatgtctcgcaatcgttttagatgacttttgctgatcacttaaatatttcagaaaattaacgatgtggagtcttgttacttcattaaatgatttcagctgctctacatgctctaaatattgagcatacttttttaaatctcgttcatacgaatcaattgtatttttcgccagtccccgttctactactaaataatgaataaaatcttgaatttgatcattcaatagcctctactccccgttttgataaaacataaataaacgctctagccacgtctgatctttgttcacacttgcttgcatgaccttaactgctgaacccgaaggctcatcataacgtttataattttgatactcttgagatacccatatcattccaaaataaaacaaaagagtaaacccggtaaataagataaatactttacatgtattatataccatttcagcccatgatttcatgaaacaattcctccaatttttgattctattagaagatatgccaattgggacaggttttatacatgtttcttgcctttatacgctgagttctctcctggtcatttcctttctttctataaaaccatgtagcttataaactcgttatttttttatttatgtacaacaaaaaaccttctccattagggaaaaggcttttactgcttgtcttctttatcgtgacagcgatggcaaatgccatgaaatgtcaagcggtgatctttaattttaaaattccattgcttttccacaatttcttcaacgtcttcaagcaaatcttcttgaatttcgtccacagatccacattccatacacacaaggtgatgatgaaagtgtgcggctccttcttgtcttaaatcgtagcgagaaacgccatcgccaaagtttattttatcaacaattttaagttcagttaacaattctaacgtacgataaacagttgccaatccaatttccggagacttttccttgacgaggagatatacatcttcggcacttaaatgatcctcttcatgttcaagaagtactcttacagtcgcctcacgttgaggtgtcaatttatagctagctgagtgcaactgctgcttaattcgctcaattcgactttccataattattccctccctcgccattcactaatccattatatcagatgtgccgagggtgtcaaaataaagttattattaataagaaaaaagaattctttttatttaatacttattcttacttatttaatagagccattacacttttcattaaagtaggtgatacgtaggcttcaactgtagctgcacaggcaaccaaacataccattgcaatcatcgtgccgctatagcgtaaaaaggatgcggaaataggctccgctgcttttttaaagaactgctgccgcacaagcttcaaagaaaaggcaactgaagctgcagacaagatcagaaatgccggtatgagaaagatattttgcggcataacagatacaaaagatagcgcaaacccagagagtcccatttgattgactaaaaagcctacggtaaaaccaatcaccattccttttaaaaacagcagaattaacactacaggtaaaccaataatggcgattcctaatatccaaatgagccccaagtatttaacattgtgaaaaaaactttgctgaaacatttcaacgctgcttgctacttctccactctttacctgtccgaaaaaccggtttaaatagaagtacaggtcttctttttgatcaagcgtcaaactatttacaacaatagccccaaaaatgattcccattaaaaacagcacggtcacaaacaaataaatagaactgttttcttgaaaatgtcttgcatacgataatggcaattgtttttttctcatcgtcttcctcctattaatcgcttaatagagtgtatgatagagtacaaaaactatgccaagaatcttttgaatctatcaaataaaaaaagagaatgagacataatgaaatcaatccaatctaaataagaacaaatgagatagtatggatggcttgtgacaccgctgttgatttccatgcaaggcttcgctttccacgggtagccggtgagcctcttcgtcgcgtacgctcctgcgggatctcacctattccgcttttcccgcaggaatcttcgccttgccctccaatcaaccgctagaaccaactatataaatgaaatctacattcaccatcaccttaaaaaaatccgaacgaatttgattctccatcaagaatctctattcatcgttcggattttccttcaactaaaatatggttgccacacatttttttaagttagagatacacgcatgccttttttctcacatcaaatgacgtttcaatgtaaacttctaaattgctagattgccgttcgtatgtaaaaaaaactctcttactctcctaatccgctttttaactgtaagtactgcacagcataggctgtttttgcatcataaatttccttgttttgaataagagtaagggcctcatctaccgtaacttccatcacttcaacaaattcatcttcgtctaattccgctttggtagtcatcacttttaaatcttccgctaaataaaggtgaaccaactcatccgcaaaacctggtgatgtataaaaagaaataatatggctaagcgaatccgtcgtatagcctgtttcttcttctaactcacgttttgccgtcacaatcggctcttctcctttttctagcttgccggctggaatttcgactaaaatacgatccatcggcctgcggtactgtttgaccataaccattttatgatcgcttgttaacgcaatgacagctacggctccagggtgcttaactacttctcttgtactcgtttttccgtttggaagctctacttcttctaagtacaaatcaatcactctgcctccaaacagcttttcagaagacagcattttttctgttaaatgatccattttctacacctcgttctatttttttgactcttacatatattctatcatacgaatcttgggaggtagaaaaaatgaaagtttatgttcacgagaagcaaatcattttggtcggtaaagcatgggaaatcaagcaaaagttaaaagaatacggcgaacaatttcagtatgttgatgagtggacgaacgctatctctcaaaattttaattcttataaacaagcagactgcagacactaattgtgctgcagttttttaatcttcttatttgagtttctctctatcatagcgctacaatagatagaaacaagtaaaaaataaggagtgacatatatggaaaaaagacgcttaggtacttcagacttgctcgtcagtacattaggtttagggtgcatgtctcttggaacggaacaaaaacacgctgtcaatatgattgatgaagctctcgaatatggcattaattatttcgatacagcagatttatatgattttggcttaaacgaggagtttgtgggacaagccctaaaaaaacgcagaaatgatattattttagccacaaaagtggggaatcgctggaatgatgcaaaagacagctggacgtgggatccgtctaaggtttacataaaagatgaagtaaaagaaagcctgcgccgtcttcaaacggattacatcgatttatatcagctgcacggagggaccctcgaagataatattgaggaaacgattgaagcatttgaagaattaaaacaagaaggcgtcattcgctactatggtatttcatctatccggccaaatgtgattcgagagtatgtgcaaaactcttctattgtcagcgtcatgatgcaatacagcttgttagacagacgacctgaagaaagtgcacttcctcttttacatgacaacggcattagcgttgtagccagaggtccagtagccaaagggctgctaaccgaaaaaggagagcaaaaacttgctgcattcgagagcaagggctacttagattatagcggtacggaattagcaaaaacgatagaagaatttcgtcacgtacgaccaactcactctctgaattcaacggcacttcaatactgtttagctaatcctacggtagcctcggttgtagcaggagcaagctcttcttcacagcttcgcgaaaacgtcaaagctatcgaggcttccccgcttcagcctactgaaattagcaagctgcaatcgatctttaaagcaaatcattatgaagctcaccgttaaaaaataaaagcgcctttatcggcgcttttattttttaaattcagaccagttcaaatcactttcatttaacagttcttcaaacgacttatttttttctttttcttttcgaatttgagcagcttctttacgctctgtttctttctgctcttcttcttttaaagaaagcgcctgttttttagcttgaagctgttttaataagctatcatttagctgatctttgatactgagctgatcattttgtttttgtgctgattgtttttgcttttttttagccatcacaattcccccgctactttaattgagagatattgtatcatattcttgcttttgttaccaaaaatcaaaatgcatctagttttacatgttcatcaatgattaaagttggctctgtagattgttgaatatcttctaccgtatagcctttcgctacttcaacaagctttagaccttctgccgtaatatcaatgaccgctcgatctgtaataatacgatccactacctcttttcctgtcagagggaggctgcactcatttaagattttaggctcatcttttctcgtcacgtgttccataataacaatgatgcgctgtgctccgtgaactaaatccattgcaccgcccattcctttaatcatttttccaggaatcatccagtttgccaaatcaccagtttttgagacttccattcctcctaaaatcgcaatattaatgtgccctccgcgaatcattccaaacgattcagcactatcgaaataagaggcgccttttgtcgccgttacggtttctttacctgcattaattaaatcaggatctacttctccttctttcggatatggtccaattcctaacagaccgttttcagactgaagcaccaccgttttattatctgagatatgattagccacaagcgttggaataccaattccaaggtttacataaaatccgtccaaaatttctttttcagcacgttttgcaattcgctctctcacgttcacgccgttttcaatcatgaaaaatctctccccttttgttatttttgaacggttaaacgctcaatacgtttttcttgttcaccaataattaacgattgaacatatacactaggtgtgtggataatatttggatcaagtgaacctgttgggtgaagttcctcaacttctgctatcgtcacttttcctgctgctgcaatcattgggctgaaattgcgcgctgtcttgttatacactaagttccccatatgatcggctttccaagctctaaccaaactaaaatcagcttttaacgcctcttctagtaaatattcttttccatcaaacacgcgaacttcttttccttcagcaatgggtgttcccactcccgctggtgtataaaatgcaggtatgcccgctccgccggcgcgaatcttttcagctagcgtgccttgaggtagcaattctacttcaatttctcctgacaatacttgtctttcaaactctttattttctcccacgtaagaaccaatcatctttttaatttgtttgtttttcagaagcagtccaagtccccagtcgtctacgccgcagttatttgaaattacggttaaatcttttacccctgtttcaactaacgctaaaatcaaattctccggaattccacataaaccaaaaccaccgaccataatcgtagcaccgtcgtgaatatctttcaccgcttctttaaacgacgtatgtacttgtttcatacataaccaccccttcgttatttttgaaaacgctttctaatctattataaaagatttttatttctttttaaatatatatataactgaaaattataatttaatcatttttttgtcaaaaaagttatattactagacaaattaaaggaaaaacaaaaacgccacgagttccaaagctgtatgtttggaatctgtggcgttgtgatatagctttaatgtttgttaaaactatatcaaattaaggacgttcaacgattgttgcaacgccttggcctccgccaatacataacgttgctaatccaagttttgcgtcgcgtttttgcatttcatgaataagtgaaactaggacacgtgtaccacttgcaccaataggatgtccaagcgcaattgctccaccgttcacatttaaaatatcatgattaaattgaagttcacgatccacagcgattgactgtgcagcgaatgcttcgtttgcttctactaattgaacatcttctaatgaaacagcagctttttctagcgcctttttcactgcgcttacaggaccgattcccataatgcttgggtctactccggcagttgcattagctttaattgacactaatggtgttaggcctaactcgtctgcttttttacggctcattaccactactgccgctgcaccgtcattgataccagatgcattaccagctgttacagaaccgtcttttttgaaggctggacgtagtttccctagactttcagccgttgtgcctgcgcgcgggaactcatcttgttcaaaaatagttacttgaccttttcttccaggcacttctactggcacgatttcatctttgaaacgaccagattgaatagctgcttctgctttttgctgacttgaagctgcaaacgcatcttgttcgtcacgagtaatttcatatttatcacacagattttcagctgtaacgcccatatggtagtcgttaaatgcacaccataatccatcttgaatcatgctgtcgactactttttgatcgcccattttaaacccgttgcgtgcattttttaataagtatggtgcttggctcatgttttccattccaccagcaacaatcacatcagcatccccagcaagaatcgcttgtgtagcgagatgtactgcttttagtcctgatccgcatactttattgatggttaatgctgaaacagtttcaggtaaacctgctgctaaagttgcttgtcgtgctggattttgtcctaaacctgcttgtaggacatttcccatgataacttcatctacttcgtttgctgatacccctactttgtttaaagcttctttaattacagtaccacctaaagttgttgcggatacattttgtaagcttcccccaaagctgccgattgctgtacgtacagcgcttacaatgactacttctgtttgacccatgtcgaaaacctctccttactgtttgattactgtgattaactgtcacctgtattaatttcgacatcgcttgcgaaattcctctttttttgtaaaaatttataatttttattgaattttaattttttagaattaaaataaatattagtaagcgtttacaatatagggggagagcggtttatgggatttcctgaaaaagtaacaattatagaagttggtccacgagatggacttcaaaatgaaaaaaattttgttccaactgaaaaaaaaattaattttatcaaaaaattaaaagaagctggactatccgaaatcgaaattacatcctttgtttccccaaaatgggttcctcaaatgaaagatgcttctactgttgcagatacatttcagcctgatacatgccgaaacattgtgcttgtgccgaaccaaaaaggcttggaaaaagcactacaagctaattgccgctccgttgcgctttttattggcgtaagcaatacctttaatcaaaaaaatattaacaaaaacaccaaagaagctgtacaaacgctgcttcctctcattcagcagctcaagcagcaagaatgttttattcgaacttgcatttccaccgccttttattgcccgtatgaaggaaaaatacacgaacgcgacgtgctggctctttgcgaaagctttgtggaagctggagtgaatgaactaagcgttgccgatacaattggtatggcaaaccctaaagatgtattttcacttttctcgaaattaaaacaaaactttccacacaccctacttgctgcgcactttcacgatacgagaggattagccattgcaaatatctatgcagctctgcaagccggtattaacaggttcgattcatccgctggcgggttaggtggatgtccattcgctaagggagcaacgggaaacgtagctacggaagatctcgtctttatgcttcatgaaatgggtatttccacttctattaatgaagaaaagctgctcgaagcggtcgcttttatcgctcctcacatttcaagaccgattgaaagcaagcaatactctttatttgcacagcgttaaaaattaggtttttatgagagcgatgctataataaataatagctatattaataaaaggagccgctaatcatgaaaaaatggctattattaataggaagtgttttcggagcatttgccgctcttggcatcttttttacaaatcaaatgatgtacatccgtaaaaagaccgacaaagttattattgaccgcgatacggaagatggattttatgatgagaaagtctatagcactcttcctaaagaagcctttgcgcttccttcttctttaggctataacatagctgggaccgttatcaaacaacacgacaataaccgatttatgattctttcgcacggagttacagttcattcactcaactctatgaagtatgctcggctttttctaaagcttggatggaacgtcgttctttatgatcatcgccgccacggcaagtctgaagggaaaacaacgagctacggctattatgaaaagctggaccttcaatccgttgttcattgggtaaaagaacaattcggttcaactatttcccttgggattcacggggagtctatgggagctgcgaccactcttttgtatgctggaatggaagacggagctgatttttatattgtcgactgccctttttctgacttggaagaacttcttgcctatcgcttaaaacaagatttccacctgcccaaacagcttgtgatgccagcagctaatattattttaaaatggcgagaaggctactcatttaaagacgtatcacccatttcagtcgtagatcaaatcaaacatcctgttctgtttatccatagtaaagaagatgactatattcttcctaaaatgacggagcagctgcatgcaaaaaaaatgggagcaaaacggatgtatttagcacctgtaggcactcatgcccgctcgtatgctgataacccagaggaatatgaacaagttattgaatcatttttagaaaaaatacaaaaagaagcgctttaaagcgcttcttttgttttatcgataaatgacatgcgcggatttaaaatttgagaaggacattttagcataaacgcatttgcactttcattgtagtcaatcgtcatattatcatctaaaaatacttgctttgttttttcgacaagaacaggaacaaaattcgtctcgatggttacatcatcgctctctttttcatcaacaatccatagcgtcgttacgccgctcacgacacagccgcatccatccgtatcgtattttaattttaaatatagtgaagaatctttcccgtacttttcttgtacttttgctatcgctttatcagtaaaggtaatattcattttcctttaactccttttaaactaattgtataaacaaacgaaaattgcttatataatgagtataatacacatctcgctttcattaaactctggcgcttcatatagatgtgtacaaaaaggaggtttttttatgtcaaaagtacaaattaaagtaatggataacggctctttccgtgtcactggagacgttgaattaattgatgcagacggcaacaaatttgaaacaaagccgacattttcactatgccgatgtggccagtcgcaaaagatgcccttttgcgacggaaatcataaaggaaaattcgactcttgtgtgcgcgctgcaaaaattttagacgagcagtagattcatagaaatacagcattactgaacgaaaccgttaacgaaaaacattggtaacctgtggttaaagcacaggttattttctattgaacgcatcccctgccaatttttctacgagccccggggcaagctgatacatcttcgagcctatattcatccacttaggcaagttgacttctcgttttggtttcccaataatatcgaccgttttttcagctacgtattgaggggttaacataaacttttctacacttttttcatagtttcctgattgatctgctattgaaaagaagttggtttgaataggacctggattcactgccgttacatagatatgtgttttcgctaattccatccgcaggctgttggtaaaccctagcacggcatgtttagaagctgaatagccactggatttaggcgttgcaagtttgcctgcttgagaagcaatgttaataatatgtcctttgttttcttttagcatataagctaaaatttcttgtgtacatgcaattaatccaataacattgacttgaaacattgaggcaattgtcttaatcgatgcttctttcacttcttcaaatacaccaaagcctgcattattaatcaggacatcaacacgcttaatttcactcatcattttctgaacgactcttttgacttcctctacgttcgctacgtcagctttgtatatgtaagaggtaatcccatacttttgactaatttgctcggctactcggtgcagcttttcttctgtacgtgccagtaaaacggggacgccccctcttttggccacttcataagctaaatgctctccaagacctcctgaagcgcctgtaatcacgacatattggttctttaacgaggatttcaaatataacacaccttttttataagttaagagcacacagaataaataagcttactttctttttcatgtgtactgattttatttgcatcttctaaaaaatcgagctgaccaattgtttcagaaagagttagccctagttctttttcataaatagtaggaaatagctgtttgcaaatatcaaacgctgtttgagggcgttcttttatcatgctaagcactttatccgctcggtcgctctgcttttgtaaccgctcttgtacaagttcgcgaacatgtaacacttcatctccatgacctgtatagatacagtttatctccaaatcaagcagacgtcttaatgaatgattatattgaagaagcgttttaggtcgctcgccgcttggtttcataggaggttcaatgagcggattagatgaaatatgctttaacagtaaatctcctccaatcataaccgctgttctttcattgtataatgcaatatggctttgagcatgaccgggtacttcaagtactttccaactctctaggcccggaatgtaatctccttcctgcacagaagttgtaagagaacgatgacatgaatacttcattgatgcttttaaacgttttaaataagggcgaaacctttcatctacgccggctttcataaagtggtcttcaaaaaacgcatcgtaccactcaaaaaaatctggattttgggagatccaaggctgatttttcgcatgaccgactatggcgatatctttatcaaaaaaatcaagcattcctacgtgatcaggatggtgatgagttaggacaacttgcttaatatcatctggttttaatcctatttcattaagcttttctttaaatacagaccacgccgcctccgttttaataccagcatcgattagcgtaacggtctgaccttttataacaaaaacattcacatctcctaccgcaaaaggagtaggcagcacaattttatataattgctcattcatctgtatttttgctcctttaccatcgcattttcttttaagtttacacgatttttcctgttatttatacaattgcattcgttttctgaaaattacattgacatccttctctttttcattgcataatgacagaaatatagtgaagttttattcatatctttagataactatgcattttataaagaagagatacacaaacctttaacagatactgaaatctcagtatctgttttcattggatagcaaatgactggaggaacttttaatgaaaacggatttaaacatcgcctttattggagctggatcaatggctgaagctatgatctcagggctgctgtcagataaaaagcttcgccccaatcaaatcaccgtaacaaatcatagcaacgataaaagacttcacgaacttcgaaacgcctatgaaattaacattacgcgtaatcatgccttgttaatcgagaaaagcgatatcgtcgtgcttgctattaaaccaaaagacgtagcggaaagcatcgatacgattaagtcctatattcgtccgcaccacctcgttctctctgttttagcaggtgtatcgactgccacaattgtaaacttgtttgaccaagaagtagcggttgtaagagctatgccaaatacatcggcctctattggattatcggctacagccattgcacccggcaagtttgctacagcagagcatatgaacgttactactgctttatttgaaacgattggtacggttacaactgtagaggaagagcagcttcacgctgtaacaggactatctggaagcggcccagcgtatgtctactatctagtagaagcaatggaaaaagcagctgaaaaacaaggcttggatacgtcagtgtcaaatgaactaattcttcaaactcttatcggtgctgcagaaatgctgaaacagtcacctaaaacgccagccgtacttcgaaaagaagtgatgagtccgggcggcacaacagaagcaggaatcgaacagcttatttctcataacttccaagaagccatgatgcagtgtattgaacaagctacaattcgctccaaatatttaggagatacgattgatgaaaaaatcgcaagtaaacgttcgtaaaggttaacctctttctaaaaaaagaaagaggttttttttatgattaaaaatggataagcagattatgtgaaagaaaattcaatgcggtgatataataacttttgtttagagtatcgaaataattggaggttaaaccgaatgacaacaaaactattttcaccttatacagtgaaagatgtaacattaaaaaaccgagttgtaatgtcaccaatgtgcatgtattcatgcgaaaaagaagacggtttagtaaccgactttcatatggttcactacacaactcgtgcggttggacaagtaggtctcattatggttgaagcctcagctgtcgtgccacaaggtcgtatttcagctcaagacctgggaatttggaatgatgagcaaagagacggattaaagaaacttgtaacacagctaaaagaaaacggtgcaaaaacagctattcaacttgcacacgcaggacgtaaagcaactgttgaaggcgatatttatggtccttctgctattgcttttgatgataaaagtaaaaaaccggtggaaatgactacagaacaaattcatgaaacgatttctgcctttaaagaaagcgctcgacgttcaaaagaagctgggtttgatattatcgaacttcatgcggcacacggttatttagtacatcaattcctatcgccgctaagcaataaacgcagcgacgaatatggtggcagcgctgaaaaccgctatcgtttcttaaaggaaattattgaagctgtgaaaacagagtgggacggtcctttatttgtccgtgtttctgcttctgactatacagaaggcggattaacagtagatgatcacgttgtatttgcaaaatggatgaaagaacaaggcgtcgacttaattgatgttagctccggagctctggtacacgctccaatcaacgtataccctggctatcaagttccgtttgcagacaaaatcaagcagcaagcgaatattgatacaggggctgttgggttaattacaactggacgacaagcagaagagattttacaaagcgaacgcgctgatttaatttttgttgcgcgcgaacttctacgcgatccgtacttcccgcgcacagctgcaaaagaactagatgaaacaatttcagcacccgttcagtacgaacgcggatggtaaaaaaagacgaggatatcctcgtctttttttatgaaatcgtaaactgtttcaagtcttctgctacgtcggtattcggaaaaatttcttttgctccttctgctagccggctgactgcgtctccttggtaacgcgaactaatatgagataaaataagacgctcggccgatgctgttatagcaatttcagcagcttcttttgcagtggaatgaaaatagttgtaagcaagctcctcgtctcccgctgcaaaagtagcttcatggattaacacattcgcatgcatagcaagctgaacactttgcatgcactttcttgtatctcctaaaaccgtgataaccttcccttttttaggctctcctacaaattcttgaccattaataaggcgcccatcttttaatactacttctttcccttcttttaactgctgataatgaggccccgggggaatattcatctcttttaaacgctgaacgtccaatgatcctggcaaatctttttcgacaactcgatatccataagataaaatgccatgttcaagcttgccaaactccactgaaaaagtttcatcttcaaaaatcgttccactttcactttcctcttctatttcaacaatctctagaggatattgcagatgagtttgacttacagccagcgtgactttaataaattctttaattccttttggcccgtatacagtaagcagcgattctccgccttgaaacgaacggcttccaaggagtccaggcaatccgtaaatatgatcaccgtgaaggtgcgtaataaaaattttctcaattcgcctcggtttaacggttgtatgtaaaatttgatgctgcgttgcttctccacaatcaaaaagccacaccgcccctctttcttgcaaaagttcgagcgcaagagatgaaacattccgctgtttcgccggtactcctgcacccgttcctaaaaataacaattccattttctacttcctccttcacacgcacaaaaagcctgtaagtatattatacaggctttttgcaaacttacctatttgatgctgtcaagcgcatacgtaatagtagctaataacagctcaatatcattttcctcaatgttgagaggaggcgagagcgtgagaacattattatagccggccaccgttgctccatttttcccaataatgactcctttggttttgcatttagcaatcacttcatttacaagattaacgtctagcggttccttcgtttgtttatcagctacaagttcaattccaattaaaagccctttacctcttacgtctccaacgtatgggtggctatcaataagcggctttagctcacttaatacgtaagccccaatctgtttagaacgaccaaaaagattttctctctccataatttctaaattctttaatgccagtgcacacgcagctggacttcctccaaatgtattaacatggcgaaaatactcgtactgatcgctatctttgaacgcttcataaatttcttttttaacagcagttgcagagagcggaagatatgcgcttgtaattccttttgccatggtaatgatatctggttttacatcgtaattcataaaaccaaaggcttctcctgtacgtccaaagccgcaaataacttcatctgcaattaaaagtgcaccgtgtttttcacacgtttcttttacgcctttcatataattttgaggcggtaaaagaattcctcctcctgtaataattggctccataataacagcggcaatcgtttcacttagctcccacgtcataacattgtcaatatcttttacagattgaagcttttctttcggtgcatcgtagtcatcttgccctcggtacgaatcaggcggggcaacgtgaataaagccaggggcaagcggttcatatttatatttacgctgagcttggcccgttgctgctagtgcgcccattgaatttccatgataccctcggtaacgcgaaataaatttgtagcgagaatgctctcctttttgctgatggtactgacgcacaattttaaaagccgtttcatttgcttcagatccgctatttgaaaagaagataacatagtcatcacctagcatttcatttagcttctctgccagtttgatagcaggtacgtgagattgagtgagtggaaaataagccagttcttttagctgctcataggctgcgagcgctaattcatcccgtccatacccagtatttacacaccaaagccctgccattgcatctaaatagcgatttccttgttcatctgtaatccaagcaccttttgcttttgtagctaccatcgttgcatccggactgtatggtttcattccatgccatacatactgctcatcttttgcacgcagatctttttcattttgactgacctgtaccatcttatccactcccaaatcgctagcgcggtatttttcctgtatgaaaagacttcgacaaaatgccgaagccacttgctatattcatctatatgttaaaagtcaaagcgtgatgtaaccatctttttacgtgtaaagaagttcaaaccatctttgccgttgacatgcaaatctccgtaaaaagagtctttccaaccggagaatgggaagaaggccattgtagcaggtactcctacgttaataccgagcatacccgcatctgcttcttctctaaattgacgcaccgcttttgcatcttttgtataaatcgttgctccatttccaaaacgagatttttccatatagcgaagtgcttcatctaatgtgtcagcgcgaagcaagctgagtacaggtgcaaaaatctcttctttagcaatggtcatatcaggagttacgcggtcaaaaattgttgcccctaagaagttgccttccgtatgttcatccatttctttacgtccgtcacgaatgagttcagccccttctttcatgccaagttcaatataatccagcaccttatcacggtgctcttttcgaatcacaggcgttagaagcacttcatcatcaaatccgcttcccataattaattcatctgctttttgctttaattttgcgacgaattcatcgcctttttcaccaaccacgaccacggcgctgcaagccatgcatcgctggccggcacttccataagccgagctgataatatgtgataccgctttatccatgtcgcagtctggcatcacaacatgatgatttttagctccagataaagcctgaactcgtttcccttgagcagcagcttgttcataaacatattttgctaccggctgcgatccgacgaatgaaatcgctttaactttttcatgctctattaatccgttcacgacgtcgtgtgccccgtgcacaatatttaataatccatctggtgctcctgcttctgtaaaaagttcagcaagtcgcgttgctaaaagcggcgttcgctcagacggttttaatacaaacgcatttccacatacaattgcaagagggaacatccaaagcggtaccatcatcggaaagttaaaaggtgtgatgccgccaacgacacccagtggaaaacggaacatctcagaatcaatttcttccgctatgttatttaatgattcccccattaataaagtaggagcacccgcggcaaactccacgcattcaataccgcgctgtacttcaccgtaagcttctttaaaagccttgccgttttcttgtaccactaatttagctaactcttcatgatgcttaactagtaaatgctgaaacgcaaacattaatcttgctcgttttggagcaggaacgttacgccatgtttcaaatgttttttgagctgtttccaccgcattggctacgtcttcttttgtagaaagcggtacttttgcaatgacttcgcccgtcgatggattaattacctctccaaattttccccctgccgtatcaacccattttccgcccacgtaattttttaaaacttgcgtatcattattcacaactgacatatcgcttggcctcctcaaaaaataagaaatgacaaatctacctttattattgaataaataaatggtggttgcattagacaaaatgtgaaacaactctagattctcgtttcacattttgcgcagtgaactcggagaaagcatgaactaaaatgaacatatagtaaaatcagcctcaacataaaaaaacagctgtttccagctgcttacttatccgtttataaattccgcgcgcgactttttcatcataaacaaatattcatatgccataatcataaactcaattgccagtcgtttttccggctccataaagtcttcacccagcagcttttctagtttttcgatacggtgatacagcgtttgccggacaatgtataaacgcttagccgtctcttgtttagatccgttgcatgctaaataaatttttaatgtttccatgagttttgcattatacgtttcatcatatgtaataacgggctgcagatattcaaacaccacttcctgtaagtcttcatgctgatgtaaaagcgaaataatccggtacatatgcaaatcatcataaaaatgaataatggtttgtttttgcagcatttcttgaatcgaaatcgtttctttagccgtttcatagcttttatgcatgcagtcaagctgttcacagtattggccaattccgataaagctaatggcgttcctctttgaattttcatccgattcatattgattcatccagcgatgaaggctgttttctaatctctctctccacgtgctaaccattcgtttgttcaaaagaataaataatacttcgcgatttcgctcggagactaataagtgaaagccttcttgttcaaaaatgcttcgcaagatcagcttaaaatacgttcgatcaaacttatcccgcctttgccacttacagcaaacaacgacacctccgcgaataggcgaatctgaacacacttcgtgcatagagtcttttatttgttcaagagttaactctccgttcatccatttcgtcatccattcggtttcatctactctttttttctcttcgacatacaggtccttcaaaaaatgctgagcaagtgcagtcgccgttcggtcaacggtgagcacttcaagttctgttaacgcttcatttatagaagcaacatacagctgagcataatcttgtcctaataaatgaataggctgctcagtaaaatgcggactttcattttccctgcttatataatgaagcagaagctgctgtttgagcaagtccatctccggagcaaaggtaagcaattcatttgaaactttaaggccgacaagaagccccgtagattcatataaacactgtaagatgagggccgggtcattaactgttaacagcagctgatttagcctatgagaatactgttctaaatcggaaatcatttgatagtgctgattaattaaaagcgagtgaacatcttgcgtaatttcaacgaacggaacttcctcgtgaaataaaataatcggaaaatcacattcgttcgctttatcaattacaatttgcggaatcttagaagtataagtgccaagttcaatacacagtcctgatgccttacaagaaattaattgctgaagaaatgataaacaagattgagaatcttctccccagcctacccctgttgataaaatgagctcgtttccttttagtagctcattaatgcgcgtcacttccatcacgtgcacccacttcacagaattagtaagccctttctctccagctattacttcacagtttacaaaatgtttccttgttaaaatctctgttactgttaaatatgatttcaagtcaacaccgcccctagcgaatttcacatcatgtctcctggatcattaacgcgtatttcgcatatgtgtagaacaaaagctatatcttcttacattatattaaatatttagaagaaataaaatatttaatgaaagaaacgaaaaaagctgtaacgataatggatcgttacagcttctgagctgtttgctgtaatttattaaaaaaaccgtggcgtttaaccgcttgctctttaattcggtgaatttcttttttataaaaacgcaaatcttgtagtgacactgcatttaacatttccatttttaatttatcaataatttttgtttcttcctgtgtcatacactgcgtagcttgatccatccgtgtcacacccttttcgtatttaatagatttagtttgaaaacgttctactataatatttactacaatttactagataactaaaccttttctctttcgatgtaaacgaaatgtaacaactgtaatacagtgaatggataatatctagttattttgtttcacatccaaaacgaaaaaaacacaaaaacggatcacttttgtcagccaatatagtaaaaaacttatagggattagtaaacaaataaagagattgaaacatgattaaattactccaatcaacagccagaagcacctacatacatgaaacctacgttcaccctatcaataaaaaaatccgaacgattcatcgttcggatcttccttcagctaaaataattttgtcccagcctccgtttttatacttgttgaatcagtacggatgaaaaatattttctagcatccgccgtcaatatatgaagggtttcttgttcggtttggttattttcggtgcgttcaaacgtcacaaatgccccgcttagattctccgttacggctgttattttaaatcctttttgcagcaaaaaatcaatcttttctcgctctgccatatattcatggtaacttgacatttccctgccccccatctatttcttcatctgtttttataacattaatttttcagcatcgttagccttgtttaactcattaaactttgctctttttgtaaattgtccgtagcctttttgaccgacaaactgcttatcttttacgacaaattccccgcggcaaagtactgaaaccggctcacctgtgactttcattccctcaaatgcgctataatcgactgccatatgatgcgtgttcgctgaaatcgtacgttcaacagaagggtcaaatataagcagatccgcgtctgcgccaaccgctattgttccttttttcgggtacagtccgaacaacttagcaatttttgttgatgttatatttacaaactgatttatattaattcgtttcttcactactccttctgaaaataaaatactcatgcgatcctcgataatagggcctccgtttggaatcttcgtaaaatctccttttcccagatctttttgaccattaaaatcaaacgaacactgatctgatccaatcgtttgcaagtcgccattacgcagagcattccacaaaacatcttggttccatttttcacgtaaaggcggcgaccatacgtattttgctccttcaaaattcggtttttctaaataggtttggtcaagcgtcaaatactgcggacacgtttcgccccagatatttacgcctttttcccttgcttcagcaatctttttaactgcttcagcgcacgacacgtgaacaacatagagctgtgagtcagccaactccgttagcaccgcggctcttcccgtagcttctccttctacttctggaggacgagtcagtgcatgatagataggatcggtttgtccttgttctagtgcttgtgccgttaaatactcaataacatctccattttcagcatgtaccatcacaagcgcccctagttttttagcttgcactagcgtttgataaagggtagcatcgtctgcttgaaaaacatttttataggccatgaacactttaaaagaagtaattccttctttttcaataatcgtaggaagctcatttaatacatcttccgtgatttctccaatcattagatgaaagctataatcgatagccgcttttccttttgatttttcatgccatgtgccgatcgctttttgcagcggttcgcctttattggttaagcaaaaatcaataacagttgtcgtacctccaaaagctgctgctcttgtacctgtttcaaagtcatcttttgtaacggtgcctccaaacggcatatctaaatgagtatgaggatcgatgcctcctggaaatatatagttaccttttgcatcaatcacttcacagccctgctcttcaaatgccgagccaattgctgaaataactccattttcaattaaaatatcggctttatacgtatctgttgctgtaactaccacaccatttttaacgattttcttcattttttcatcccctttttctttatacgtctaatcgctgtgcagccgtcgcttgtaaagcagcttggcgttcattccacgtcattggaggctgttcatttggtaattcaaccatggatatagccccgtctaccggacatacaatcgaacataaattacagcctacacaatcttcttctcttacttttaaataagatttccctgaaggatctttcagcatatcaatacattggtgagaagtatcttcacaagaaatatgacatttattgcagttaatacacgtatcgggatcgatgcgagccactactttataattgagatctaagttgccccagtcggaatattttgaaacggctttccctacaatatcacttactttttcgattcctctttcatccaaataataattgagaccttgaatcatatcctctacaatgcggaacccgtgatgcatagcagctgtgcatacttgcacacctgtagcacccatgagcataaattcgacggcttcctgccagttcgaaacgcctcccatacctgatattggaacgttaataaacggacttcttgcacattcagcgaccatgtttaatgcaatcggcttaacagccgggccgcaataacctccgtgagcgccttttcctgctacgtgtggaatcgtattccatgaatgaatgtctactcctgctaaactattaatagtgttaatcatgctcacagcgtcagcaccgccccgaaccgctgcttctgctgtaacagtgatatcagtgatatttggggttaatttaacaataaccggcgtttgagcaacttctttagcccaatacgtttgtttttcaaccaaatcagggacttgcccagaggcagcacccattcctcgttctgccattccatgcggacagccaaagttcagctctaatccatccactcctacgtcttctacttttttgacaatttcatgccatttttcttgctgaggctctaccataagagaggcaataattgcgtggttaggaaacttctttttcgtttcatagatttccttcaaattaacttcaagcggacgatcggtgattaactcaatattattaaagccagctacgcgctgaccgttgaagtcaacggcagcaaatcgagaggaaacatttaaaatcggatcaccaagcgttttccaaactgcgcctccccatcctgcttcaaatgcacgctgcacttgataacctgaattggttggcggtgcggatgccagccaaaacggatttggtgattgaatacctgctaaatttgttgttaaatctgccatagatttctcctcctcctgattttaagctgtttccattgtttcttttgttaactgcatatgaatatttaacgccgtttgttttccttgctgagcagcggtcacaaccattgcttctccttgccctttaccaaaaacaacgtctccgcaagcaaatacttttggatttgatgtttgaaacgtctcttgattaattaagacaactccgtcttcatgatgcagctggaattgttgaatcaaagacaggtaccgttcttgaccaattgctttaacaacagcatcgactggaatggtaaacgttgagccttcaacaggaacaggcttcctgcggccgtctgcatctggatctgttagggtcatttttacacattcaatcccgctcaccttaccattttcatctccaataattcgtataggagccgttaaccagcggaattcaacaccatcttgtttcgcaaattcaaattcaaaatcataagccgtcatttcttctcgtgtacgacggtataaaatttgaacattttcagcccccaagcgcacggaacacgtagcaccatcaatcgcagtatttcccgcgccaatgacggcaacacgcttacccacaaattctgttgataacgcttctgacttcgtttttttcacaaaatcaatcgcgtcatacacaccgtctagctcttcaccttcaacatgtagagaaggcaccttgctcataccaatagctaatacaaccgcgtcatacgactgcagcaattcgcttggaagaatatcttctccaattcttacgtttgttttaatttttacatctaagttttttacttgttcaacttcccagaatgaaatcgcttgaggaagacgaaacgacacgattccatatgtatttaaccctcctgcttgtttttccgcttcaaaaatggttacgtcatacccaaatcgcgccagttctcttgctgcagagagaccagccggacctcccccaacaattgctacctttttgccgtttgcttttcctttctcaaacagcatctgttcattttgaatagcccaatccgttgcgtagcgctgcaaatctccaatcataattggtttggttgagtggttaagcacacacgctccttcacatagttcatcggttggacaaactctcgaacagcttgctcctacgggattagaagacataatcgtttcggcagacccctttaaattgcccgatgcaatttttttaataaacgtcgggatgtcaattcctgtagggcatgcctgaatacagggtgcatcataacagtacaaacatcgattagattcttcgactgcttctctatttgacaaccctttttctacttcattaaagttttgaatgatggactgcaaactttcctgtgatcgcattgcatcaacctcccaaggatatctgttgataaaactcaaattgaaagcgcttacatattttttatatacgttattttcaatttctactttagtaaaatatattactaactttattgtacaaaacgaccgtcttttcttcattatacattatgttaaaaaattcagactatttactattcactatgtaaaaagccttgcttttatataaaagcaaggctgcaactattattttgctacttctttaataatcgacactactagttcagatgtcttcaccagttcttctaccggaattttttcatttgttgtatgaatgtcttcataaccaactgctagatttactgttgggatatcaaagcctgcgattacatttgcatcgcttccgcctccgctttgaagcaggcgtgaaggacgatcgatattagccacggcttttttagcaacttcgacaacatgatctccatcgccaaatttaaagcctggatacatcactttaatatcaacttctgcacgtccgcccatttcttgtgcagctgtttcaaacgcttctttcattttcgctacttgtgcttccattttttctggaattaatgaacgagcttctgctaaaatatcgacgcggtcacacacgatattcgtttgcgttccgccttcaaagcgtccaatattcgctgtagtctctttatcaatacgtccaagcggcattttagaaatggctcttgacgcaatcgtaatagcagaaacgcctcgttcaggagctacacctgcatgagctgtttttccataaattgttgcatttacttttgcttgcgtcggcgcagcaacgataatgtctcccactttgccatcgctatctaaagcatagccgaattttgccgttacgagactagaatcaagagctttagcgcccactaagccagattcttctcctactgtaataataaattcaatttttccgtgcgcgatgttttcttcttttaatacggtgatggcttctagcattgctgctaagcctgctttatcatccgctccaagaattgtcgtgccgtcacttttaatatagccatcttcaatagatggtttaataccgtttccaggtacgactgtatccatatgagaagtaaagtagattgtgtctactccttcttttgtagctggcagtgtgcagattaagttgttggctccgtggcccgttttttctttggcatcatcttctactacttcgacgcctaatgcggtaaatttttcttttagtacaacagcaattttttcttcatgctttgtttctgagtctacttgtactaattcaataaataaatcaacgattcgttgttcattaatcataatatgtaatccctccaaaaataacctacaatggtatgttaccatgtttctttgctggacgctcttcctttttattgtgcaacatttcaagcgcttgtattaattttattcgcgtttcccgaggatcaataacatcatccaccattccagcgcttgccgctacgtaaggattagcaaatttctcgcgatactgttcaattttttcgtgtcttgtttcatctgggttttcgctacctcgaatgtcgtttgcaaagataatatttgcagcaccttgaggacccataacagcgatttcggcattgggccacgaatacacaaggtccgctccaatcgatttactatttaaagctacgtatgcaccgccgtacgcctttcgcaaaatcaccgtgattttcggaacggtagcttcggagtatgcatataaaattttagcaccatgacgtataattccgccatgttcctgcttgatgcctgggaaaaaacctgtaacatcttcaaatgtaataagtgggatattaaatgaatcgcaaaatcgaataaaccttgctgctttatctgaggagttaatatctaaactgcctgccattactttaggctggttacacacaagtccgacaacttttccatctatgcgggcaaaaccaatgacaatatttcttgcaaagtctttttgcacttcaaaaaatgagtgctcgtccactacttggttaatgacttgacgcacatcgtaagggcgcacggcatcaaatgggacaacgtctaataaatccggacgataatgatcacactctgcctttgaggctaaaggaggctgctcttggctagactgaggaagatagcttaagagcgttcgtacttgttctagcacctcttgttctgttgcacctctaaaatgggcattaccgctaatttcgttatgaacagctgctcctccaagattttctgaggaaatgctttctcccgttaccgtttcaattacttttggtcctgtaatgaacatttgacttgtttcttctaccataaaaacaaagtccgtaatcgccggtgagtacacggctccgcctgcgcaaggccccataataacagatatttgaggcatgacacccgaataaatggcatttcgataaaaaatatgaccgtatccatcaagagacataacgccctcttgaatacgagccccgcctgaatcatttaacccaataaatggcacgcctgttttagcagctaagtccattacgtgcgcaatttttttagcatgcatttcacctaacgcgcccccgaatactgtaaaatcttgcgaaaacaagtagactgagcgaccgtttattttgccgtaacccgttactaccccgtctcctggtcctacttgattattcatactgaaatccgcacaccgatgttcaataaacggatttaattcgacaaatgtatgttcatccaaaagaatttcaattcgttcgcgtgccgttagtttccctttatggtgctgtttttcaattttttcgtctccaccgcctaactcgattttccggcgcttatcgtacaattcatttaatttatcataaatgtcaaccatgtttcttttcctcctctagtgttttttcacagagctcataaagaacaccctttgctgactttggatgcaaaaaagcaatggatgcttcccctgcgccttttcgcggaacatcgtcaatcatttgtacacccttttcctttaactcgttaatccgttcttcaatcgtgcgcacacctaaagcaacatgatgaagaccttcacctctcttttggatgaacgcgccgaccgcactgtcttcaaagagcggctctaataattcaatttttacgttgccgcactgaataaaagcaacttttactccttgttcttctacttcttctacttttaatagagacagtcctaataccttttcataaaacgggaggctgccttcaattgattttacagctattcctatgtgatcaattccttttatcactttctcacctcttaaaaaagcgttttcatttacacatattcttgaaaacaaaagaaatctcctgctcgcgtatctacagaaagttgcttgtctaagcagcggaagacatgtaaaataagaaaaaaacgtgtaggaggactttggttgtatgtctaataagaaaatccaaaaaaccattgtgtttttaatgcttcttgtcatgttaatatctacgcttttagcgggacttgccatgtggttttaatcgggactgacgactaaaaacatagctgcactgctgtttctttgtgcaatgcaaacatataaaaaagactggtcactagtcaccagtcttttgctgtatattcacaatgcctttttgagcggctaactcttcaaaagattgatctgtagatacaatccatacttttgtacccaacgggacttgatcatataaatggcttacttcacgattttctacgcgaatacagccattcgagacatatttaccgatggaacccggctgatttgtaccatgaatgccataaatacgtccgtcagtctctcttgcatcaaacccaatccatcttacacctagaggattttgaggagcgcctccttcaatgttacttctccgataataaggattaacagcttttactgttaccgtgaactccccttcgggcgtcagatcaactgttttccccgttgctactttaataatttgtttaatttctttattttgaatataagcaagctcattgctttgtttattaataataatataaggatcatttggcaacggattttctcctaatggccaaaccggagatagtagtaaaaggataaaagcaaacacatgcacgtaatccaccaccttactttagtcctaagtaaaagacaagagatatatctcttatcttatttagtgttcgtaagcaagagaaacaacatgcatgctgtttaacttatttttaaggtttgtttaataaccaaatattgttcaatttctttgactacgtgcagtaaatcggcacgcgcttcaaactcttcccgcgttttgggaagcggcatctctgcaaacgcttctcgtaaatgctgaagtttggctaaaaataattttgctgtattaccggggtggatggatagacttaattcttcaatgaaatcggcaatcatgtagcgctgttctaccaccaaatcaatagcggtaatgagaggaagcgttcgctcaataatttcaagctgtttttcacgaattttaaaatagcggtaataataattttccccacgcacaaaatgattttcaacatcacgaaacgcaaggctttttgctttttctaaaatttttaccgtatctgcaatttccttaccgtcccaactgctgtcattggttctgagatacagggcaatttcttttaacatcgaccggaaattcccttcaatttcttgctgatacgtgcgaagctcttgatctaaacttggcatgtataaattcacaagcagggcaacacctatcccaattacaattaagccaagttcattaaagacgattccccatgtcatattgcctttggagtaaatatgaagcaaaataacggagcttgtaacaatgcctgcattaactttgaatataaccgtaaccgggataaacaaaagcagcatcagtcctataacaagtggatgataagcaatcccttcaaagaatataaacgaaaacagaatggataaagaacaagcaataaaacgatcgcttgcacttcgcaacgattttttctttgaattttgaatgcacaaaatggtgataattccagctgatacaaaaaactcgaggtgaaagaactgagctataataatagccagtgatgtaccgacggctgttttaattgtccggtacccaattttaaatttcattttctagactcctacatgttggtttctttttagtgtgataaaatactctattctttattaacacgaatagaaaaataacacaaccttaaatcttgctgtaccgtataaatttcaataaaaaaagtgcagaaaagatcgtactcttcctgcacttttttattataaaatcttttctaagaaatctttagcacgcttgcttttaggcgctgagaaaaattcagccggaggcgcatcttcaacaagcacaccgccgtctaaaaacagcacacgatccgctacttctcgtgcaaatcccatttcatgcgttacaatgaccatcgtcattcctgtttctgttagcgacttcattacatctagtacttcttttaccatctctggatccaatgctgatgttggttcgtcaaacagcatcactttcggttccattgccagggctctggcaatagctacacgctgcttttgaccgcccgataagcgatttggaaactcgttggctttttgagcaagtcccactttttgaagtaattctttgcctttagcaacagccgtttctcttgacacgccttttaccgtcatcggagcatacgtcaaattttcaagcactgtcatatgtggaaacaagtgaaaatgctgaaataccattcctacgttttcacgcacacgcataatgtttgtttttttatctgtaatcacttgaccgttaattgaaacgactccgctcgtcggttcttcaagcaggttcatacagcgtaaaaaagtagatttaccagaaccagaagggccaataacagctacgacttctttttctttaatcgtagttgaaataccttttaaaacttcatttttaccaaatgatttgtgtaaattttcaacattaatcaccttttctcattctcctctcgactgctttaccaaggagcgttaagcccattaccattacataataaatcaaccctgcaaagattaacggttcaaggtaggcgaatttttctccacctacaatgtaagcacggcgcataatgtcgagtgctccaataactgtaacgatagctgattcctttgttaatgtaatgaactcattcattaaagcaggtaaaatatttttaagtgcctgtggcaaaataatttgtcccatcatgcggcgataaggaattcctaacgctaatgccgcttcacgctgtcctttatcaacagctaaaataccggcgcgaataatttcagatatatatgctgcagagtttagcccgaacgcagcaacggctgctggaaacggggcaatatcaaacccgagcagctgaggtaatccaaagtatattaataataattgcagtacaagcggtgttccgcgaaacacggacgtatatgcatccgcaaaccattgaagaggtttattgcggctgattttacataaagataaaataactcccagcacaaaccctaaaattgctgaagctaggactatctgtatcgttacccctatcccttttaaaatataaggcatagaaggcacgatttgcgaaaaatccaaattcatgcctagttccattcctctctaactatcattcttatttttggtcgtcaaaccacttaacgattaatttatctaattcaccgttttctttcattttctttaattcacggttaaagtcatttgttagcttgctgtctttaggaaatgcgattgctgatcctttacttgaatctggacgtcctgtatcagacatttgcaagcttttgtctttgttcacataccctttagctactgtatcttcaataatcgctgcatcgatacgatttgatttcatttcttgaattagttctggaatacggtcacgcgttgttacatttactccgtcaacttcttttgcaatttcttttgcttcgtccgcttgaatagaagaagtttgtacaccgactgttttcccttttagttcttctgcatttttaattggcgcatctttcttcgatacaatcatgttttttgcttcataatatacgtctgagaaatccacgttctttttacgcttttcagttggcgtcataccagctaaaactaaatcgactttattagattgtaaagctggaattaatccgccaaattccatatccttcacctgtacgtcatagcctaactttttaccgattgcttttgctaaatctacgtcaaatccgattgcttcactatcaccttttgccgtatcaatatattcaaatggtgggtaatctgctgatgttcccattactagtacttttttatctttgtcgtcgctgcttgctccgccattagacgttccttctcctgctccgcatgcagctaaaacgcctgctgttaaaagaccaattgccgttaccgatagccacttcttcaatttcatcttcgttccccctagtttattccttacattattttttaaaaattaataatattatgaaataagttttttgctattgcaagtaaatgtcgaaatttaaatatatattcatataaatgtattttaacacaatgttataaatatgcaatatcttttttaaatataagtttcactatttgaaaataccttttctcaacattttccactcgttagaaagcctgcatacagatagataaaaaaacgcataaaaaaagaagccgttcaaaacggcttctctcttacacttcttcacaatgctgttcgaatgcttcttgcagcttcatcacaactgacattggctcatggccttcaatttcgtgacgttctaccattgtgataatttttccgtcttttaataaggcgaaagatggagatgaaggcggataaccttcaaagtattcgcgtgcacgtgcagttgcttctttatcttgcccagcaaatactgtaaccaagtttgttggacgtttatcataatgtacagcgtgcgctgcagcaggtcttgcaatacctcctgcacaaccgcagactgaattcaccattacaagcgttgtaccaggctttttaaacgtttcatctaccgcttcagccgtcgttaattctgtataaccagcagctgtaatttctttacgggcttgacgaacaacgtcgttcataaacaagttaaaatcgatattcattttcatacctcccttttgctatctattctttatcatagcaaacgaaaactaaaaaggcgattgctttgactcattttttcttggtaatcaagattaaacaagaaaagaaatggtgatactatttttacagctagaaaaccatactcttaactccctagtgtagaaggatccgcataaaatgcaggatccttttttatatttccttcatcgcctgctggtaggttttaatcaagcgttcgagagcttcagccattgtgacatctcccgtcatcatttgtttttcaacatcccctaatgtttgcttaactaaaggatgttcataaaatgattcttgtaaatattcattaacacttgcttgtaaccatgccttcatttgcttttgccttactgtataaaacagatcatttttattcatccattccttatagtcacaaattatcttccacaagtcttgaaatgatgcttcttcataagcagaagttgtgatgacctgtgggttccaccctccagaatgaccgtgaaggaaactgatgacgctttcgtattcttttgcagtcacttctgcttttagccggttatccccgtctgctttgtttacacaaatcaaattaacccattcaagcagcccttttttaattccttgcaaatcatctcctgctccggttaaagcaagcagaacaaagaagtctaccatctcttttacaatcatttcaccttggccaacacccatcgtttcgacaaatatgatgttatacccagccgcttcacaaagaaaaatggcttctctcgttttaagatgaacacctccaagcgttccttgagaaggtgaaggacggacaaaagcgttctcttgtttggtaagcagctccattctcgttttatctcctaaaatacttcctccagacaaggtactgcttggatcgactgccaaaactgcaacggaatggccatttttgcataggtacgacccaaatttgtcaatcagcgtactttttcctgctccaggtacgcctgtaaaaccaatgcgcactgaatgccccgtatgaggatagatttctttaatcagctgttgtgctatttctttatgcttcggcgctttactttcaattaaagtaatggcttgagctaacgctgttcttttcccttcaagcagcccttgtttataatcttgtaccgtttttaatttcaccaattgtcttcaccaactattcttctaaccgtttctttatttcatataagacggaaacggccgcttttgggattactgttccaggtccaaagattgcagaagcgccgtgttctaaaagaaatgagtagtcttgtttaggaataacgcctccgacaataacaacgatatcgtcgcgctctaatttctttaactcatcaacaagctgcggcagtaacgttttatgcccggctgccaaagagcttatgccaatcacatgtacgtcgttttctacagcttgccttgctgtttcttgaggcgtttgaaataaaggaccaatatcaacatcaaatccaaggtcagcaaaggctgttgaaatgactttcgatcctctgtcatgaccgtcttgccccattttcgcgactaaaattcttgggcgtcttccttcttcctctaaaaattcagccgtgagctttcgaacttcttcgatttgatctcgatgcacaaactctgcactgtataccccgctgactgacttagaagtagcctggtgtcttccagccactttctcaatagcttctgaaatttcacctagtgtagctctagctctcgcagcttcaaccgcaaaagcaaggagattcccttcacctgttttggcacaattggtcagtcgattaagcgcttcgattacggcttgttcgttacgttcactgcgtattttctttaacttttccagctgcttcattcgaactgctgtgttatcaatatcaagaatatcaagcggttcttcttgctccggctgaaactgattcacacctacaataatttctgcctgcgagtctattcttgcttgtctgcgcgcagcggcttcttctatcttcattttaggtacgcctgcttctattgcttttgtcattccgccgagctgctctatttcttcaaggtgcttccacgcttttatcattaattcattcgttaatgattccacataataagagcctccccaaggatcaataacggaacaaatctccgtttcattttgtaaataaagctgcgtatttcgggcaattctagctgaaaaatcagttggaagagcaatcgcttcatccagtgcgtttgtatgaagcgactgcgtatgtcctgatactgcagccagagcttcgacgcatgttctaataacattattaaatggatcctgctccgttaagctccatccggacgtttgagaatgcgttctaagagctagagatttaggattatccggctcaaactgcttcattagttttgcccacagcagcctccctgctctcattttcgctacttccataaaatagttcattccaattgcccagaaaaaggatagcctcggagcaaatgcgtcaattgtaattcccgctttcaagccggttcgtacatattcaagtccatctgcaagcgtataagcaagctctaagtctgctggagcacctgcttcttgcatatgatagcctgatatactaatactgttaaatttcggcatgtactccgctgtatatttaaaaatatccgcaatgattcgcattgacatctcaggaggataaatatacgtattgcgcaccatatattcttttaaaatatcattttgaatcgttccagccagcttttctttttttacgtcttgttcttcagctgttacgatgtagaaagctaaaataggaagcaccgccccgttcattgtcatcgacacggacatttgatcaagcggaatcccttcaaacagctgcttcatatctatcattgaatcaattgccacacctgctttccctacatctccaacaactcttggatgatcagagtcatagccgcggtgggtagcgaggtcaaaagcaacagacagccctttctgtccagcagctaggtttcggcggtaaaaggcattgctttcctccgccgttgagtatcctgcatactgtctaatagtccaaggccgattcacatacatcgttgcatacggtcctctcacaaacggtgggacaccaggtgcaaagtgaataaagtcgaggctatctctgtctttttttgtatatactgattttaattcaatttgttcatttgtttgaaaagcagtaaatgaactttgagtcacgtcatcttccctttgctgctttgaaaatgataatggaatattagaaaaagaaggctttttatacatgaacttctacctccaaagcacataataacttcttaacgcattgaataacattcgtcttgggatgtatgacgctcattacacctttttgctgccactgcgttttgcgtgatacatgttcttcccctactacgtacacataaacggaatcttcctcaaaataagtcatcgcttttgttaagagcttttccacgagttcatcacttccacagatcacatatgcttcgtgcttttgttcattcatccaatctgctatctcgacataggaatctatgtttttaattgtttcacacgcaaagcctgcgctttcaaataaagaccgggcaatctcagcttttttacggctgctaggatcggtgagctccataatgccaatgctcatcccctttgtatacacccgtattttttcaaacttctctgctgctctccacttagtgagcggcacaacactgtcaggctgtgtctgcttcgccatttgttttagcatccatcctgctgttacccctttagatgctagctttgtatagtcctctagtgaaagatttgatgaaaattccgaagcgttctgatcactgtatttatccatttttatttcttcttttttaaacggcgtgctttttatctcttgagatacatcctgttgcttagaagcatagtgtgtgactccgatcaagcgctcaattcggcactctatatcctcttgtctttttactttcatttgttcaacttcatcttgaattcgcccttgttttaaagcttcttccattccgccgtggtcttcaacgttgccaaataactcccaagcttttgtcattaattcatgtgtataggcttcaacgtaccaagagcctccggcaggatccattacttttgatatatgtgtttcgtgctgcaaaattaagtgagtgttacgggcaaggcgatgagcgaactgagaagatgaaaatgtgacggaatcatatggttcaatatgcagactatccgctcctcctacaatagaagcaaatgcttgaaccgtgctccttaatgcatttgtatacatgtcttctttagactgtgtaagatgtgacgtttctgtatggataaacggcactgaaacggccgtgtcatcaaaagcacgaaccacatttgcccaaagcatgcgaaaagcacgaagttttgatatttccataaataaatgtgagctaactgaaaaagaaaaggtcatgtgaggtaaaacttgatgcaaggacaaaccgcgttttatgcattcatcaatatactgcacacctgtagcaagcatataagctagttcttgaacagcgtttgcaccgctgttatggtaaggaatgcttgatacaatgatcgttttgagctctggaacattactatgagccaaacgcgttgcgtaagctaaatgatcgtataaatctcgagtagaaagtggaactcttccatattcagcaagggtgccgagcggatccattccaaccgttccttttagctgtctcatattaaagttatgatcaacacagtatgcttttagaaacgaaagaagtggaacggatgtacatcccgtatttaaaaataaaggcaccgcttcaagagctacatgctgaaacaaatgagcaacatcctctaaagtagaaattgtagcgcctgaggctacttcagcttcagttgcttcatcgacgtctttcccttgcctcattgcttcactgcacgtaaaagcggccgtattttgtccatttctcaaactgtgtaaaagaagtttattgctttctttaatagaaggtaagtcgattttttgggtgatttcccattcccctagtatgtatgattctttaccggctcctcttaaacaatctattcccgccggactctgctgtaagtagtctaaatgtgccgtatcactttcgaaataaagcggtttcaaaaagatgttttctaacgtttcttttgaagagatcgcggtatttttgctaacttcctgtgcccaatcttctttaggtgtacgtgtaaattcatgaaatgataatgtatttgttttcatttccatgcccctttacagttaatagctgcctgctaaaccgagatgattacactttgaagtttgatgattcttcttttattttaatacatcttttacaaattgttcaatccttgcttcaaaataaaaagaggccgggacataattaacctacgtttaccatcatcataaaaaaatccgaacgagttggattctctttcaagaatctcaattcatcgttcggatcttccttcagctaaaatatttttgtgccagcttctgttttaatagacggacgtattctctttagaagtagattctaaaatctctttaactcttgccaagaatctgccgcacaccaagccgtctaacacgcggtgatccagtgataaacataagttaaccatatctcgaacagcaatcatgttatcaataataaccggacgttttacaatagattctacttgtaaaatagccgcttgcgggtaattaataatccccattgattgcacggaaccaaatgagcctgtgttgttaacagtaaacgttccgccctgcatgtcttcagacttcaatgaacccgtacgaactttttgcgcgagctctgtaatttcacgcgcaatgcctttgattgtcttttcatcggcttgtttaataaccggcacaaataaagcatcttctgttgcaacagcaatggatacattaatgtcttttttctgaacaatacggtctcctgcccacattgaattcatttgagggaattcttttaaagcttgagccactgcttttacgaagaacgcaaaatacgttaagttaaaaccttctttttgtttgaactccgtctttaatgcatcacgataagaaactaagttcgttacatcaacttcaaccattgtccatgcatgcggaatttcgtgcttgctgcgaagcatatttgctgcaatagctttacgcacgcctgtaacagggatttcttgatctcctgctgcagacacaaccggcgcaggctgctgcgtttttggagcagctgccgctacaggtgcttctggctgaactgttgatgcaggtgtttctttcacttcagcagctccgcctttttcaataacagctaaaatatcttttctcgtaatgcggccgcccgcccctgttcctgtcacggtatctaaattaatattatgctcttgtgacagacgcataacagctggagagtatcgacttttattggattgactgtccgctgtttttgacgctgattcttctacagtcttatcagacgttttctgttctttttgaggtacagttccttctacttcaattaaacaaatcacttctcctacaggcaaagtatcatcttcacctgcaattaactctttaattgttccactaaaagaagaaggcacttcagcatttactttatccgtcatgacttcagctaacgggtcgtacttatttacgtgatctccaacagaaacgagccatttgctaattgtaccttctgttacactttcaccgagctgaggcatcgtaattttttcaatagccaattgatacaactccttttaaaattgagctaattctctcattgctttttctactttatctggattcaccataaaatatttttccattgttggtgcatacggcatagctggaacatcagggccagcaaggcgctgaattggcgcatctaaatcgaataagcagtgttcagcaataatagctgctacttcgctcatgatgctgccttctttgttgtcttccgttaaaagcagtactttacctgttttagatgctgcttcaataatagcttctttatcaagcggatagaccgttcttaaatctaagatgtgtgctgaaataccgtctgcttccagtttttcagcagcttgaagagcaaagtgtacacaaagaccatatgtaataaccgtgatgtcgtctccttctctctttacatctgctttgccaatcggaagtacataatcatcttcagggacttctcctttaatcaaacggtacgcacgcttatgctcaaagaaaagaactggatcatcatcacgaatagctgcttttaataatccttttacgtcataaggcgtagaaggcatcacaatctttaaccctggcgtattggcaaatagtgcttcaacagattgagaatgataaagagcaccgtgaactccgccgccgtaaggagctcgaattgtaattggacaactccaatcattgttagaacgatagcgaattttcgctgcttctgacacaatttgattgactgcaggcataataaaatcagcaaattgcatttcagcaatcggacgcatgccgtacattgccgctccgattcctacccctgcaatagcagactctgcaagaggtgtgtcaatgactctttcttccccgaactgttcgtacagtccgttggttgctttaaatacgccgccttttttccctacgtcttctcctaatacaaacacgcgggaatctctttccatttcttcacgaatggccattgttactgcatcaatatatgaaataaccggcatatgttctcctccttactcaccgtacacgtattttaaagccgattccgcttctgcataaggagcgttttcagcataatctgttgcatcattaacgatgttcataatatcatcaagcatttgtttttctcgttcatcggttaacacgttaacctcttttaaataagtcgcaaagtacgcaaccggatcgctctttttagcttcagacaattcttctgctccgcgatatgcacgatcatcgtcatcacttgaatgggcagtcaatcgctctgaaacagtttcaataagagtaggcccttctcctctggatgcacgatctcttgcttcttttaccactcggtatacttcaaggacatcgtttccatcaattgtgtagcctggcataccatatccaattgcacggtcagatacttttgcgcatcctagctgcttttcaaccggaacagaaatcgcatacttgttattttcacacataaagataacaggaagcttatgaacacctgcaaagttcgcgccttcgtggaaatctccttggttagaagatccttctccaaacgtcacaaacgttactaagtcttttttctccaatcgtcctgctaaagcgattcctactgcatgaggcacctgtgttgtaactggagaagatcctgttacaattcgcttttccttatggccaaagtgacctggcatttgacgacctcctgagtttggatcttctgctttagcaaacccagaaagcattaaatcgcgcgccgtcattccaaatgctagcacaacacccagatcgcggtaataaggtaatatgtaatcattctctctatttaaggcaaaagctgcgccaacttgagcggcttcctgaccttgacatgaaattacaaaaggcaccttccctgcacgatttaatagccacatacgctcatcaatttttcgtgcaagcagcatagtgcggtacatttcaagtacttgttcatcagttaatcctaatgattcatgacgtttttttgtcatgtttaaacctcctttaatcatcaaaaatgaatcgcttttccatctacagctaatgaagcttctcccatcgcttctgaaaggctagggtgaggatgaatggtatgagcaatttcccatggtgtagcatccaatacctttgcaagacccgcttcagagatcatatccgtcacgtgaggtccaatcatatgcacaccaagaacatcatttgtgtcggcatcagcaataattttaacaaatccctctgcttctccatatacaagagcttttccaacggccttaaacggaaattttccaaccttcagctgaaacccttgctgttttgcttcttgttctgttaatcctacacttgctgcctccgggctgctgtatacgcatttagagattgttgtataatcaatcttcaaaggcttttcaccatgtaaatgctcaacagctacaattccttcgtgagaagctacatgtgcaagctgcagtccgccaatcacatctccaattgcgtagatatgagattctttcgtttgataaaaatcattcgtggcaatcacaccgttttctactacaatatcggtattctcgagaccaattccttcgacattcgcttgacgccctacagatacaagcagcttttctgcttcatattcttgcatatcgtctcctacttgagcggaaattttcacctgaccatcaatagacagtgtatcggccattactttagcagaagtaataatggtaactccttttgcttttaaaagcttcgtcatttcacgggagatatcttgatcttctgttggtaaaattcgatcgctgtattccacaaccgttacatcaacatcaaaatctgtgagcattgacgcccattcaattccaatgacgccgcctcccacaataataatagaagcaggaagtgtttccatctttaatgcttcatctgaagtgattactttctctccgtcaatcgttaaaccaggtaatgttctaggacgagacccggttgcgacaattacattctttggaataagcatttcgttttcttcaccgctttttaattcgacggagatagttcctggcataggagaaaaaatagagggtcctaaaatacgtccaattccttcatatacgtcaattttaccttttttcattagctgtttaacaccattatgtaactgtgaaacaatttctgactttcgttcttgtacacgtgcatagttcaatagtacattggacgtttctacgccaaattcactgcttttcttagccgtttggtagacttctgcacttcttagtaaagctttgcttgggatacaccctgcgtgcaggcatgtgccgcctaacttatttttttccacaaccgctaccgatagacctaactgagaggcacgaatagctgctacgtaccctccggttccaccgccgagaatgaccaaatcatattcttttgccacactgcttcacacctttctgcaaacgctattaagcgcctttatattccttcacttcttcttcacctgtaagcactcggagagccccttcagctagcgcttgaagctcattttctccaggataaacaatgacatctgcaatccactttacatgattaataatcagctcaacaaacgcttttgaataagcaatgcctcctgttaaaataatggcatctacttttccatgcaatactgtactggcagctccaatttccttcgaaatttgataagccattgcttcgtaaataagcttagctttttcgtttccatttttcactagcgattcgactttctgcacatcagatgtgcccaaataaccgacaagcccgccttttcctacaagcattttcataatctcctcgcggtaatactgacctgaaaagcaaagacgaactaattcaccaaccggtacaccgccagcgcgctctggactaaaaggaccgtcgccgtgcaggccattgttcacatcaattacttttccccgttgatgaaccccaactgtaatgcctccacccatatgggtaacaataacattcatttgttcatatgtgctattcatttctttagccacttttcgagcaaccgatttttgattcagcgcgtgaaagatgcttttcctttccataaaaggagttcctgagatacgagcgatgtcacttagctcatctaccaccactggatcaacaatgtacgctggaatatttaatccagacgcaatctcaaacgctaaaatcccgcctaaatttgaagcatgatggccggcataaccgtcttttaaatctttgagcatggcttgatttacttcgtatgtgccgccttcaatcgggcgtaaaagccctcctcttccacatactgcacttaatttagataaattaatcccttcttcatcaagtgcctctaaaatcgagtttttacggaactcatactgtgcatatatcgtctcaaactgattcatttgctgtgaatcgtagcggattgttcgatcaaaaattggtttatcgttgtgaaacacgccaatttttgtggacgttgaacccggatttattatcagcattcgatattcgtgcatatccaacacatgtcctcctaccttatcattctcataaacgaaggctaggtcgaaaggatttcatttattccttttgcctagccttcagctcaaacattagcgcgtatgacgtctacttaaaatatgctgtccattttgtaaaaattgactgcgtgaacgacgcagcttttcaattctttcttcagctaagcgatctgctgctagataggttggaatgccatctcgctttgagatttcaactaccttttcaatattatcataaataccttcaacttttttcagcgcacgctcacggttatatccaactagctcatcagctacgttaataacgcctcctgcgttaataacatagtccggtgcatatacaatgcctaattcatgaattaaatcaccatgacgcgtttctttcaattgattattagctgcccctgcaataacttttgcttttatttgagggatcgtttcatcgttaatcgttgctccgagtgcacaaggagcatagatatcacattctacaccataaatatcattcgggtctactgcttgcgcaccaaattcttctaccgcacgctgaacagcttctttattaatatccgttacaataagtttcgctccttcttcgtgaaggtggcggcataaattatacgctacgtttcctacaccttggacagctactactttgccttcaagcatatctgttccaaatgcttcttttgctgctgctttaattcctcggtatacgccgtaggctgtgactggtgatggattgcctgatgaaccaaaagcaggagatacacccgttacataatccgtttcctcatatacaatatccatatcctctaccgttgtgcccacatcttctgctgtaatatatcgaccatttaacccttgaataaagcgaccaaatgcacggaacatcgcttcatttttgtctttgcgaggatctccgataatgaccgttttccctcctcctaaattcaagcctgctgctgcatttttataagtcattccgcgtgatagacgaagcgcatcttcaattgcagcctcttctgattcatatgtccacattctcgtaccgcctagagctggtccaattgttgtatcgtgaatggcaataatggcttttaagcctgaatctttatcttggcaaaataataactgctcgtaatcgtatgtttccatatagtcaaaaattttcattgttagtgcctcctaagaattctgttgagcgacgctgatagcaagcgccagtgagtataatttactttctgatgaatctgctctggatgttaagacgaccggagcttttgctcctgctagaatagctccaacttttgctttagcaaaataaatgagggatttatataagacgttccctgtttcaattgctggaacgagtaatatatctgcttgaccggcaacttcactttgaatgcctttttgcttggctgcttctatgttaatggcattgtcgagtgctaaaggtccatcaataacgcagcctttaatttgtcctctgcggttcatctgtgtaagaagtgcagcctctactgttgcaggcatcaaagggttcacaacttcaaccgctgcaataggagctacctttggcatctctatcccaatcgagtgggcaacgttcaccgcattttgaatgatttgaactttctcttctagagatggcgtaatattcatagctgcatctgttacaagaatcggccgttcgtagtgaggaacgtcaaacacagctacgtgtgataaaacatttcccgtacgcaaaccatgctctttatttaacacagcttttagaataagcgatgtggataaattccctttcattacgatatgagcttgaccttgctgaactgaacgcacagccaattgagccgcttctaaaacggactccgtatgtacgaccgtcacagccttatgagtgagtaaggatgggcggtactgcctgaataattcattaattgtcatttcgttgccaaacaaaataaattcagaaacttcccttgacacagcttcatacactgcctcaattgtttctaagtcttcggctgcagcaacagcaacagtcagagaagactgcttagcaacccgagataagatggtagcaagagtcatggaatgttcgacctctcctttttcattctttcttttgctccgttttaaagagcatactgcgcgtttatgcagtcacctaaaatacatgcaagatttgtgccatcctctgcatatattacataatatagctgcttatatccgttcttacgcacaaaaaaatttttttattgattctaatgacaaatagaaaaaaagaatacctctctatttatatgcaataaattgcacaccatgcattttattgcatgctgttatttgcaagattgtatttttccaacttataatacaaagaacgcagggaaatattgagctgttttgctgttttcgttcggttatactcgtttgcaagcagcactttttgaataagttccgcttcgtaattttccatcatgtgcgctaaagtcttcccttcgaacactacctcttcattcacctgatttttttcttttttgcccttgccttcaagtgaagggagatgaatagaatcaatcattgtttctgtatagtgcatataaataatggctctgcctaatatgttttcaagctctctgacgtttcctggccagtcgtatgatctcaatgattgtaaagcccgctccgttactccttcaacatgccggccgtaatcttgattaatttttgtaattaagtgtgtaacaagcgcaccaatatcctcttttctcttccgaagaggaggtatgtgaatcggaattttgtttagtcgataatacaagtcctgtctgatgcttccatcagccattcctttttctaaattcacattcgtagctgcaataacgcgaacattcaccggaataggagtcgttcctccaacgcgaataagctctttttcttgaagcacccgaagcagcttagcctgcatatgagctgaaagctccccgatttcatctaaaaagatgctaccgttattggcttcttcaaaaacgccacgtttcccgcctcgtttcgccccggaaaaagctccttcttcatacccaaaaagttcgctttcaagcaaagactcagaaagcgcagcacagttaatccggacgaatttattaaactttcggctgctcgcattatgaatcgcatgtgcaaacagctctttgcccgtcccagattcacctctaagcaaaacagtagctggtgttttagcagcaagtctagcctgctcaattgctaactgaaactcttcagattgaccaatgatatcagcaaatgaatatttcgcttcaagcgttcgaataatttgacgcgctcttttgagttcatttgtaagctcttgaatttcagacatatcatgaataacgccaacgcttccttttaatttcccgtcgacaataacgggtgcaacattgacaactacgtctcttttactcggaccgagcctcattcttacacctcgaacaggacgccttgtttgcagcaccttcatgtgcatactgtctccttcagagatatcggcagtcgcgggctgaccaataatatccgtcttttttaaacccgtaattctcgtataagcaggattaattaaaatccctcttccttcttcatcgacaactgaaatagcttcttcagaagattgaataatagcttgaagcatagtttgtacttcttttaagttcgtaacttcttccgccaatccgacaacgtccgtaatatctttaaaaatcgaaaaagccccaaacagctctccattctcgtcgagtattggtattctagtcgtaattaccttgcgtccgctatctaaaacaaattcactattttgatcaatcgtttttgtatgaagaacgtcaacaagtttactatttggaataacttcatgaagatgcttaccaattacatctctgtgtgaaaagttcgtcaaacgctcggcgctttgattaaatagcgtaatatatccattcctatcaattacgaccatcgcatcatgagccgcgttaaaaataagatcatatttatacgattcttgctttaaccgctgaattaactcttctttttcctccatcagattggccataatttcagcaaccaatcccggcactaccagtgcatcagcgggtttgcttctctgcaattgttgaaaaacaccttgtttacctgttgtttcaacaatgacgtcgagctgcttagtcatataaggctcccaattcattccggttgaaatatcttgttcttgtgcatgcaaaacagccggcgcattaactcgtacgtctattacaccaatcactttcataaattcggtttccaacaagattttcagaatagctaatccgccttttcctcctccaacgatcaacacattttgcatattttttcaccttttctacttaatatgtacatatcccgtgcaaaatattgcatatacctatcatataaaaaaagaaacgctcttgacaatttatttagttcttttatgattcaagtataacggtttcacaatgtaaacgcattcattttaaaaaagagaagcgaaaggagcagttatggttcgaattatcgcactgctaatcttacttattcctggtatactcgctggctatggcattaaacttatgagagatatgatttttggcatcctgcaatccccgttcccttctttatttttgcaattttcagtcggtcttctattatttttaatcggccttggatttgttgctggctttattctgcacagagaccgcaagcgaaacaaagttcaaaacagatttcaaaaagataaaaaaacatcgcattaatgcgatgtttttttacgaaaagcgccctccaaattgcttcaccattttttctggataatcggtaataacggattcacatccatatttccgaagctgctcagctacttttacatcatttactgtgtaaggtcgcactgggatttgacaatcttttgaagcggctacatttacttcattaacggtacgctgattagggtgaagagcttttgcgccaagatgctgtgcatatacccaaggctcatacatcggataagagtataaaatagctgtttcaatcatagaatccagggaactaattcgggctaagctgttatgattaaaagatgaaatcatcgttcggtccttcatcttgtataaataaattaaatccaagactttcatttccaagtatggatagtcaaatatattgtttttcaactcaatatttacgctaattccttcacttgaagcccactccattacttcatttaacgtggggattttacatactccatacttttttttgaacttatagctcgcatctaatttttgtaaatcttgatacgtaaaatcttttacatacccttttccattcgtcgttcgatctactttttcatcatgaattacagcaagttctccatcctttgtcatatgcacatcaagttcaattccgtgtgctccaactctcgctgcttctttgaaggaaatcatcgtattttcaggaaacgttccagctgcgccgcgatgacctattacaaacatacttgctcaactcctctattatcacttattattaactttagcattacttaatagtgaaagcacgaatttactgtttatactttttcactttcattactttatatgcaaaaggaggtcgttgtgtatgagaccactgcaaatttcaccggatacagccgtaaaattagcggaacaattgaatatccccctcgagcaattaatgcatatgcctcagcatattttactgcagaaacttgccgaattaaatgcgggcgaagataaaaaaggatctgaataacagatcctttttt

SEQ ID NO: 4 - DNA, 238593 bp, Priestia aryabhattai
  source 1..238593: mol_type = genomic DNA
ttgaaataacgtccgttggaatttcaaactcaatgtttcccatatatcctggggcgactttgtatttatcaaatacaattctaagcttgtgatcttttgtaatataaaagctttgattttcagcaatctctttaaaaggatccatatcttcttcagtcagccagtaaattttgccttcttcatgcttcatttgatctttcatttgctgtttaatattttcactaatgacctttatatagcttttgtctttgaacaaacttggaagcgtaacgagcacttcgtgttttttatcaatcgtatcgtactgattgacgctcgacgttgaagctctcgattcttccacatatcgatgaaccacaagcaaatcatcggtatccgtcataatatcatagccgctgctgacagccacgtttcctttctctcctttttgtaagtttttcatctcttttttaaactgttcatacagctgctcattttcttttatatacttttcattcaagcttgtttgaagacctttgttttccaggcctgaaatcgacggtgttttcacgtcaatacgagaatgcttttcttcttgcttcagttcatcaaatgtgatcacttctactacttttccaagcacgggaattttcgccattgcatttgccgcatctggactcacattcaccgttgtgataaaaatcaccgctgctgccgcaatcgcgctcggccaaatataggatttctttttacgaggatgtgaactaagtgcctgtgcaacaacatcatctaattcgtctggaataggaatgtcatgatactgcttctttaacttttctattttttcattcattgttctaagtcctcctccgtcatcgtaatccgcaacaggttcagccctctgtatagccttgtctttaccgtgtttacattttcctcaatgatttccgcaatttcgtccatttttaaatcttcgaaaaacctcagaataataatggttttatatttaaccggcagctgatccattgcttgctttaaatcgatatcttcatactgatcttcacgtccgctgctcaagtactcaagcgcttcatcatccataagcgttagacgtttatgcttacgcaggaaatcgattgctgttcgtacaacaattttataaagccagcttttaatcgattgaatatcgttgatactgtccattgaaatgagtgcttttttaatcgattcttgcacaatatcaagcgcatcttcttgatttttcacatagctaaaagcaagccggtaaaaatccgctttatgctcggttacgcacgctacgagcacctgatgtgcatcatgttttttcatcgtctttcatacccttctattttctcttgcagaagtacatctataaggtagacggaatgagtagaaaaatagtttggtttttttaaaaaaagtaaaactaaatgatggtctcatgcgtctattaggtagatatatacaaaaaggggaatattactacatgaaaaccatgggctacaaacgtattttgacactgcttggatgctgtattttgtttcttggtacagcagggtatatcgtcaaagcaaacagtacagagaaaaaaacggcaagtattcaaacagatcaaacctatccaaacgttgaaattcaaacgctagttaaggaccttaccgacggaggctatgccattagctacccttcctttggtaaaaaagaaatcgatcaatccattcaagcttacgtaacagatcaagtggcacactatgaaaaaaagctgaagaagcagtcaaaaaagaaaaaatctgaattaacgattacatataaaatcgtccattacagcaagcaaacgctaagcgttgtctttgatgaatatgaatctgtaaatggagagaaaggaacgtcttctctcaaaacctttacctttgatctgcctgctcaaaaacaaatgacgttaaagaatttatttaaagaaaatgcaaactatttagatcgcctttcggctatttcatatgctgaattaaaaaaacaaatgaaaacagctgattttgacccggaccttcaaaaaggaactcgggcagctaatcaaaatttcagtcagtttgcgctgcttgaaaacagtattgtgatctattttgagccttatcagctaggtgctgaacaaacgaaaaccaaaacaatcgctatccaaaaagatttatttaaagacatgctgagcgatgcttacaaagacgaagcagcaaatacaaataaagtcaaagaaacgcctccaaaacatatcgttaacgaaatgccgcagcaaggagcgcctattgatccaactaaaaaagtcgttgcgatgacctttgatgatggacctaacccttcatctaccaatgtgattttagatggattaaaagaagtgaacgggcacgctaccttttttgtgttaggaagccgcgttcaatattatcctgaaacaatcgaacgtatggtcaaggaaggaaacgaagtgggaaatcactcttgggatcatcctcagctcacacgtttgaacgaagcgcaggtcaaacaccaaataggcgatacccaagcgctcattaaacaagtgagcggctatgaaccactgcatgtacgccctccttatggagccgtcaacgcaaatgtaagacgttatatcggaaatgttggcgtgactctatgggatatcgatcccgaagactggaaatatagaaacgttcctcactccgttcaagcagttatgagccaagtcggagacggaaaagttattttaatgcatgatatttaccaaacaagtgccgaagcagcggttgaaattatgaagcagcttcatgcacaagggtatcagcttgttacgatttcacagctagaacaagtaaaaaaagagcgggagcagctgcatttgcggtagcggatagcagacgaatgcgctgcagccattaggatggctgcagcgcgtttgttttttttatgcgatgtttaataaatgctatacagagcagcgtaaacggaatcactacgtgaaaagggataaaaagcaacgccggcataatcgttagcccttcttttaaatgctcttgaaaattacttgcaatcgtcaaagaaaaagataaaatcaccgtgcccacaggatatgtcatcgcagaaggtcgtttcaccttaaacagtatggaaagtccaacaatcacagcgtaaaaaaagacgctgattttaacaaatcctccgattactaatgcaatcataaaaaacaagtccagccattctagctattacttcaagtcttttgtgcaccgtataaataattaacagcatcagcatcacatttattacaaataaaggactgtcgcttgttcctctgacgacgaagcttccgtttcctttttattgtctttgctttttttgtttttaaataaagaaggcacgtttaaaaacatctttcttttctttttttagctttttccaaataaatgctttgtatgcaatttttgatagagcaatcaaagcgtaagacaaaaaaaataacaaaaactatcggtagaatgtttttaagaaaaaaaaaaaacggagagtgagacgtatgaaaatcgtttggatatcagctttgctgttaggatgcttaatgggattttctatcggagtggatatgatgcaaggaattagtttttccatggccttgcaaaatgcctacagtccgtttcgtgttatggagttcgctgaactatttgtcctttttttccttttgttctgttttgtagctgaagtattttatcgttcatttaaagtgaaaaaagcaaaacagcgacaaaaataaaactccgtaaaaaacacatatttctcctttttaccacctattctccttctcatttaaatgttataattttcataattggaaaatcttttacacgcctttctacatagaaagctgtacgcttaaactacaaaataaacattgactttgaactaaaaggtgaagatatgatgaaaaaaaaattagccgttattagtacagcttgcttacttattcttgcaagtgaccccatcccttcttatgctactcctgattccccggattcctcttccgacgttttggaccagtcaacagacgtggatacaactgaagatttaaaagctatttttggctctctctatcaagaaggctattcgcttggagaagaagatggatacgcagagaaaaaatttgaacagtttaatcaaacaacaggactggacaaatcttctgaagaattcacgtggtttatgatggggtatacggtaggatataaaaaaggacagcagcaaaaagaagaagaactcaagactgaacaagaaaatgaaatggctgccggcgaagaggaaggctatcagcaaggcgtccttgattacaaacatgctactgttcagtcagaattcgaatcctttccttctaagtcatccgactggaataaagggtatgttcaaggctacaaaaaagctatttctttaatggacttatctgttaaagcaaaaaaagaaggccatgaccaaggtcttgaaaatgattcaatgagtgttccgagcatgtatgatgatgaggatgtcacacgtcaggcttttacagaaggctttgaaaccgctcaagccgaagtgctgaagcagcaaaaaaagcagtttgaaaagcagggctacgtacaaggttatcacgacctttcattagaagtacctgcagaagcagaaggcgaattgcaaacagcctttgagcaaggatatgaaaaaggacagaaacaaaagcaaaaagacgtaaaagcagacggatacgactcagccttcacttatcagacctatagagcgcctaaaaatcttcaggataagcctcaactagaaaaatggtacaaagcaggtttttattcgaataaagacgtgaaatctttacagcaaaaagcttataaagacggctggaaactcggaaaagaaatgagcgttccgaaaaaatacaagcaaaataaagctgcggtggcgatgtacaagaaatattttgaacaaggccaaaaaaagcaggataaaacagtgagtcatatcctgctcggcagcggtattgttcttacactggttgcccttatcacgctatggagacttcgccgccgtaaaaatgaagagacagcactagatagctaaagacgagtacataaaaaacccggaaaatcacgattttccgggtttttatgttaaataatcattcgtttattttccgcaagctgaacttcttgctcttgttttgactgattttgttttcgaattttcaaataataataaccatagcaacctataaagaaaatacctccgcagtataaagccattcgctgctcgggatcaaacgcaagactgatcataacgatacagttcgtaataagcgctacgataggaagaaccggataaagaggagttctaaatttcagatcttccacttttccacctttagccacgtaagcacgacgaaacgcaagcagtgaagctgtaatcgcaatccagccaatttgagcgccgagtccagcgagtgaaatcagccacacaaaaacggttttagctgccactacgcttgaaagcagcgaaaaacatgaaatcacaagcgtaattaatagtgcattaaatggaactcctcttttgttaacttttccaagagcaggacttgccattccttctcttgaaagagaataaagcatacgtgtagccgcgtaaaatccagagtttgcgactgaaagaagagctgttaaaatgataaagttcataatatccgccgcgtaaggtacacctacactgtctaacaccacgacaaacggactttctacgacgcctgctttttcacgaggaatcatgcttgctaggacaaacacggataagacgaaaaagaaaagcgtacgccaaaccgtttgcttgatcgcttttggaattgttttttccggattttcactttctcctgccgcaattccaatcaattctgttccttgaaacgaaaagttcaccgtaatcattgtaatcagtaaagccgttacgccatttggaaacagcccttcagcaaagaagtttgatagaagcggtgcttcctgtccgcttttcatatcaatgagtccaaacattgccgctccacctacaacaataaacataataatggcgaaaattttaacgcttgaaaaccaaaattctgtttcaccaaatgctttagctgaaagtgcatttagtgaaaaaattaacgctccaaaaatggcgcaccataaccaaacgggcgagtctgggaaccatctttgcattaattgtccggcagctaaaaactcaagtgccaccgttactgcccatcctagccagtacagccatccaatcgcaaaaccggttgcagggccgataaatttagtggagtacgtttgaaacgatcctgcaactggcatagcaacggataattctccaagacacagcatcgttagatacataatgatcccccctactaagtaggaaatcattgctcccatcggacctgcttcattgatggtataacctgaaccaaggaaaaaaccggtaccaatacatcctcctagtgatatcataaaaagatgccttgttttcatcgttctttttaattctcctggctgtccctgtggaatattcatcccttttcctccctttgctgcataaaaatgaaatcgctttcatttttttaggtttattttgtttttatagccgcttacttggtagctcttcatgactgaagtccattgatgccggatgattttcaaatggcgccagccccgtagcgaggatggcagccgcttaaacctgcatgaccgtttattggatcataacagattttcttctacacgatacctattataagtagctctttcttataaaagcttatcgccaaacaatgaactcattaacgcaaccgctacttctgcagttttgttatgctgatctaaaatggggttcacttctacaaattcagcggatgtcaccatgtctgcttccgctagcatttccattgctaaatgactttctcggtagctgatgccgccttttacaggtgtacctacgcctggtgcatcatccggatctaagccgtctaagtccagcgacaggtgcacgccgtctgtaccgcttaaataatcaatcgtttctttcatcacttgcgtcatacctaaacgatcaatttcatgcatggtatacactttaattcctttttctttaattaactctttttcaccatcatccaatgagcgtgcaccgataataactagattttcaggtttaattttcggggtataccctccaatatttaaaagtacaggatgtccaatacccaagctcaccgctaacggcatgccgtgaatattgcctgatggagatgtttcagctgtgtttaaatcaccatgagcatcataccaaataacgcctaaattttctgaacctttcgcgactcctgcaagcgttccgattgcaatgctgtggtctccgcctaatattaacggaaagcgttcttgctctctcacttcttcaactcttgcagcaagctgttcatttccgctggctacagccgctaagtttttcaaattcgtatttttatctacgtctgcccgctctttaatttctactttaatatcgccttcatcgtgtacggtatagccaagagcttctaagcgtgtattcatgcctgcatagcggatcgcgctcggccccatgtctacaccccttcttgtttgtccgtaatccatgggtacaccgataattgaaatgtcttttttcattttctatacctccgttgcattttattctgtgtgaagtaaacataggtagttatttaactatgtatttttttcattgatacagcccctcatctatttcttatgcaaaaatgatgccaactttgtttgtagcattctatcagtctttttatcacggattttcttacacatgccaaaaaaactgtcgatttctacaacttttcggcaaaccatgcaaacttttttgtcatttggtttaaaatcgccaattttatttgctttcataaaaaaagaggtggcgacataacaaaatccattcaatctaaagatgaacaaatgggataaaggagctagtatgaatcgctcgttacaccgctgttgatttccgtgtaaggcttcgctttccgcgggcggccggtgagcctcctcgtcgcatacgctcctgcggtccgcttttcccgcaggagtcttcgccttgctctctaatcaacagctagaagcaactacatagacgaaaactatggtcaccatagcaataaaaaaatccgaacgagtaggattctccatcaagaatctcaattcctcgttcggatcttcattcaactaaactacttttttcccagcctattttttaatttgtaataacgtctccgtcttcatcatcgcctgtatcgtcttcaccaggatctttttctaatgagaccactttcttttcttcatcccatttcactttgtagccaagggattttgctactttgataactgataaataagagtgatgatttggtttatacagctttaagtcactcgaatcaatgacgcctaagcctaacagcaggcgatcggactgaacgtaaggctttccatcaatcagcttcacttgcttatcagtaaatggataaacggcacggttgacttcaactgtaaactctccttttttctcttctttgattggttttggctgtttggatacatatttaattgcgtctactcctaataccgtgccttggcgcgtattatcagcgcctccgtacattttccccgtttcatagtcatagataaccgcttgaacgtttccaatatgctcaggcttttcttcaaacgcatgtcctttagccatcatttcaagaattgtatcttggctaaagtcaggttcccatcttacggttggatagccgcctgaataaatacgaggtgttaaaatcgctttttgaatcggcatcttatggtcaataacattcataattgtttctgctacagacgcaataatggttgggcctcccggtgaaccaattgccatgaacggctttccgtcttttaacagcatcgttggagacatgctgcttcgaggacgttttttaggctcaacctgattcacgcctcccggagtggcatcaaaatccgtcatttcattgttgagcataaatccgtagtcaggaaccataattcctgaaccaaaaacttgttcaatggtagtcgtgtaagaaaccatgtttccccatttgtctataacagagaaatgagtcgtttggccgattggattttcttcctttactgttgctttatttggattttcttttccttcatatttccaagggtctccttctttgacattaggcgttgctttgtttggattaattaatttacgacgttctttaatataatcttcatttaacagtccttttttcggcacttcgtaaaagtcttcatctgccatatacgccgcgcggtccgcgaaagctaagtgcatcgcttccgttaaatgctgcaaatactgaggcgtattggaacccattttttctacatcataaccttccattagctttaaaatctgctgcacggttaatccgccggagctaggaggagctgcactgaccacatcgtagcctcggtaagttgttttgaccggctcacgttcttttacaacgtaatttttcaaatcatccatggtcatgcttccatcgcgtttttgaacttctttaacaagcgcttttccaatttctcctttataaagagcgtctgatccttctttttgaataagctttaatgttttagcaagatccggctgaacaagcttatctccttcttttaacggtttgccattcggcacaaatacattaccggccgtttggtatctttcaagcttgtccacattttcatcaatgtactgagccatcgaccaatttactttgattccttgttctgcttgagtaatagctggtttaataacatctgataagtccattgttccataatctttaagggctgtttctactccttttagcgtaccaggaactccaactgcttttcctgttatgtgacgcttactgaaagggataacttttccttttgaatccaaaaacagcttaggcgtgacctcagctggtgccatttcacggctgtctagcatcgtaattttatctttctttttttcataaatcatcataaagccgccgccgccgatacctgacatcatcggttccacaacgtttagagataattgaatggcagctgccgcatccacagcgtttccgccttcagctaaaactttccttcccgcttcagcagccagcgggtgagatgccgctacaattccttgtgtagcaccccgtttcattgaatggtcgacacccggaacttcagcagcagctggtgtgacaactaaacttaaactaaataatacaataaccaacatcttcataaccttcatctgggtctcctccttcaaatacattatttcacatcgtctgaaacgatggatttcacaaagaataaattggtttattatgatattttttacatatgtgtataaataaaaagcaaagtaaatcagacctttgcttttttagttagtcgcatgtttaacttttctctattcatttacaattatctatattttctaacaatttatccataggctgatagtttcttactatttttggaattatgtagactgaacgctctaataatgtagaaaatctagcagttaagaagtcgttggacttacatgtacttcttaaaatttttataaatattcttattgttatataaaaagcaattctttatgaaaatcagcatatgtttcctaaaaaccaaaaataaaacaggacttttgattcaccgtcctgtttgcagcatgttttcgacttttttaatatccacgtgagtaggattgatttcccgggcataggcgatttgttctttcgctttttccatttcttttaattgaatataggttttggcgagttcgagcggcagcataaccccttcaaagccaagatcttgcgcccgctgcaaataagacagcgatttttcgtaattccctccaaacataagcggagtttcccggtattttattcctcgaacgaagtgcgccaagcttgaagatggatttaatgttaatgcctgatgaagagctcggtccatttctaaattcaataccattttttcaaaaataattgattcttcgatttgctttgctaaacaaaccgctaagtaacagtacaaatcagatgcttgaggttttttcttcatttcttgttgaatttcgcgtttgatctctttccacttaccctcttctagctgattcatgacgtattctacatgtattcccaccacttttccctccttttcctctttatcataaaggatttttgcacaaatgaaaaaagtaagtgttcttcatttttctcaaaagatcgttaccgttaaaaaataggcaaatttctcaatcacttaacccaattagtacatacgatatagagaattttattaaaggaggttacacatatgggcgcagaaggcggttttggtttttcatttatcgttgttttatttattctattagtaatcgtaggatgttcttgctactactaatttctagaggggatgaacatcattcatcctcttatttcaaaaaaaccatgctttcgcatggctacataccgattagatgaatgagtagaggaactcattgttcggcaatattgaagaaatttttggtttttacttccgcctagtatgccctttttgacgggggctatgcgcaaataaagttaacgtttaaaagcgaaggccagacgcacctacaataacaagtaaaacaaataacacaacgattaacgcaaaattttgttttcccacgtaacatccctcacttcctgttatctgcttttagtgtatgcaacagcttggcaaaatgtttaggacaggggtgtggatttttccaacgagaaaaaccttcaaatttcgccaaaaaaagtgaatcatatttttgtttctttcgttatatatagtaagtgatttttttactataaaaaaggggggcctttaatgcgccgacattccaaattacccattgttcttgtctttgccttctttttattcatcgcaactgttttgtgcgtaacctcttatatgtcctgaacgtataaataatataaaaaaatcgcctcatcgaaggcgatttttctaccctagcattatatcttcgtttggataacgaacggcctcacgcttttgcttagataatgaaaacgcaagcgttaatggccccacttttcctagaaacatgataaagataataatcacacgtccaaagtacgaaagttcaggagtggctcccatcgataaacctactgttccaaacgcagaaacaacttcaaacataatttttacaaacggcaggttttccgaaatatttaacagaaaaatggccccaaacacaaacataattgaaatcatcgtgatggctagtgccttaaacacgtgaagaggaagaagtcgtctctttaacagcacaatatcttcccggcttcgtaaaaatgcccatacggaaaaaacaattaccacaaacgttgttagtttaataccgcctcctgttgacgcacttcctgcaccaataaacattaataagaccattaaaaagaccgttgcgtcatgcaggtgagctaaatcaattgtattaaatccagcggttcttgtcgttaccgcttgaaaataagaagcccatactttgtctcctaatgataaatttccgagcgtatgcgaattgctgtactctaagaaaaaaataaaaagcatggcaatcacattaatcgcaaacgtgctgataatcataatttttgaatgcagcgttagttttctatacgattttttcacccacatatcagccagaacggtaaaccctaacccaccaataatgaacaaaaaagaaatcgttatattaataataggatctcctacatactgaactaagttgtcagacagtagtccaaacccagcgttattaaaagccgaaatcgaatgaaacaaactaaagaacagccccttcgaccatccaaattccggaacccagcgtattgctaaaaagataagtgcaacaaattcaattaaaaatgaaaagataaacagccttttaactagcaggacaactccgccgacgctcgtttgatttaatgcctgctgaacgagcatacgctctttaaatccaatttttttacctagcatcataaaaatcaacacggcaaatgacataatgccaagaccgcctatttgaattaacagcataatgatcgtttgacctatgacggtaaaacgtgtacccgtatctacgacggctaagccggtcactgtcatagcggaagtagatgtaaaaagggcgtctacccaccggattggctcagtagtagaaaaaggcatcatcaatagaagagcaccaataataattcctccgccaaaaatagagacaagcagctgcggaggggtgagtttaatgatttgttttttcatgagttaaactccttcttcttcaaaacggttcaaatcgcgattatttccgataacaatcagcatatctccttgttcaattatttcatgtgcggtaggcgaaataaccatttccccgtcttttcgctgaaagccgataatattgcagccgtacttggcacgaatgtttaaatcaaacagtgttttattatgaagtttcttagaggcgacaatttcgacaatactataatcctttgacagttcaatgtaatcaatgattttttctgacaccacgtgatgagcaatacgcttagcgatatcgcgctctggatgaataactttgtccgctcctattttttcgagcactttttgatgatacatattcactgcttttacccatacttgcttaacgcccatatcttttaaaagcatggttgcgagtacgcttgcttcgatatcatctccaaacgaaataagtgcatgatcaacattgcggatacctagcccctttaagctagcttcatcaatcgcgtttgcttgcacaacatatgtagctgagttgctaaatttatttactacctcctgattgcggtcaatagcgagcacatccacatcgagattagcaaactcttcaaccaaactgcctccaaaacgacctaatcccaatacagcaaactgttttttcataatgtatttattcctttcttcaactgctgtgtgttctcttagcttatactttttctaaaaaattacatctttttcttaaaaaaacgcaaaaaaacacaggaaggctcctgtgtttttccacactcttccccctcaaaacgcttgcgaagttagctgtcgggttcgggttttaagagtaaccctaccttttttaaggattcaccccggagcacaatatgtgcgtaaataatgggtcctccgctccgtaatggattaagcgatttttattcaaatgtctatgatctattttttagaataatcgattcgattcatgatacgtttcacttcacgaaagctatcttactcctgtggattttgtctgtcaagatatttttagggaagatctcacttgccctgcaagctgcaaaaatcatataaatctaaactgaaaatcattttgtgaaattgatcaaataaattaataacagccaaaagctctaacagctgcgtatcactgtaaaatttctttaattgattcatatcagcatccgtcaactcccttggacgcacccggtatacatcaataaatcgaaacagtaatcgatctttttcttctagctctttttctcttaacactttttgattaagcgtctcatcgcctacatatgacatgctcatacacgtctcacagccgttaacacctgctagataaagcctaattttttccttagtctctttttctactatatcgctgttctaaagcgtgtcgtaaagctcataatacaatctttttacatgcggaattaaattcaatgctttttcaaaatttgttccctcttcgtttgctaacaaaactcttgccatttttcactcactcctttttaattattatagtaagaaaaatggaaattttagattacatataaaacatcttatctactattattaatcaaatgaaacgttaataagaaagaaggttttcaattgaaaattgatgaaatcgatttatcgattttgcaggcgctgcagcaaaacagccgcctttccttacgagagctaggaaaacaaattaacctgtctcctccttcggtggcagagcgagtaaggcagctagagagctttggtgttataaaagggtatacgattgatattgattatgaaaagctgcatttgcccgtgtcgtgttttattgaagtaactatgaaaaacggcgagcacgagcgttttaaacgatttatttctcagtatccctacgctttattctgtgaacgcatcgccgggcaagcctgctttattacaaagcttcagcttcctcacctgcacgtactcgaacaatttattaacgaaattacaccttatgccaaaacgatttcacacatcgccctttctcacgtggagatggctcctgcattattgagtcatctaaaagatgaaaagtgattgaaacgtaacgaaagcggtccaatctaaaagcgaacaatgggatcaataagcccgtatgaatcacttttgacaccgctgttgatttccgtgccaggcttcacttttcgcgcaagagtcttcatcttgcccttcaatcaacagctagaagtctacgctcacctactaataaaaaagatccgaacgcgttcggatctccttcaacaaagacacttgtgtcacgatctcttttattcaagaacacaaaaaataaccctccaaagctggagggtatgaattttccgaataatgaaagttttacaacttcattttatcaggtgacgacatttctgtctacttaaaaatgtaaaagagctctctattaatagagagctcttttacctgcttgttttttgaaaacaatcaatctatataaaaggaaactacctaaggctgaaagtcacatgaaaccttggcagtttatcctggatataccggttgatatgattcaaaacaagttctttcatcatttcttctttgacttctgattccgtttttttatctttttgttttaaaataagaatataatagactttacccattttaatgggctcactactctccccgatgtgctgtttttttaaaacatctataaaagagggagatagacttgaaagctttagattatcagcattctctattttgctgactgtctggacatcagcatattttttttgaacgtcttgaagcgatgttcccttttgcagttcagccgcagcggcatcggcatcatgtaaagtggaaaaagccagctgtgtaaaagatacgcgcgttagttcgttttcaatacgtttatagtaagcagttagttcatcagacgtaatttgtttacggaaatattcttctaatttaaactgattcgttagctggttggttacatcactagaacgaatatttaacacttcataaccttgttttcttgtatcctcgtcatatgaacgtttaatttgcttccacatatcctcgacttgtttttgtactttatcgcttgtctttagatgcgaaattaagattttttgcataacaagctgccgcaataactctttgcggtagcttgtatcatttagcggagcatctggatttaagaacccttcaacggctaaaaaacggttgaattcagctcctgtcaccttgcctccctcatacgctgccagttctttggtagaagatagctgactaatttctacagaaggaaacatcgtgtttgaatgcttacctccgcagccggttaaaaatccgaacgctgttaatactgctagcagcagctttaacggtgttgaactcatccattgttatcctgctgttctgaaagcttcagagaaatagtttgtttttttccatttcgatacacgtctaattttaccgtgtctcctactttacgttttgtgtatagatattgacgtaaatcactggatgttttgacttcatttccatcgatggcaacaatcacgtcttttgattgtaaacctgcatcagaagcagaagagaatggttcaaccgtcgttacgacaactccttcagacgtatcgctggttaggcctagctggttttgttttgttgcagctgaaagctgacctacatcttgaagacctacccccatatatggacgcgttatttttccgtttttcatcagctgttcaatcgtcggctgcacttcatcacttggaagagcaaagccgatgccttctacattgtcttctgaaattttcatactgttgataccgactacttcaccggaagaattgatcaaggcaccgccgctgtttcctggattaatcgccgcatccgtttgaattgcatctacgttccaattttctgaaatagggacagagcgttttgctgcgctcacaataccttgtgtgaccgtacgagaaaattgttcaccaagaggatttccgattgcaagcaccgtttcacccgctactaaatccgatgatttcccgaacttcgccacttgttcaacatttttgtcagacatctcaagcaccgctaaatccgttagcgcatcagctcccacaatcttagctttttctttttgtccgtttgaaagtgacacttctacttcgcttgcgccgtcaataacgtggttattggtcacaacgtatgcttttccattttcttttttgaaaataacaccggaacccgttcctgcttcttgcgtttgggtatctccagaaaatggatttgtttgctgttgaatattgttcacgcctacaacagcagctgatactttatttacaactgaaacaagatctgactgattcacggttgtgcttactgttcgaggcgttgtgctcgttgttgttgcggtttgagtctgcgttgtttgattcgctgtttgcgtatcagctgaatccattaaccctagctgcggagcaccgtatagcacaattcctccccctagcactgctccggcgatagaagatgcaatcactggaaataagcgtcttcttggaggctgtgatgatgacgcaggctggtactgatcatagcgctgctggcggttttcatattcttcttttcgttcttgctctctttcataatcacgtggatccatgaaaaacactccttttaacgtagcaaattttatgttatctatactataaaataaaagtttggaataagtatcaaaacaatgtgtgaaattgtgaaaaatttctttataacagcaaacacgtagtataatagcgggtacatagacctttaaagaaacgcgcatatatggcgtaatatgctttatttaccttaattttcatatattcagaggaaggtgtcaaatttgagctttacactatatttagtagaggatgaacaaaatttaaacgaagttttaaccctttaccttcaaaaagaaggctgggacgttcgctcattttttaacggcaaggacgccaaagaaatgattgcaactcctccgcatctgtggattttagatattatgctgcctgacattgatgggtatcagctcattcgcgaaatcaagcagcaaacgccacatgtgcctgttattttcatctcagcccgagatgccgatattgaccgggttcttgggcttgaaatgggcagcgacgactatttatcaaagccttttttgcctcgtgaactagttattcgagcaaacaaactgctaaaccgcgtatatggttccaatcaaaagaaaaccgataccattacgctgactccttatgaaatcgatttacatacccgtacagtcagtgaaaatggaaagccgattgatttaacgtctaaagaatttgattttctcgtcactatctcaaaagaccttggacaggctttttcacgggagcagctgctgaatctcatttggggagaagattatttcggcacagaccgagtggtggatgatttagtaaggcgcgtgcgtaaaaaaatgccgcaagcacgaattgaaacgatttacggatacggataccggatgatgaaagcatgaaaaacaagtcgcttgcatttcaaatttggctcgtcatctccggtattttactgcttatttcaattttgctcgctattttattcccaaccacgctcaggcagttcttcacgaatgaaatttataccactattgaaaatgaacagcatattttaaaagaatacggactgccaagccgctcaggtgaatactactttagcaatgaagacagtgaaccaacacttggcaaccgaaccgtggatcatattttattgcctgaacatgcggatatctcttatttttcatcacgggtgttgcctcaagactttttgagaaaagcacaggaagatgcaatcagtcagcgaaaaatcgtcgctcgctatgaaaaagatcttggcaaccggacgcttttttatgtaattcgaaaagtaagcgtaaacggacagcctgcttttttgctttcattttcgtgggatacgtatcgcaacgcgctcacttctactctgtttaaacagctgcttcttgtaatttcaattgtatttctattcagctggcttccatctatttggctatcaagatatttaagcaagccccttgtatcgcttgaaaaagatgtgaaaaaaattgccgaacaaaattggcatgagcccgttacagtcaaccgttccgatgaaattggcaagctaggcgcctccatcgagcagatgcgcaaaaggctcgtatctaaagatgaagcacagcaaacgctgcttcaaaatatttcacacgatttaaaaacaccggttatggtgattcaaagctacgctcagtcgattcaagacggcatttatccaaaaggtgatttatctcaaacggtaaaagttattgaagatgaatccaaaaatcttgagaaaaaaatccgcgatttgctttacttaaccaagcttgactatatgtccactcatcagcttgcacaagatgactttgattttactgcactacttcatgaagtagtggatcgcttgcggtggaggcgccctgaaatacagtgggaatttgacaacgcaaacgcaacgattaaaggagacagagaactgtggacaaaagttcttgaaaatgtactcgacaatcagctgcgctatgccgagacgaaggtttcactctcacttgctaaacaccaaacaaacgttcaatgtacaatcagcaacgatggtccgccgattgatcaaagcgtgcttcaacacttgtttgaaccgtttaaaaaaggagcaaatggtgaattcggtatcggcttaagtatcgtaaagcgtattgttacaatgcacgatgcagccattacggctaaaaacacagacagcggcgtgacgttttcgcttaccattcctatataagctaaaaaagcaagggattcgaatcccttgcttttttatgaaaaaatcgatgtatacgcataaagagccggtgaacccccggagtggatgaataccacattctcatcttttttaaaataaccttttcgaattaaatcaatcagaccagccatcgcttttcctgtatacacaggatccaataaaatcccttccgtaccggccacaagtttgactgcttccaccatctcttctgttggaacagcatagcctggacctacgtattcatccatacacacaatctcttcttttttaaaaggtgttttactatgtaaatgatcataaagttcacttgtcagcttggcaactttcatttcttgttcttctttagcacgactgacattcactccaataaccgacacgtcactttgaaggccttgaaagcctgccactaatcctgcgtgcatacctccgctgccgcttgtgcaaaccacgtggctaagctttatttgctgctcatagctttgcataagcagctcttgtgcacaggcagcgtatccggttgcaccgataacattcgaacctcctactggaattaaatacggtttatgacctttttcaattagctctcgctctacttttttcatttcctctgtcaaatcagaaccttcagcaacaaaccgcatgtcatgagcgcctaataaatgataaagaaaatagtttcctgtcggctgatcgcttgctttattttcaccttcttccaatacgagcacgcatttcatttgttcttttacagccgcagcgagcgtcaaacgacagtgattggattgtatcgcaccacacgttacaagcacgtctgctccttgcacctttgcatcagctactaaatattcaagtttacgcgtcttatttcctccccctgtcagtccaagcatatcatcgcgcttcatataaattgaaggtccatttaactgctgagataaaaccgatagcttttctaaaggtgtaggggaatacgtatattttcttctagaaaattgagttaagttcatactctcatcctctctttcatatttgttctattttaccatatagaagcttttgaagagctttttacgaaagggctttctataacttgtatacataagaacaagtagtcaacatacattaaaccatataaatagtttaaaggagtgttttcaatgagtgaaaaagcagtactttgcagcgtctcacgagtagtcaaatcacagcacatttttccaaatgacctaaacaatcaccacaccctttttggggggaaaattgtcgctgacatggacatgacggcttctctttcagcagctaaacattcccgaaagtcgtgtgttacggcttccattgatcacgttgactttatcgaacccgtcaccgaagaagattttatttcatatgaagcattcgttgttgtcacaggaaaaagctccatgattatttttgttaaagtgattgccgaaaatttgttaacgggcattaagcgtattgcagctacttcttttctcacctttgttgcattagaaaacgggaaacctgctctcgttcctcaagtcattgctcaaactgacgaagaaaaaagtcttcaaaaagtggcccttgaacgaaaagagtccaaaaaaacgcaggttgagcacagcaaagcgattgcgagcattttatctaaatctttgcgtagtagtaattaagctcttcatctaaaaagcagctgtctgctttttagacgaagttttttagttttcacattgttatttaattcaatatgcgatatattggttttatgaaaaacaacattcaacctctcaaacgactttctttaagagaagaagtctatcaaacacttaaacacaatattgtcatgcttgaatttcagccggaacaaaagcttcaggataaagaactggctgagcaatttggagttagccgcactcctgttcgagaagcattaaaaagacttgaagatgaaggccttgtccgaacgacacctggctcttctacaaaagtggctccattaaaccttgaggaggcaaaacaatcttttattgtcgtcgcagctcttcatgcacttgctgctaagctggcttgtacttcgttacaagaagaagatatgggcgaactaatcaaacacaatcaatctctagaacatgcaatcaaaacaagaaatgtccttaaagcgatcgaagcggatgaagcatttcattccgtctttttaaaacgggcgaacaatatagagctagaacgtgttgtaaaacaaacaagcgccaaaattcagcgtctggaaatcgctcgtttttcttctcttgctagccttgcttccgttgatcagcacaaagaaatcataaacgcttgcggtcaaaaagatgccgcactgacatcgcagcttgtcgaaacgaactggctgacgctaggtgaagcgctgacaagtgaggaggaatccaagtgaagcctcttttattaggcattgctgcatcattcttttttgcttttacattcgttttaaatcgagcgatggatttatccggaggcagctgggcgtggagcgcgtcgctgcgctatttttttatggtacctctcttgctcgtactcgtttatttttggggtggtattaaacctgtggtggcagaaataaaagcccagccgcaaaaatggctgctttggagcacggttggatttggcttattttacgctcctctttgttttgcttcagcctacggtcccggctggcttattgcaggaacttggcaaatcacaattttatcggggtctctcctagctcctttgttttacaaggaaggaaagaagcgaggaggcattcctttcaagcagctaggtttttcgtttattattttaataggcgttgtgctcatgcagcttgagcatgcgactgaactgtcggccgctactgccttgctttgtaccattcccattttgattgcctcttttgcgtacccgcttggcaaccgtaaaatgatggaagtgtcgtcacttaatacgtttcagcgcgtgcttggaatgacgctttcaagcctgccgttttggattattctttctggctatgcctacgtgaccgctggactaccaaaaacaactcagatttatcaaagcagtttagttgctttactttcaggagtatgtgcaacagttttattttttgcagcaaccgaccttgttaaaaaagattctcaaaagttaggtgcagttgaagctacacaatcgatggaagttttatttgccctgctaggagaggtcttccttctatcaagtcctttgccatcgattctttcttgggttggaatgggagttatcatagcaggcatggtgcttcacagctaccaaacgagtcataaaaaagctataccgcaaaaagaattgacctactaatcaataacaaaaaagagcgtcttagtcggcgctctttttgtttatacaacagatcttctttctaaattgaagacattcacctgctcagcatcaaagcggcttagcaacgaatctactccgtactcaagtgcaaaagcacgttcattttctgaaatcggaacggcctgcaggaacgttacttttttatcagatagttcaatcgttgaaaaattatcccataaaaacggcggaatcagcaaaatgtgctgcatatgaaagctgtcatcaaggactgcaataacgtctttataaatagctcctgggaagatggacacatgagatttcatcatatggaaaatacagtttgctaaaatagcagaataaataccgaattcctcatgacaagccccaacgatttcaattcgaagcgggatccctccaactgtatagcctgtcggacattgatgtccaccgagcgttgcatacgcggttacgtcttgacgcggatgattttcacacgccacaacgtgaataccatgcttttttctttcatctgaataatcttcaattcgatccttttgaccaaatacatctattgctttatgtataattaattcttcatcttttgtaaaattactcataaaaaacctccttgcttgcgaccttaaaaagctccctactgtacagcatatactactgcactcacttacgatatagtttttagaaaatgtgatagaaatgttatcgtttcgtaacatactatgaaattgtatcaagaagcaaacaaaaaaccttaaccaattttttctttttccataaaaaatagagcctgcaccatggcagcctctattttttatgacattattatgaaataatttgtaattcttttgggtacttcgttaacgtttcgtatccatcttttgtaatgattacatcatcttcgatacgcacgcctccaagtcctggaatatagatacccggttcaattgtatataccatgccttcttgaagcacatcatcattgttgcggctcattgaaggaaactcatgcacgctaataccaagaccatgaccaagacgatgcaagaaatactctccataccctgcttctgtaataatattgcgtgctaccatgtccaagtcgccaatacgagtgccgggcttggaagcttcaagagctgcctgctcggcgcgctgtaccgtttcataaatttctttttgcttatcattaatagacttgtaagcgactgtacgcgtaatatctgaacagtatccgtctagcactacacctaaatcgaacagaaccatatctcctggttttaacgtgcgaagacctgggttcccgtgcgcttctcccgttttttcaccaaataaaaccatcgttgaaaacgacatctcacgaattccttttcgctttaactcgtattcaattttagccagaacatccatttccgtaacgccttcttttaaagcagctacgcctacttctacaccaaaatcagctaaggcagctgccttttgcagaatctcaacttcacgctcatctttaattaaacgcagctgatttaacttctcttctgctccgactagctcagcgtttggatataggctaagcagttcttcggctctcgcatacagcagctgctctttctctacagcaacctttttcacatctattacgtttcgtttatgtaaagcttctttaataagttcccaaggattttgatggtcttcatatccaatcacatcaaacttccagccggcttcttttgcttgtcccacttccattgatggacaaacaagcatcggctccgcttcgttaaacacaaataagccaagtaaacgctcatgcggatccgtatgaaatccagttaaataaaatacgttttcggttgacgaaataaaggctgcttctacattcttttcttccagccacgatacgactttttgtaaacgtgcttccattaaaaaaacccctttcattgtgcaatattactattataacatagttatttagcaatattgtacaatgaatagaggttaagacaaagccgcgtgaagagtagtaagctgctctttaatcgcttttcgctgaatacttactttcatcagccagccattttctccgtatctataaataaattcgtacgtacctttaggaaaatattcttttaccagcatgtcccggttttcaacaaatcccggatcgccaataaaataggtaccttcttcaagcggaagctcatgaacttttttttctagctgcttctcttcgtcttcgtcatcatctatcacaatgtgcagaccgccttcatcacgcacaacatcaaattcaccgttttgttcaagctcaagcaccggcaccacttgtccatttaccgttagcagctgcttcgttccttcaaggacctgggaccagtgatcatcgtataaagtagaagaataaaaaatatagccctgagatttatataataaaagcagctgttcaaaatgatttttcacttgttctttatcaaacagaataacaaaatgctttcgatagaaaaaacttgtaaaaggcagaatagacgattgattaagctctttaattatttcagcactatctttacctgaaataatagctccggtcaattcccccgcgccataaggtttccaatgacttaacgccgcttctggaatcagcacaaggttcgaagatgacacatatatactcattcgcttcactccttttttctacatttagacctatatttgactctccgcacacagagactttcctcttattccatttctaaaagacagaactttttccctaactatgatagattataacaaatatcctcgaaaaaaataacctttatttcctctttcttctatttgtacccttctcttattttagcgtcttcgcagatttactagtgaacgtacttgctaatctaattccttagtgttaattttattatgtcgttttataattttttgcataattggtttcaaacaaaaaagtattaatatttttgaatgcgatggtgagacatttggaagaacgtacagaacgtaaacaacataaaagaaaaaagcaaagaaaaaagaaacgctttagaaagctacttcttttctttctcattcttgtaatcgccgctggtgcgtatgtgtattatcaataccaacaagggttagcagaagcagacggagcttttgggaaagatggacaatttgattttaatggtgcaagtgccaatttagatagcatgaatgtgctgcttcttggaattgactctcgaggtgaagaacattcgcgtgccgatacaatcatgattgctcattatgacaaagacagcaatcagcctaaaattgtttctttgatgcgtgattcatatgtggatattcctggacatggaaaaaacaaattaaattcagcctatgcatttggcgggcccgaattaatgcgtaagacaattaaagaaaatttcggcgtagatgtaaactattatgccgttgttgattttaaaggtttttctaaagttgccgatacgatttcccctgagggaattacggttaccgtgccacacgaaatgtcatccggaattggcatgacgctaaaacctggaaaacaaactcttcacggagataaattattaggatacgtgcgattccgacacgatagccaaagtgatttcgggcgcgtgaagcgtcaacaagaagttatcggtaaattaatggatgaagctcttcaagtaaagacgctggcgaaagctcctaagctatggggcgtcattgatccatatgtggatacaaatattccgccaaaaacatttatcgtgataggaaaagatttcttagttgggaatcagccagatttaaaatctcttcgtttaccggtcgaaggttcctattcaaatgaacgagtatccggtattggtgctgttttaagcatcgaccttgaagaaaacaaacaagcgttacagtcatttttaaattaggaaaaggtgtccattagcggacacctttttttatactattcaaaaaaacttctgtttttcctccctatccttcaaaaaaatttgagcttcgacaaaaaatgaagccattttccagaaaacagctatttctttgaagttctattttttctactacatgcgtatatgaaaggagaaggacttcttttttatatttttgattcaaggagatgaacgtatgaaattatatggttttcaatctgaagaagagcgttcctttcttcattctacctataaagtaaacccattactttctcatactggagatgtcaaaatcagctttttatcttttcaagaaaatgattataccccccgtcaagaagctacgattccacagcttcttttagtcgttcacggggaaggctgggtagctggcgataacggactgaaaatttatatcaaacaaggtgaatccgcattttggagagccggggaatcttttgaagtcgggagtctaactgctatgacaggactactaattgaaggattagatatcgctcctcaaaagctgcttacttctttctcacgaacaaacgcaaattaaaaagccgctgtgacgcggctttttttattatcttagtaatcgagcgtagctttctgcactatcttgaacaactttgtcactcaggtcaccgcctgctccttgaaatagaaatggagtttggaacttcatacctgttaaatttgccatagcttgaaaaggaagaagcagatgattcattgggtagcggttgtatcccccttcttgataagcttccgcagggcctcctgtcgaagtagctacgacaaactcttttccctgaagtttagtacctttgcttccataagcccagccgtatgttaagacaacatcttgccactcttttaagagtgctggtgagctgtaccagtaaaatggaaattgaaaaacaatacgatcgaattgaacggctaactcctgctctttttctacatcaattttgaaatcgggatagtttgcgtataaatcatgaacgtacacattctcttctttttttattcgctctgcccacgctttattaatacgagaagatgctaagtttggatgcgctaaaataaccagtgttttcattttgatactctccttctgatgtctgtgcttgcttttttcttttctattttttacgcttgcctctcacggcttgttcagtcattctttccttttccttcaggaaatacgagttagtttacacttataaactaccagtattatcattctgcttcaataaaattgactttgcttttatcacctttaatttttttatgtacccaaaacggcagataaaggacaagaaagctaaaaatcatgattccttcaatccatactaaataccaaggatgaggtccaagaacatccagcaaggaagcgtgctctggctttttcatcatgtataaataattcgcatggagcgaacgattcatggcatagataaaacctccgtacagattaacaaatactacgcttatccacaaagaacgaaacgtcggctcatatctgcaaacagcaattagcatacagcaagcaagtaccacaccgccatgcgatacataaaactgcacatagcgaaactgggcatacgcatagcccccaaggtctggggtaatcatcgcttgaacagagctgctgattcctgcgaagtacacaaaataaaaaagaaacctgcttttggttatcagcataacagcagccagcagcacgactatatcactgagctgaagaggcaaggaagtttcagcagaccactgatgacatccaatttcccaagcctggtaggccgtttctgaagcaattagaacgagtgaaagcaaaacgaacacaaatctattttttcgcagctgctttcgacacaaaaaaataaatgctcctatgatcacgataatagctaaagttacaagatgttcaactgaaaaaagctgaaaggaatgttgtacaggatgacacgtaaaaaatgaattcataaaagcgcctcccttccatcagaaaacaaattcggtacctttagcttgttcataaggcatcattttcattaatgcttctctcgcattaaaaagagattgagacataacgaaatcacgccaatctaaagacgaacaaacggggtaaatgatcgagtatgaatcaactgctagaagcaactaaaatgaaaagatccgaatgattcatcattcggatcttctttgaactaacatactgttgtcctagcttttttcttcgttttcactctttaattaatccttttttcactaagaattgatgagcaacttcttcagccgtttttcctttcgcatttacttgatagttcatttcacgcatttcgtcatcactgattttaccgcccagtagatttaagatttttttcagttcagggtgctcttttagcgtatcttcacgaagcacaggcgctccttgatacggagggaagagctgctgatcgtcttttaagactttcaaaccatactgtttgatttcagggtccgttgcgtaagcatcaagcatgttaatatcgcctttttctacagcgcgatagcgaagcttcggctccatcgttttaatattcgggaaggtaaggccatattctttttgaatgcctacatagccgtcttcacgatctttaaactcaagcgtaaatcctgcttttactttatctgttgcatttgccaaatctgaaatagtggttagattattttctttggcaaattcctttgttacggtcaatgtgtacgtattattaaacttcattggatctaaatagacaaggccgaatttcttctgaaatccttcttttgcctgcttgtacacctctgtttcatctttgctgtccggctgttcctttaaatgcgtcacaatagctgtacccgtatattcagggtacaaatcaatttccttgttacgcagagcctcaaatacaaataccgttttcccaagcgacgaacgaagatttactttcatatcagtttgatcttcaattaattctttgtacatattaattaaaatatcttgttctgcaccaattttccctccgataacaaggtctggttttgttgcgctcatcgctgcaaacggagaaacaagaatgagtattaatacgatgatcataataaacgagcgttttttggacccttttttagctgagtgttcaatcgttcgcagaattccatcaaaaataagcgctaataatgctgctggaatggctcctaataaaatcaaactattatcacttcggtcaataccaagcaaaattaagcttccgagtccgcccgctccgataagagccacgattgtcgctgtaccaataatgagtaccattgctgtacgaattccggccataatgacaggaagtgctagaggaagttctactttgattaatcgtctccacgagttcatccccatggctttggatgcttcaattaaagatgggtccacttctttaattccggtatatgtatttcgtacaataggaagaagcgaatataaaaacagtgcaataaccgcgggaaaggttccaattccgacaagaggaatcagtaatcctaataaagcgagtgaaggaatggtttgcagtacggctgttaagccaatgatcggttcagcaatgcggtcatgcctcgttaagtacagtccgagcggcactgaaattaatacggcgataacaagggccagtactgaaatttgaatgtgttcaagaagagcttgaaacagtgcatctcctcgttgatctaataatgtgcttagtgcattcattacagcgttcctccttctttcgttttatcagaaagaaacgctaatagagttttgcgcgttacaacgccaatacgtttgctcccttttttcacggctattgcttcatgttcgtaaagggcgtccattgcctgctgaacagtggcggttgaagctaactcttcagtaggttctacgtctggctgttcactttctttgacaaacatatccaatgtctcaaataaagcattgccttgatttccaataaatgtttttacaaattcatttttaggcttttgaatgaattcctccggggttccaacttgaacaatttccccatctttcatcaggcagatacgatctccaagcgtcatcgcttcgctcatatcgtgcgtaacaaacacaaatgtttttttgattttttcttttaagctaataacatcttgctgaagctgttcgcggcttaacggatcgagggcactaaagggttcgtccattaaaataacggggggatcagctgcgagggcacgtgctacacctacacgttgctgctggccacctgagagctcagacggctttcggtttcgatactgctttgggtctagtcctaccaaggtaagcagttcatcaatacgcgttttgattttgtttttcttccaatgcttcatctcgggcacaatggctatattttcagcaatggtcatatgaggaaaaagagcaatctgctgcaggacataaccaatgttccagcgtagctcatgtatattgtggtccgatacgagcttatcttttatgtatagttctcctttggtaatatcatgaagacggttaatcatttttaaggtggttgttttcccacacccactcggaccaattaaaacgaaaaactctccttctttaatttctagattaatatttttcacggcggtcgtaccgtctggatattgctttgacacattcttaaacgtaatcaaattatcgttcacactccctgttgaaatttaaaccctagtttcgtgtacccaatacttagaggcaataaacattcttttaagaatatttctaaatatgattcataagacacagtataaaagatacacatgttttctcacagtctcctaataaggctatcaaactgttaaaattttcacaaggcggggaagaataattcagagaataattttaaagccaacacaaataaaaaaaccttctttcaacaagaaagaaggttttttagtatgctagcgacagggatcgaacctgcgacctcttgcttaccatgcaagtgctctacctactgagctacaccagcgtcttggaaaattatatcacgtttaaattcatttaggaagcgcttttttaaatttttttattggtatattctctaattttcgtcttctgaaattcgcactttctacaaagttccatattttatgttagaactccttacataaattgtgtgaattttctttttttatattacgcttagtaaaagagcttacaaaagaagggaagaaaatagatggaacaacaaccaaccatgaccaaatcaaaaacggcaactccctacccaagagactgcacgttcagcctggaagattggacgacgctcgctaagtattggtaccccgtcgcacgctgcagtgatgtaacagagaaaccaacgtccgtaaaactgctagatgtaaatctagttctataccgtaccacacacaaagtagtagcggctcgtgatttatgcgttcaccgaggcaccccgcttagcatgggctgggtggaagatgatgaaattgtttgtccttaccatggcttccgctatgcaacggacggcgcatgcacgtcgattccagctcaccctgatgccaacatttctccccgtctgtgtatggccgtctatccagttattgaacgatttggattagtgtggacttccctgacaggagaacaagataacctgccttacttcgatgcgtgggaggaccctgattttcagcaaattgtttgtccgagctttgatatcatgggttcggccggtcgtcaaatggaaggatttttagacgtagctcattttgcttgggttcacatggacacatttggtgatcgaaacaacgcctttgtgcctaaatataaagtaagcgatacagattatgggcttcatgtagaatatacgagcaccgtgagcaattattccaaagaacagcagcatttaaatccacctgattttaaatggcttcgggtctttgatgtttatccgccgtttacagctacgctaaaagtatacttcccagaaggcgcagagctgtggattatgaatgcagtctcccctatttcagcccgcgaaacacgtttattcgcaccaatcgctcgaaactttgacaaagattctcccgttgaaggtgtgtatgactttaaccttcgcgtctttgacgaagaccgtgaaatggttgaaaaccaaaaacctgaagacttgcctttagacctgcagatggaagcgcatattatggctgatcaaacgtccatcggctaccggaaattattaaagaaaatgggcttaagctttagatatacaagctaaaaagatccccgctgtctcagcggggatttctttttcatttagcaaactgctcgcgtcctgctttttcctttatcacttcatcttcacttgccggcgttgcgcgtttcataaacaatgaaagaattaaggcaaccaccactagtactactgagacggcaaacgcatcgttaatcccttgtaccattgcctgcatcccaatttgttctttcatttgagctgccccggctgcggttgcattcgctgctcctgctccgctcattgcatcttgagcaagctcttttgcatgcgtagctgtacggtttgacatcaccgttactaaaagagccgaaccaatagctcctgatacttgttgaagcgtattgttcatggcagtaccatgcggattaaagcgctgcggcagctgatttaatccgtttgtcataacaggcatcatcaccatagacattccgaacatgcgaagcgtgtaaagcgtaatgagcgttgtatacgtcgtatcaagctctaagttactgaagaaatacgtcgtaacggctgtaatcgttagacccgttacagccagtgcacgcgctccgaatttatcaaataattttccggtaatcggtgacatcacacccattagaagcgcacctggaagcattagtaatcctgaatgaagcggagaaatgcctcgtaccgtttgaacataaattggcattagcagcatggctgagaataatgccattgtgatcaccattgaaatcgttgatgataaagcaaacattggatatttaaaaatgcggaattcaagcataggtgttttaagcttgaactgacgcgtaataaataaaatcagagccacagctcctacgataatggtgccgtatacttccacagaatcccagcctttatcccctgctgagctaaatccgtatagaagtccaccaaatccaattgtagataacaaaagagataaaaaatccaaattgatttccactttttcttttttgtcttttaataggaagaaagcgcctattaatacaattgccgcgattggtgtaacaaggtggaacagcattctccactcatagtgttcaattagccaccctgataaggtaggaccaattgccggagcaaaaatcataactaaaccgaaaatccccatcgcagctccgcgtttttctaatggaaaacttgtgagcaatacgttcattaaaagcggcatcataatggctgcgcctgatgcttggataatacgagcggttaacaagaccgaaaatacgggcgaagcaccggcaagtattgttcctgctgtaaataaagtcatcgccgttaaaaataatcctctgacagaatagcgctgaattaaaaaagcggtagttggaatcataataccattcactaacatataaccagtagaaagccactggacggttgacgttgtcacatctaagtctttcatgatagacggcagcgccacgtttaataacgtttcattcaacaatgagataaaagcgcctattaacaaaatagcaattatgccatacggcggcttttccatttgatttattgattgactcattattgtacctccttatactttaagttcatttttttagacacatgttctacatagagtatattatactgtgagttcaatttatgcaagtcaaaaatcctgtgttaatcttctttatttactgagctttttttagccatataatccttttatatcaatacatatacatgatatcgcaattcactttaaaaagaacatttgtgtaaacgctttaaatcatgtatcataaagttggaccatgagtctaattttatatttaggtgataataatgaataatcgaaagcagcaagttgtaaaaaatgcacaccatctcttcgttgaaaaaggatttcaagctacatctattcaagacatcattgattatagcggcatttcaaaaggaacattctacaactatttttcttcaaaaaatgaattattaatcgctgttttcacctggcttcatacaacaatcgaacaagagcgaaatcagctgctggttggtaaaagcctgaccgatgtagatgtatttgttaaacagattgatgcacagatgaaaaaccatcataaacataaattttttacattacttgaagaagtatttgtttccaatgatcctgatttaaaagcatacataaaaaaaacccagtttatcgaagtaaactgggtttacaagcggttcattgatttatttgggcaagaaaagaaaccgtacctgctagattgtgcaattatgtttcttggcatgcttcatcgcaactttcactataattttatggttaacggcacaaatactgaccctcatgagatcataagctacagtgtcaagcgcctgcttcctcttgtagacgaagtagcaaattcaggagacattttgctcgatccgcaaacgattaaagaatggcttccgtcttgcccgaatactaaaaatcaaatagaacaggacatttcttcagcacttatcgatttaaaaaaacaagttcacaaacaatttactgatgaattcgaacgtcaaaaatgcacagagcttattagttttattgaagaagagctgtttaaacaatcaaatccccgcaaatatgttgtttatagtgctcttcattcgttaaagcagctgtctgttaacaacagtaaaaagacgctagaagaactgcaaacgatgattgatcagtatgtgagtgagcttcattaaaaagagactgagacgtaacgaaatcattccaatttaaagacgaataaatggaataaaggagttagtataagttacttgttacaccgctgttgatttccgtgcaagacttcgctttccgcgggcgcccggtgagcctcctcgtcgcgtacgctcctggggggtctcacctatcccgctcttcccccaggagtcttcgccttgcccttcaatcaacagctagaagcgactaaatagatgaaacctacatttaccctgccaatgaaaaaatccgaatgcgtttgattctccctcaagaatcaaacgcattcggatcttccttcaactaaataacttttgtcccggcctctttattcacaaagtggaaattgaagtgaaaagcacgtttcttttccttttatgctagacacactcacttttcccttcatataatgaataatgctgaaagataccatcgttccaagcccggtacctttttcttttgttgtaaaatacggttcgcctagccggttgatttgttcttgcgtcatgccgcagcccgtatcaataatatcaacgataatagctccgccttcttttcctactttaacggttaacgtgcctccattttgcatcgcttcaatactatttttaaataaattgattaggcattgctgaacctttcttctttctcccattacgaagaacttcaattcttcatcaaatgtaaaatcaatagcaactccattcatattggcaagaggcgtcataatatgggtgacatgatgaatctcttctgaaatattcattttttcatttcgttccggagcagaattggcaaacagcaagtaatcatcaatgatttcttttgcgcggtctagttcattaatcgcaatggaaatgtagcgttttttagcaggttctttttcatcttcttgcagcatttgcataaatcctctgcttgccgttagaggatttcgcacctcatgagagatgctggcggctaaatgactgacaatttctagtttttctgctttcatcaggcgctgcagcactaataaatttgcccgtatcgcttcccacagtatggtaattacaaacatgcccgctacatctaaaatcgcaaattgaacccacacgctaataggaatgcttgttacgtgcaagacaaaaatagatacaagcatagctaataaagaaccgattacactaagacaggtgctcacgataattcgattttttaatgagaaatgtaaaaagtattttgctataaaaaataaaggaatggataaaatcggaagagcaattagtgttgataaaaaccctacatcgtacccgccaattagcaagcgcagcagtaaaataaagacaaaaagcaagcttcctagcggccagcctccatataacgttcctaaaatataaggaattcttcgtagatccattcgatagtcatccgggacataagctccgttaaccggaaacaaaaggcaaaaggtaatagctaaaatcggaaataccgcgatataacgatctttccaccaatgaatttgtttagcatacttgattaaataaaacatctgcactaaaaacagcgccaataaaataaataaaaaattaattaacaaatctttcgtgacaaaactcatgcattcaccggtctttcaaatgagataaaaataaactcttttattgcatttacatttgtaacacaaatcagagcgtaatcatagataaataaacgtattctatttacttttttataacttcctatgactttatcgtcccttccctaaaatagtgaaggctaagaaaaccttttcaacttcactaaaaatactcagaattttatttacatatgagttacaatgctctataatcagatcaatgtacttggttttgagagtaggaggacgaaatatggaactatcaattaccttaatgggattattcgttggaacccttgtaggcttaacgggggttggaggtgccgctttattaacacctttactgattgtactcggcattaacccttccattgccgtaggaacagatcttgtctacaattctatcacaaaattattcggagtcgctcagcactacaaacagcgaaccattaactttaaattagcaaaatatttagccttcggaagtattccgagcgctgtgctggctattgtcacacttcatgcatttccatcttttcacgagcatcaagaaacgattattaagcacgctctcgggtacgtcatgacgctggttgccatttcaattatctttcgcgtcttttttgataaattaattcgcccaaatcggtttcaggaaatggacttaaatcagaaaaaaggattaacaatcggaattggcgtagtctttggattcattgtcggactaacatcgattggttcgggctcattatttgcgattgcgatgctgtacttatttaagctaaaaacatctgagctggttggaactgatattgcacatgcgtttcttctcgttacggtggctggtattttaaatgcaagctttggaagcgtggattacatgttgactgctaacctattgactggatctattccaggtgtgttactcggaagtcgtttatcaacgaaagtgccttcaagaccgcttcaagccatcatggcaaccatcattctaattagcggaattaaactaatttaacaaataaaagcacatgcctttgcatgtgctttttattagtttttttaaagatctacattaaaaataataatgttttaaaccactcccttcccttcttatacacttcaactaatatttttattgaattttagtcaaagagaccaatgacacttcaaacaaccttacgttaaaatgtaaaaaaacataacatctattgtgatatccaaaaaattgtacgacgaagggagaacacatgacacaaacagcggaaaaaagtaagcaaaaacctttttataaaggtcttttctttcaaattatgatggcaattgtacttggcatagccgtaggatatctgtggccaagctttggaaatgctgtgaaaccgattggagacggttttattaagcttatcaaaatgctgattgctcctcttatttttggagtagtcgttgttggaattgccaaggttggaaacattaaaacagttgggcgtatcggcggaaaaaccatcctttacttcgaaattgtcacaacattcgctctatttatcggtctattagtagcaaacgtaatgaatccaggcaccgatatgaatgttgatccttcaagcttaagcacaagcgaagtggacgcgaagacaaacggctccgaacttccgagtgaaggtgatttttttcttaatatgattccagacagtgcagttggtgctttttcaagcaactccatgcttcaagtgcttttaatttcttgtttgtttggtatcgcgcttgtccatataggtggaaaaacagcagagacccttttaaatgtattggaaaaagtaaatgatgtgttgtttaaaattatgggatacattatgaaattaacggctcttgccacttttagtgccatggcattcgcagttagtcagtacggtcttggaacacttgctgcattcggaaagctatttatcgctatgacaattgcttgtctagcatttgttcttgttttagctgttattttacgaatctatttaaaattaagtttgtggaaagtcattctatatatacgagaagaaattatgctggcatttgctacgggttccactgaagccgttatgccgcagctcatggataaattcgaacaagcaggatgcaacaaagcagtcgttggccttgttgtgcctacgggctattcgtttaatctagacggtgcttccatttacttgtctcttgccctcgtctttttagcacaagcaacgggcgtggatttgagtctcactgatcagcttttaatgcttagtgttcttcttcttacgtctaaaggaatggctggtattccagggtcagcctttgttgctctctccgctaccgcagcagcgaccggatccattccggtagcagccgttgctctgatgctcgctcctgatcgctttatgggtaattaccggaccacagttaatattattggttatgcggtagctgcttttattatcgcacgatgggaaaatttattagatctacaaaaagcaaatgatgtgctggacggaaaaattgcatatcagcccaaaaatgctgaaatttctctcccagagagtattccagcagccaatgaaaaagcattttaacaaaaaaaattcctggccgagacaagtctattttgcttgtttttcgggcaggaatttaattgttacataaaaggccttttgctgaaacttattttcttcgagtattttatataccatttgtttaatcgtttcttgcgttttggcatcagctgaaacggaaggctccatatacacatccagctctactctgtcttttgagtaaagggaagaattcacaccccttgattcatagcccgcttcagttaaaccgctgctgattttatgccaaatatccagtttgtccatttgtttaataacaggctttgcttcttcgtacacttgtgcttgctgagtcttgaaaacttcttcttttttagtaaaaactgcataccctgaacctactactaaaaacgtcataatagcaaatgctcgcatccttttcattctctcacctcatttagagatatagattataaatatgcgaataattgctgcagtatgacggcttgtatctctacttcttttccaatatactcagcagtcgtttagaaccagcttctacttcttctatcatactggcaaaaagctcttgcaccgttggaatattatcaatcagtccaacgacttggcctgcccatccatagccttcatcgattttattttcataaatataccggcagtttgcccctccgctaatggcgtcttttaactcttcgtacctctccccttgctgctcacgctcgataatgtcaagagtgtagtgggacttcaatacgcgtccaggtgccccgaacgaacgtttaataaccacagtatcggtttcttttgcttctacaatagcttgtttatacgcatcatgggcatctacacattcttttgtcgcgataaaacgtgttcccatttctatcccttcagcgcctaatgataacgctgctaataatccttgtccgtttccaatccctccgcttgccaaaaccggaattgacacagccgcagctactcgaggaattaataccattgtgcccagatcctcacgtccgatatgtcctcctgcttcttgccccactgccatgacagcatctgctcctagcttctcggctttttgagcttgacgcacgttggctaccagtacgagcgttttaattcccgttccttttaatctctcaaaaataggtgcgggatttgctcctgttatggaaacaaccggcacgccttcttctactgctacgtcgagaagttctttataagaaccttctgtttgacctccaacagcaaaattaacgccaaaaggacgctcagttaaagaacgtactttcttaatttcagctcgaagtttctcaggtgttcggagcgtcatagctgtaatttgtccaagccctcctgcatttgagacagcagcagcaagttctgcgtacgctaaatacgccagacctccttgtacaattggatattgaatccctaataaatctgttacccgtgttttcatctatgtatcccctctcctttgattttcttatttatgaatacttattcataatcataacaagaaaataacggatttcctacgaaaaaattccaacatttctgtttgcttcaacttttaatagggtacacattttgtaatgattattaactgaagatcaaggaggaagacaggtatgacaaaaaagcaccctgtaaatgaaaaaagtaagcaagaacagctcgagcagtttaaaacagatgatcgaaaccaagcgctcacaaccaaccaagggttaaagctttccgaagatgaattttctttaaaagcaggtgaacgtggtccaacccttatggaagactttcatttccgtgaaaaaatgacacattttgaccacgagcgcattcctgaacgcatcgttcatgcacgaggcttcgctgctcacggagaatttgaactgtatgactctctcagtgaatatacaaaagctaaatttttacagaatccgtctgtaaaaacacctgtatttgtccgtttttctaccgtagcaggttctaaaggttcagctgaaacggtgcgcgacgcccgtggttttgcaacaaaattttatacagaagaaggaaactatgacttagttggtaataacattcccgtgttctttatccaagatgcgatcaaatttccagatttaattcacgctgttaagcctgagccacacaacgaaatgccgcaggcggcttcagcacatgatacgttttgggattttgtcgccaataaccaagagtctgctcacatggtcatgtggtcaatgtcagaccgtgcaattccacgcagtttgcgtatgatggagggcttcggcgtacatacttttcgcttagttaatgcagaaggaaaagctcattttgtcaaattccactggaagcctgtgctcggaacgcattcccttgtttgggacgaggctcaaacaatttctggaaaagacccggattttcatcgccgcgatttatgggaatcgattgaaaacggagactatcctgaatatgagctaggcattcaaatcatagatgaggaagatgaatttaaattcgactttgacattctcgatccaactaagctttggcctgaagaagacattcccgtcaaactagttggaaaaatgaccttaaatcgaaatgtggacaacgtatttgccgaaacggaacaagtcgcattccatccggggcatgtggtaccgggaattgatttttccaatgatcctctcttacaaggaagattgttttcatacacggatacccagcttattcgtcttggcggtccgaattttcatgaacttccaatcaaccgtccagtgtgcccgtttcataacaatcaacgagacggttatggacgtcaaacgattaacaaagggcctgttagctatcacagaaactctcttgcagccaataccccggctcctgtctcagagtcagagggcggttatgctcactatcaagaaaaagtggaaggaagaaaagttcgaagtcgaagcgaaagttttaaagaccacttttcacaggcaacgctattctggaatagcatgagcgaccctgaaaaggagcatattatcagtgctttcagctttgagcttggaaaagtgaaaagcaagtctgttcagcagcaggtcgttgatatgtttgccaacgttagtacagtgctagctaaacaagtagcacaagcgattggtgcaacgcctccatcaggagaagacgcgccagtgaccaagtcatctccagctcttagtcaggaacagacgattaaaaagccgaatacgcgtaaagtagctgtcattgtagctaatgactttagcagtgacctaccacaggtgttaaacagtttaaaacaacagggcattcagcctgaaattgtaagcacaaccctccaaaacgtaaaaggaacagacgggtcagagcttgaagtacagcacaccttcttaacaagtgattctgtcttatttgatgcggtttatgttgtcggaagttcgtcggctgatgagaagtttcgcaaagaagcactgacgtttgctcaagaagcattcgagcattttaaaccaattggcgcgacggatgaaggtgttaagtggctaaaagctgctggcttagatagtagtcccggtgtcgtaactggagaaactacacgctttacagatgaatttatcgaagctatttcagctcaccgccactggaatcgtcacgttatataaatacaaaagcctttgaaatcaatgatttcaaaggctttttttattaaactgattttctaaatgccataacgtgcaaatcttttaccggataaaaatcgttatcaggaaagcgaacgtaacctcttttagtgtacagcttaatggcatgttccattgaatgatctgtatgtaaacctaaataagaacaccctagctcccgagattttttttcacacgcttcaagaagcgcattggcgactccttttcggcgatgagacggagcaactgccagcagacgaatttcagcccatggaaatggctttaacaatcctccgtatacatccgtattcggaggataaaacaaaacgcttcctgccatttctccatcgatttcagctacaatgcactcaaatttcttttcttcactcagggtatgtaaaattccctttcgatatcttttccagtgtgcttctgattttacagctgcatattgctcataagcagcaagcgtcactgtttcaatagatgatgtttcttcttctctagcttttcgaacgatcaattttttctcctccatttaccttcttcgttagttcttattgtctatggtgaaccatgtttatgcaacacatttgcattttaaaacagcttcttttgcatatatttaatccgttcattatggtttctgaagcggtctttgtgctgaaactctgcttgtcttcatatacatataaagagattcatagacaaggatgagacagcatgtataaaaaattgattgcaattggaattggcagtgtgtttgttagtattggaattaacgtttttattcttccgcttcagcttgtaacaggaggcattacaggaattggcttaatcattaattatttacttggctataaagtaggtgtgatgattttttgcttaaacttgccgatttaccttctcgccctaggttttaaccgctcttattttttaaatgctatctatggcatggttctctcagccgttatgattgatttgctgtttccgcttcacgggatttttcaccttcccattatcttaagcgcttgccttggaggtgtttttaacggaatcggaaccggcatcatgctccggcagcacgcaagtcaaggcggggtcgacttattttctctgatacttgcgaaatggttatctttaaaccccggcatcatcattttagtgattgacgcatctattattatttcaggtattttactgcttcaaaacgatacagctatttattcattatttattgttggatgctccggtatagtgaccagtttaattacgtcattcaaacgcatcatcgtctatgtataaggaaaaagcctcgaggcatgcgtctcgaggcttttctttatttgtcatttaagaattcttgcagcgcttctttatttttatctaaatcaatatcaagcaccataccaacaccgctatacgttttgttttcaaacgatccgtctaacggcagtcgcaggctttgaacatctttcatgtttcctgttaccacatctttagccagaagcatcatgctttttgtatctaaatttgtatcgatataaggatccattacgccgagaagcttcggtattttaaacacgctgtttaggcttgctacttcatctttaagctttaaaacgacttcttgctggcgctgaacgcgtccaaaatcactcatgttatcatgacgaaaacgcacgtagccaagcagttgttcaccgtgtaaaacttgggtacctttgtgaagcgtcataccaattcccgaagacatatcgtgaggcacggttacttcaatgccatcaggtgcaatcgtatctacaatttttgaaaacccttcgaagtccacaactgcataatagttaatatcgatatcaaaattttgtttgatcgtttgacgcagcagctcaggacctccgaacgcgtaagcagcattcagcttttgcatgccgtgtcctggaatatccacgtacatatccctcataagggaaacaattttcgggtgtttgcttttagaatcgtagtgagcaattaaaatagagtctgtacgagaatgcttctccccgcgcgagtcacttcctaatagcagcatatttacttctccgttatttgggagactgccttgaaactgttcaaatgtcgtgccgtcatccgcaaatttaccatcgcttgccatcgatagcccttgcttatattggaaataactgtatatgcctccaacgataataaaaagaaacaacaaagcaaagaacactctgccccatcgaactcttcttcttcttttgcgtcttgttcgctccacgtttctgtcaccagctttctttttcaatgaagttctcataaaacaagcaagtagctaagcttttaaaaagctcctctacttgcttgtttggattgtatggtgtgaaagcttacattacttttctgtttcttggtcttttccatacatatattttgatggatcgaccggtttaaagtcatctaatttattaaatcgtaataaatcaccgtataacactttatcagaaagttctagctctcttccaactttctttttataagctttcgcttcgtctgttgctgtgattctttctcctgtgtttgtatcgtaatacttgccgtcaattgacgtgtatttcggagaaacataatcaccgtttctaaatgctactacctgatcatggtcttttgataataaatctgtaccaaattgaacatactctttactatcaattcccactaagtgaagaagcgtaggtactacgtcaatttcaccgccgtacgtatggttcactccgccttttacacctggtacgtgaaggaagaacggtacgcgttgaagctgagcgtttttatatggcgtaattttctcgccaagaactttttccattgctttgttatgattttcagaaataccgtagtggtcaccgtaaatcataataactgagttgtcatataagcctgaagcttttagctctgtaaagaattcctgcagtgattcatccaaataacgagccgtttggaaataacggtctaccgttccatctcctgtgtttgccggctcaatgctagcatcgcctttatcaaggacaaatgggaaatggtttgttaatgtaatcatatgtgcatagaacggctgcttcaatgactgtagcattggcatagattctttgaagaatggcttatcttttaatccatagtttactttgttatcaccagtcatattgtaataacttgcgtcaaagaatttatccacaccgaactgcttataaatttcattacggttccagaacgttttatagtccccgtgtaaaacggcacttgtatagccgcccttttgatctaagatcgctggtgctgcttggtacgtgttgcgaccttttaagctaaatgctgatccttgaggcaagccgtataatgacgtatccatcataagctctgcatcagctgttttaccttgtcctgtttgatggaagaagttatcaaaatacataaattcatttccatttgctaatgagtttaaaaacggcgttacttcttgcccgtttaacttatagttaatcaggaatgactgaaatgattctagatgaattttaataatgttttttccttttgctttaccggcatactcaatatttggagctgcatagtgacttgtactgaagtttttcactgttgttaagtcatcactgcttgcgaatgctcgctgctttgagtttttaaacgtttgaactgcatcatacaccgtgtagttgtatgctcctaaatatttcactaggtagttgcgatcaaatgttcttgttaataattcagggcgatctttttcagcatagtgcaagttaattgcaaaagcgatagctcctgccgctagtaccatgaacgtatagcggaatttaaggcgtgcttttggccattcgatttttctaacaaacaatagcgcaatcagtaaaatgatatctacaaagtaaaaaatatcgtgagcttttactaaatcagcgatactgcctcctaaatgacccgcattgcttgtttgcgttaaagtaggcaatgtcacaaagtcattgaagaatcgataatataaaatattgctgtacaaaatgaccgtcatgattgtactaaggataagcgtccaaacgatggctctttttccttttgcaaacaatgctaaccctaaaaagatcaaagttgaactaattggattaataaacaataacgttttttgcattgagtcacttatatctaagttgaactccactttgtaagacatgtaagacttgatccacatgaataaaaccgctataaaaaagtaaaacaacggctttgaaaatagttttttcattttcaaattcctttcactaaaaagtagagatttcatgtccagctaacctcaggaaagtcccatacattaaatcgtaacggttacgtcctgcaaaagattacctgaaaatgattcaatttgtcaaacaatatcatcttcatctctttttttagtcatctacaaaatttacattttaacttgtaatctcttatttttttatcgtgatgttactattacacaattgttaatttgtaaattttgttctccctatattgcatacatattaatttaccacatttctgctctgcaataaaagtatttttattttattgatcataatattccacttactgaataaaaaggtactattgtactggacggtattcttcgcttactgttaggactagtaaaattagacttatctatgcttagtctttatcttcgtcaacagctatgcggtctccttgtgcaaagggctgtgaaataacaagaaactcaatctcttcgctcgaacgattcatcatttgatgaagaatagacggaagcacttctattccttcatgtgcttttacatcataaataattccgtctacttctagagcggctgttccttttagcacaaagaaaaattgctgtgctctcgtgtgataatgccttacctctttcgtatgagggggcatgcactcatgaataatacttacgtctttattttccactaggtgccacccatcgcattttcctccccacacgtagtgttctgcgttttgcttactgactttcatgactagctcccctttttttaataaatgaacacctgcagattaaatagaaattctatgtgatctttttaatcttgctattggaaatattttttttagatgaaggttttggcttcaaagtaaaaagcattcctaaaaagatcaaaacaatgcctgcaaactgaaaaagcgtcgggcgaaatcccgtgaatgctgtatctaataaaatagcaacggctggatctaaaaataccagaactgaaatcacctgagtttttaagtagcgcaggctgtcgaaaaacaaataataaactaaaccagtatgtacaaagcccgttactaaaatcgctgtccaattggccgttgttaggaaatgaaaatcattgaaacgaacaaacggcaataataaaaaaatccctaaaaaagtctgaagaaatgtaacagcgtaagcactcgtatgaataattcctttgccaagcagcgtcgtgcatgcataaaacaaagcggctaaaagcgcccacagtattcctgacgacatgaagccagcaatcgtaagttccttcaccccaataatcagaagtgttcccacaaaacaaatgaagatagacataacgccaagaaccgttaatttctccttaaagagaaagcttcccagaagcaatactaaaacgggcgcaagatgataaatagaaatagccaccgtaacggacatcatttcaaatgctttaaatagaaacacccagttaaacacaagaaatattccgcacagtaaaatctgctttatttctttggcattccatttttcccttttatattcacccgttataaaccagcacattccgagaaaaagcgttgcacaaatacagcgaacaaatactaaatcaaaagaaggcagtccagtttttgtggagaaaaagccaattgaaccaaaaatactcattgaaaccatcatttttaccattgggcctgctttcattttttcacctcactttcagaaaactattactattcaaacacaaagaaatccatttgtaaattaatggatcaaaagcgatatttcataaaaaagcgcaaagacatggggtcagtcccatcgtctttgcgcttttctgcttttcttttaatcttcaaccgggaaccagcctggcgtgttaataacggcttgccacagcgggtcaggaatcacaagcttttcctgatcttttttgcttaatgttgtaacaatttcattttcgcggccttctttgactttttgaacccagtctggatccataattaattcacggccaatcgcaagcagtggaatacccgtttcaagagctgctgctgcttcggctgctgtatgaatagaacctacgcccatcacaggtacgcgacttcctactcgctcttgaataatttcaatacgtgaacgagtatcttccacgcctcggcgcggttttgaccagaattccattagcgatacgtgaagataatcaaggtctttttctgctagtgcatcaactaacttcaacgtatcagccattgtaattccaggcgtttcaggctcttctggcgagaagcgatagcctactaaaaatggctcttttgcatgtttagaaacggcttgctttacttcgtctacgattgccagcgggaatgttaagcgtttttctacgctgccaccccatttatcttcgcgacgattagaatgcggagaaaagaactgctgaattaaatagttatttgctccgtggatttcaactccgtcaaatcctgcttcaatggcacggcgcgtcatctcaccaaaatcttgaataatgccttcgatttcttcatttgttaactctcgaggcaccggtgctccttcttgttctgcagcaacagcacttgcgctaacaacctctccatttggaacaagctcaggcggacacatgcgccctccgtggaaaatttgaagaactgcttttgctccttgatctttaattgcggttgctaaacggcgcaggctaggaatcatttcatcgctgtctgcagcaaactctccgtgaaatcctttgccgttcggcgttccatatgtacatgctgtaatgaccatgctaacaccttttgaacgtcgtacatagtagtctacttctgcatttgatactgttccatcttcatttgatgaaaaatttgtcataggcgcaagaataacgcggttatctaatttgatgccatttgaaaaagtaaatggctgtaaaagcggttcatactttttatttgtcattttatttccctccaaaaatgatacggtcaaaaatattggcatattataggtagaaattgttttccttcctataatatgtgtcatttaaaactgtaactttaaaatatactgtgattttaatctgtacagttttacctgtcaaagaataagactttcacaatgataaaaaagcactcatatactgagtgcttttttatcattgcgaaagaggttcctgattatacatgaatgctttcacttttacatattgagcttctaactcttgaagtgtcagttcgtataggtgccgattcccttttttataaataccaaaattcaatagcgcattaataaaccaatttttcttatgttccgtttcaggctgtgtgtgttgtttcaccatttccaccacctaagtttatttcatattaattttgcaaagcattcgcttttacataaataattttacttctgtataatgaaaaaacagtgaaatagaaagcttttttattttaaattcctgcagccggacccgctatttttttgcgtctttttactcctgttaatattttttcaatataataaataacaataacaaaaaccgacataatagcaaaataagtaccgattacaacaaaaggattcggactttcaaaaccggcttcttttcctttcattcctctttccggacctccgccatcatgatcaaagttcggacgttcgtgaccagcagatgccgtcgcagaagatttgttctcgctaaatgaatggcgatcaaaatccggctttccaccgcctttttgcggcatatctgaggaacttaaattcagcactttcgctactcctccaattttccccagaaaacccgtctcatttatttcgtatatgccaacgactaacagtgcaacggttgcgagcttagctgctatactcaagcttttctttgactttttgaactttgtcatattttcacacacatttataacccattgccaatgaagacctatgtgagcggctactaaaattaacactaaaaacgataccgaaatatgcgaaaccttaaaccactgttcattgccaatattaatatttggaaatattactcttgaaataaaaataccgcttatcataataaatgacatcgtaatcaacagcatgatatttaaaaagtaaccgagctttgttctgcgcggaagcttgcggtcaaataatttaaccgtaactttctttacccactgccagtttagcagcacgtgggtaaaaaaggcaacggcaatcgctagccccgcaatttcatgaaacgttaaccctcccaatacctgtttgttaaaaaataaaacaaacgtaacggccattaaaagatccagtcccaaccggacgtacatcatctttttcactctattcattctcctcacctatatatttgtcaaaacaaccgctttttcatatttcttaatgtaagcagagttggtgaaaattaggtgaaacgactgatttttttaccaaaataaccagtcctgagttctataaaaaacagagttcaatcatttttactttttagaaaatagctgttgacaaagaaaaaagaagcacgtatagtaatggttattcatcaagaactttcagattttaatcaaaaacacagcgattgggagtagtagaagcttattattcggtcaagagagctacgggttggtgtaacgtagtccaataatactttgaactcgcccaggagtggtaattcagaaagaatgcagaagtattctctaagttttaacgtctaaccttcgttatcaggttttaagcagggttctttaagagccaacaagagtggtaccgcggttagctaaagcttatcgtctcttctctcatttgataatgaggtaggagacgataagctttttttattttataaaaaagtggagggaaaagtcatgaagaaggacaaccaaggtttacagcgaacaatgacttcacgtcacattatgatgatggcgctaggtggagcaattggcgctggtttatttaaaggaagcagctcagctattgatatggcaggaccatcagttatcattgcttatttaattggcggaattattttactatttattatgcaaggtcttgctgaaatggcggttcgaaacagtgacgcacgaacgtttcgtgatttagttcagtcgattttaggaagctaccccgcttattttttagactggatttactggaaaatgtgggtgttaaacattgcagctgaagccgttgtagcagctatttttattcagtactggcttcctgattatccaatttggatgcttgctttaggcgtatccgttattgtcacagttattaacttgctttcggttaaagcatttgctgaaacggaatactggttagccttaattaaaattacggtcattgtgatctttatcatcgctggacttctgttactatttgtatcatttggtcaccataccgcagcgggtttttcaaacttgagcgatcacggcggtttcttccctaaaggaccaactgggttaattacggctatgttagtggtcatctactcttacggtggaactgaaatcatcggagtaacgctagctgaaacaaaaaaccctgaaaaagtagtaccaaaagccgtgcgcagcacactaacgcgcatcattgctttttatctattcccgtttttcatcatcgtgagcttaattccttggaatgaagtgaacggcgtttctcaaagcccttttgtgatggtatttaaaatgattggaattcctggagcagaccatattatgaatgccgtgatcttgttagccgttatttcttccatgaactcaggactttacggttcatcacgtattttatatacgcaagcagtagacggtcgagtgccgaagatattttcgaaactttctgttaacaaagttcctgtctatgcaatcttaatgtgtacatcatccctttatgtgggcgtgttgatttccttatttgcaggaagtaaaacatttgattatttgatgggatccttaggatataccgtgttgtttatttggttgattattgcgatcgcacacttaaagtcccgcaaagttcagccagaagcatcgagcagctactctgttaaatggtttccttatacgacgtgggctgccctaattgcactaagcgctattttaattggtgttatctgcacaacctccattgttattacgactattacactagctatctatttatttattacagctacgtatatctttaaaggccgcttttatcgatcatcagcagtcaagcacgctaaataaaaaaacccctcctttgagtcatcagaggaggggtttttttatttaaaatgttaagtaccaatagccaagtgcaaagccgatatagttaccaataatatagccaagcgttcctactaccaagataggaccaaccaaacttccccatcctttagcaatcgccattgcacttgctgtcgtaggtccccctaccgttgcattgctcgccagtaaaatatgttctaaatcaattttaaatacttttcctaaaagcagccccactattaaattactcagtcccacaatgagcacaaatagaatcaaaaaaggtgctttttcaacaattaatggaatggacgccggcactccaatgacaacaaagaaaatataaatgaagtacgtgccgatttcttggcttccgctaatgtttttaaaataagaaggaaacagataaatgacaagaaacgtaagtgtggaaagcaataagtatttttcgctcaaaatagtatgtaataacatttgaactaccgaaacatttgaaccggttggaatgattgttccaaaccattcggctaatttaaacgatgcaaccactagaaaaaatgatgtaccaattgaagccgccacgtcctttaacgaaatttctttttttgcccaatatttttctgcaagcgtatgacgatcattttctccatattgcccagcctctacttcttgaatatgaggcgtcttaaaatgtttcctaaaaaacttcatagaaggaacaaacatatacacggcaaacagtaaagccatgaccatattatcagcaaccaccgtcgccgaaaccatttgacttgatggttcaaatttggccgtaacggtagcaaagttaacccctccgcctacataagaagcgccgatagcagctgcaatttttgctagttcaggaatataatcttttaataacaagaagcctcccgtgctccctatgaccgttcctactgcacagattaagaaaataaaaagcagtttccggctttcttgaaataattctttcatattgacttgaaataacaataatggaatggcaagcggtactagatacgcccaaaccgcatcataaaccggagactctgttggaatgatttttaaatttgataggataagcgctcctgctagcgcgataatagctcctgacagaaaagaagcccacttatacttttgttcgagaaaaatactaacagaagcccaaatcgctagaattccccatagtgcccacgtatcatcagcttgaataatagtaaaaatcacaagctactcctttctttctcttttcaagaaatagaattttcagaaaatacacttttaaattttatcaatatatgccaaattccgtcaatctataaaaaagagtcgaggacaaagtagtctagttaaagtgaaacaagaactatctatcacaaaggatgaatagttcttgtttttttatgattatggtgaacgtaggttttatgtaggtagctacttctagctgttgattggaggacaaggcgaagactcctgcgggcaaaacggcacagatgagacgcctcaggaacaaaagcgacgatgaggctcagcggcctcccgcggaaagcgaagccttgcacagaaatcaacagcggtgtcacaagcagtccagatcatgtatcccgattgttagtctttagattagattcattttgtgatgttccagcctcactttttatttacgaacaagaactggaatctgctgctgaatctgctgcaaaggagcgcttgttttctctgttaacgaacgcaagattcctccttcaatcatacagttaatcacaactgcaagctctcctgcctgcttctcttgaaatccgctttctatcattttttctctaaaaagtttttcccaatcttgaaacgctgcgtagcagacttcgcgcagcggctcattaataagcgccgtttctccagccagcagtccaacaggcataccagcaatactttcttcgtgttcaaactgcttggacaattcttcaataaaatactgaatagcctgcgctgcgtcagaagatttatttagactttctttaatttgaacttggacgtatttattcgtatattgaacagcgtgaatcgccagttcttctttcccttttggaaaataataataaagagacccttttggcgacccactctctttaataatttgatttaatcctgttgcatgatagccttgcagctgaaaaagccgcgatgctgtttctaaaatcttatcgcgcgcatttgctttcttcacaaaacgatgcctcccctatataataagtggtttctataatactacttattatataaagaaatgaaatttttgtcaaaataaagtgaatattttaccatttattttttctttttttatttcttatgacctaataattgtttttcttacttcttccgctaacggttgaagaggcgtaataatacggttgcttacctccgccgccgcttctaccatcgagagctgcgccactgaaacaacagtgttatgctcttttattagctcatgtaagacatgtttcaccttctgtttatatttctctaggtttccagtcattactagttcaaaagcaccttctatcacaacagggcgaacctttatctttacattttgataaaatgcaaattcgtctaggcgcttcattgttccttctacggtctccggatttgtaaacacgataagctgcggttcttctatttcacatattcggcgaaaataaggctcatcgattttaataattggaacatcgcttgtaaatgcttctggtaaaagagcaatgtaattcgtacacgtaagtaaaatagcatccactgaacattcttccatccactttaactgcttttctacttttgcagctactgactccgctgcaaacttagggtcggttgttacccgatgtacaagtccagggtctacgaaatgcatacagttcgcaaacggcagcgctttttctatataagagatgttcgaatgatgagcgtgcaggcaagcaattttcttcatcgttttcctcctgtatgatggtctttgaaatactgaattaaaaattcctggaactttttcgcaacaggagttaaatatttatccttgttccacgcgatcccaattacccttgaagctgtgtcttctttgagctttattttttttatgcctcgcaagtccactccctttatttcaggaagcaaggcaacccctaaatgagccgctacaaaaccaatcaccgttaaaaattcttctccttcaaacgtaatatttgggagaatctcggcttcttcaaacagctgatcaaaaattgttcggcttccgtatcctttttttaacgcgataaacgattcatgagccaactctgaaatcgaaagcacttgtcttgaggcaaaagaatgcgtatcagggacatacgcgtacagctcgtctttccataaatattcccactgaattcctgccctcgattccgttacggaagacatacaaaaatcaatttcccctgtttgaagctgatcgagcatgatgttcgtagcgttctcaaaaatttgaaattgaacgttcggatactcttgtaaaaaagcatgaactagttttgggacggaggaagcgcctaatgattttaaaaaagcaaacgaaatactgccgcggtgaggatggattaaatctgaaagctcacgtttagcctcttccatttcgtttaatactttagccgttcgttcataaaaaagccgtccgtatcgatttaaaatgacttgtcttccttttcgttcaaatagcggcacgccaagctctgattctaatttagaaattgagcggctgagcgtaggctgtgcgattgataatttttctgcggcctttgtgaaatgttccgtttgagctacaacattaaaatattcgagctgctgccattccattttttcacatccttcacttattacataatactattaatttcatataaattatacattggacgtcataaaaaattcatgtttaaatgaagaacgtagcacttgccgaaaatgttatgtgtctgcatagaataagtgttgaaagaaggaattagtttatggatgtttcaattgttttaacaatgttagccgtcggactgatcttaggatttgtcggagcaggcggatcaggttttattatttcaattttaacgctgctttacggcgtatctgtacacgttgcactcgcaacggctcttaccgcaatgattttctcttctttatctggcgccgtcagtcattaccgcgaaggtaacgtatctttaaaatccggtatctctgttggtatcctcggtgcattaggcgcttggattgggtctaacctttcatcctttatcccagaaggcgagcttaaatggctaacagccggcatgcttttattatctggtgtattgctttggctgcgtatgtttttattttcccgtcagcaaaaagaacgtactgttccaacaggagctaaatttgtcgtctactctttactaattggcttaattaccggcgctctgtcaggaatgtttggaattggatcaactccatttatccagcttggtcttatgatggtgttaggcttgtctattcgtcagtcggccggaaccacaatgctcgttattattccgattgccatcggcggaggaatgggctattatcagcagggctttttagatattccgctgttgatccaagtagtagtcggcacaatggttggttcatatattggagcaaaatttacaaaccgcgtacctgctcccgtattaaaaacgtcccttgtagcgctgcctgtttgctctagcttcctacttgttatataagaaaaaagcttgaactcttgttcaagctttttttatgtccatctgataaacaaactgttttccttggcttccaaagatatgccggtttgtatccacaaggccgcttcggatgtacaggtgctgcgcagtcgtatttttatagttcacccctagcaccactttatttttaggcggaaagtgatggttgataaaagaaggaagaagtttcaatgactttttgccaactccctttccttgataatcaggatgaatggaatacgaccgtattaaaagcgtgccggagctctcggtatatcctttaacggcttcccctgcgtcgagcacgaaaaagccggctagtttgttttctgccaaaatcaaaacaggcgttctgtccttttcctgctcacacttagctaaagcttcagcgggaagtgccgtataaatgagctgctcttcaggcagcgtatagctatgtatagatgactcgtaggcttcactataaaacgttagtgctacgtttgctgtattatccattctataccttactcctttttccatagtataacatgcacaaaaaaagccgcataaagcggcttttcctttatctagcgtcggatacaacggtaaagcgttcgtttacatgctctcctcgctcaatctcatcaatgacagcaatagcataatcagcatagctgacatggctgtttccttctgagtttaaaataacatgatcttttcctgttttataagcatccgttcgttttcctgaaggattaaaaaatgctgccgggctaataaacgtccaattaatatcgcttgtactttctaagtcttttaaattttgagcttggttgtcagctgtcgctttatactcttttggaaaatcaggcgtatctgctagacgcgtcgttttctcttcatcgacaaacaaactgcctgctcctcctacaacaagaagacgaacgtccggagcttgtttaaatacatggattaacgattgccccgcttctacatgtagatgttcttttccttcaggagctccaaacgcattcactactgcgtcgaaaccttcaatatcgtttgccgtaatatcaaagatgtctttttccaatgtacgaacatccttttcttctactttgcccgcatcacgtacaattgctgttacgtcatgcccgcgatttaaagcctctttcacgataaaacttcctgcttttcctgtagcacctaccactccaattttcattttataacctccagtaaaattctctatacttagtagtagcctctttttgctctgctaaaacacgacaaaacggtttaagcaagatagagaacaaataaagagactggatcaaaagtattttagttgaaggaagatcctaacgtaggttttatatatgcaggtacttctagcggttgattggagggcaaggcgaagactcctgcgggaaaggcggaacaggtgagaccccgcaggagcgcaagcgacgaggaggttcaccagccgctcgcggaaagccttgcacggaaatcaactgcggtgtactaaacgatccatactggcccctttatccatttgttcgactttagactaatttagttatgccttaatctctttgacaaaaaataaataaataagtgcttattcaatttcaataaataacacgtgagccatagaatgaattgatttaatcaattctactttattccctttcttttttgcttttccttttatttcaacaaaatagagcagttcaccttgatgatgatctcgatgaatttcataggatgaaatcataatattttccctttcaatcttatcaaggagctcataaatatcctcttgattcgctgcacgaaacttaattaaaatggaatgagtagaaagagatgtaaacatcacgttcaatatttctaagccaatcagcaccaatatagttgcactaatgccgactgtatacatacccgccccaatggttaaaccaattcccgacgttgcccatacgcctgcggctgttgtgagccctctaatatgctgcttttggataataatcatacctgctcctaaaaaaccaataccgcttactacttgtgctgcaacccggctcggatcaagggccatatgatcttgatgaagcacatctgagaagccatatttcgaaattagcataatcagcgtgctaccgacagcaactaaaaaatgagttcgaaagcccgcttcttttgctctaaattctctttctaatccaaccaaagctcctaacagacctgatagggctagacgactaataaaagctgcggtcattttgccccctcctttcccttcatcttcattttttcataaacgcacctattaactatttctatttttgttataatttactataactaatttttgaaatggaggctaatcaaagtggataaaattatcgattattacagcagatttgatgagtggggaagattagaacgcgagcctattgagtttcaagtaaactggcattttatcaaaaaacaccttcctcccagcggacatatcttagataacggtgctggacctggaagatatgccttaaaactagcagaaaacggctacgaattaactctaactgatttgatgcctcatttagttcaaacagctaaggaaaaggctttagaacggcaagtatacaatgcatttcgtgactttcacgtggcagatgctcggaaccttcaatgttgcctggatgaacattttcatgcagcactgatgcttggaccaatgtatcatttacagaagaaacaagatcgcattcaagctgtccgagagctgtatcgagtcacaaagccaggcggaactgtctttatttcgtttatgccccgtgttcagcacgtcatttcttctttaacatccccggagagtttaagaccaaacaacacggcaaaagcgcttcatgatttctatgaatctggctgttttgatcatgccgaagaaggacgatttactcacgtttattacactaaaattgaggatattattccttttttagcgaaccatggattccaatgtgttgagctaattgcctctaacgttgcttcatcagttaattcaaaggagtggacgtactggcaggaaacttcttctgaagaaatgaacagcatcgttcagctccttattcaacaagcatcaagttcttatcaccttggactgtcttctcatttactctatatcgggcgaaaacactaataatcacctctatttatcataggataaatagaggtgattattaatgaaccgtttattcaaatggagtacgagcactttgctatgtttaatgtactgctttttgattccccttccctcttatgcaagcggtgactcttactcttcctatgcagaactgcagcagcacgagattctccatcaagactatgatattcgctacgaacagcgctttagctacctatccattatggccattcacggcggaggaattgaaccgggcacatcagaagccgccaaagaactagccgatcgcttttccgcttcttattatttattcgaaggcatcaagtccactaacaacggagttctgcacataacctcagaagactttgacgaaccgattgctagagggatggctcagcaaagtatgtccgttttgacgattcacggctacagcggcagccagcctatcgtatatgtaggcggaaaaaatcaactttataaagagctggtgaagcaagcgctaggcagaaacggctttatcgtccgtgacgccccttctaacatagcgggaacaagcgagcaaaatattgtgaacgataacctgttacaagccggagtgcagcttgaactaacagctgaactaagaaaatcatttttcgcaaaccatgactggtcaagaaacaaccgcatgaatgtgacgccgcttttttatacattcgtatctgccttacaaaaagcctcttcttcctatcaaactttcctttacctacaaatccattaattttcaaaaattttcaatttccagacaaaaaagacagcgcagcaaacactaaagcagccgtaagctctcctgtccataagccaaataatttccgctttactttcgtagaaatccccccagcgtatctctcaatcctgctgttcaaaccaagctttaaacagcaggtttacacctgtttttatttcttcatcagacagtccggcaaatccaagcaatacataaggcgtggtgttgtcatcggcactatgataataaatagccgttggataaatcgttaccccttgcttggcagctgcttctattagtttctgttcactcattccattttttaccttaagaagaatatgcaatccagaatattctccaataacatctacacgttctcccatagtagcagtcaagcaatctagcagcagcgcttgtttcttgcggtatgctgttctcattttattcaagtgacgttcccaatgcccttctttcataaacagaaaaagcgtatgctgatgaaaccttgaaacaggctgtttaaaaagtccacagtgcttcacatagcttggaagaaggcggtgtggcaacacggcataacttattcgaagagaaggcatcaacgactttgaaaacgttcctgtataaataacgcgatcgtcttgatctaatccttgaagcgccggaatcggttttcctttgtagcgaaattctccgtcatagtcatcttctataatatagccattcgtttctgccgcccactctagtagttcaagtcttcttgctatcggcatgaccatgccaatgggaaattgatgagacggcgtaatgtacaccgcattcgctccgctttctttcagttccttcactttcaagccagaatcatcaagagaaatagggagcaccgacataccttgtgcttgaaaaacgtgcctcgttcggtgaaaacctggattttcgaatccaattattttttctttccccaaggtgacagaaagcagccacatgaggtactgtgtacctgcacctattacaatttgctccgctgtgcagcgcactcctctcgagtggtaaaggtacgctgcaatttcttggcgaagaagcagttcgccctgcggatgtccgctgtaaaaaagctggctttcaccatgataaatagcttgtaccgttagctttttccacgtattatacggaaatttttccacatctatctttccgtggctaaaatcaatagcagtcgatttcggttcttcttgcggtaaagagacataaacaggaggcagttcttgaagcacgacttcattttttatctcttttacaaatgctcctttcctggctagtatctcgatatagccttcagcttctaactgtacataagccgcttcaaccgtattttggctaatgcttaaatgaagagctagctttcgtttggaaggcagtttttcatgaggcggaatggtacctttttgaatttgtttctttatgtaagtgtaaagctgcatgtacaagggatctgtttttcttttatcaagcaaaggcattaactctaacatggtgttcgttcctttctaactgatactattaaaattactgtttctgacacttactctccattcagtttctttatacactggactatatcttatcccccaaggagatgacacaatgaccattatttataaaactaatgtcttaatccgtgcagaacaagccgctgaagtatttgtacattcaggtattaaacgtcctgtacaagaccttgatcgaattcaaagaatgcttgatcatgcttctcttactattaccgcttggaacgaaagcgaactcattggcatagccagagcgttgacagattttagctactgctgctatttatcagatttagcggtcgtaaaagactatcaaaagcaaggaatcggtacacagctaatcaaacacgttcaatcagaaatcggcgaagaaaccgcgctgattttactttccgctccttctgctatgaactactatcccaaagtcggctttcatcaaattgataatgggtttaaaattgggagaattcgataggtaaaaaagacaaaaaacttcctgccctacgaaactattattattttacatcttttcaatatgatggtacaatattcaaagattaaggctatgatacttcttccttctcatccaactgttagaatttagaggtatccctttccttaatccattaacctaactatacatatattcaaagtcaggaagcacagcgcctggctttttctgtgcaaatcatacatggtggtgtttgaatgaaaaacgatatttttttaagaagacaatctaaagtaattataaagcaaggatcagatatattagcccctgcttatgtatcttccatgttaaaaaacattgaggcattaggatttacagcttcagcttctttaattgatcggttactcactctttcgttctacgaatttatgtctttttatgatcagcttctcttatctttaaaaagacttgttggcgctcatgtcaaatataaaccgatgtatcctaactttccatacgaagtcatgcaagcgtccgaagcagaactatacataaatgccgtggttcactatctgactgggattttaccaaacagtgaaaaacaagatgtttttccactgtttgatactacagatttgcggattattgacctcggaacggatgaagaattcggccttatgatgcgtcaattaattggtgccaatacctcattatcgcaaacggatcgagcagacatcgaatggtctcttgtcaatttacatgcattagacctacttccagaagtcattcctcaaaaagaaaatgctgcatttgttagctcagttttaattaaaacaaaaaaactacctattgatgtcttgtcttcttattttaaaacagcaacagacgttttacgtttggcaaccgctttatctgatggcgatattagcctttcatcacccactttatttaagaagtttagtcgttttgaacgtcgaagcttgttgcagctgctagaaagcacttcaaacgtagaagaagatatgtttcgttataaattaaagtggattcgtttaggtgaaattttacatcctggggaatacaaacatcgatttcctcacgctgctaaaggattcgatgctgttcgaaatcataaaaaaccattgaccttctatagtaaagtagagaaagcactcgagcaacaagacgcctcaaaagcagtttcacttttagaaaaacgtccaggtgactttgctagacgaattgaccatttactgcgcttgtctactggggaacaagaagcagcttctattattacagcatttgcaacggtcgctcatcatgtctctacgccagtactacttcagctctattctcatatgaagcatcgacatcataaacaagatatgcgcgtagtgtttccgaaagggaatgtgtccaaagtaatggcgcttgataatcccttaccttctcttcgtaaggatctttgtgaaggtgtaataaatgcatgcaaagatgctttacatgaccgttttgctaagtttccacctcttggaaatgtatgggttgatgaacgtttgcatgaacaaactataccattttcacagcgttcaagcagcaaaacgttaaaaacgattagccgcggcagtaaattaacaatacctgaaggcgacacgcttcgttttttcatttggtggaaagaaggctttgtaaatggtaaacacaccggtagtgtagatattgatttatctgccggaatttacgatggaaactggctgtataaagagcatatttcctatacaaacttatcttcaaaaagcttcaaagctttccacagcggagatattacatctgcccctaagggagcatgtgaatttattgacttgcatatccctactgttctaaaaaaaggcggccgttatgtattaatgaacatttattcattttccgttcaatcttttgttatgcttcccgaatgctttggaggatggatgatgagacagtacgtagagtccggtgagatattcgagccttctactgtacaaagtaaagtagatcttgctagtgattccaccatctccatccctttaatttttgatttacaagagcgaaaattaatctggacggatatttcgctgcatcatcatgttgaatttcaaaataatcttgaacaaaacaatggatctgtctctcttatgggaaaagccatgacaaagctgttgaagccaacgctttatgatcttttttcatttcacgcacaagctagaggaacacttgtccatgacaaacaaaaagctgacactatttattcgcttgatgaaggtattactccttatgatattgaaacaattattgaaacctacctaaactaattatttataggaaattaagaacaaataaaataaaagaaaagacctctttccaagaaagaggtcttttcttttatttgactagcttttgctcagctgcagctgaaccttgacttcgtttatgaaatccttttgcgtagtacgcgataataagaccgataaaccataatggtccgatgacaactgcaattcttgtatctggattatatgccatcaaaaccaccaccagcgctaggaacgcaagtgacacataagatgttaacggaaataaaggcattttatatttcagctttgcctcttcacctttttttaacgttttgcgatacttaatttgagaaagcaaaataattccccatgtccaaatcgcaccgaatgttgcaatgcttgttacccacgtaaatactttggcaggtacaatgtagtttaacgctactccgactaatagcgcacccgctgatgctaaaacagcttttcccggtacgccgccttttgtaagctggccgtatccttttggcgcttctccgtgttctgctaagttaaacagcatacggcctgtactaaaaataccgctgttacaagaagaaagagctgctgttagcacgacaaagttaataataccagccgccgctggaatgccgattttttcaaatgttaatacaaaagggcttccctgtgaaccgatttcttgccacggataaatcgacataatgacaaataacgcaccgacgtagaaaataagaatacgccaaaagacagaatcaatcgctcttgctagagatttttctggatttttcacttctcccgcggtaacgccgatcatttcaattcctaaatacgcaaacatgaccatttgcagcgacagcaaaatacctttgaatccgttcgggaacagtccgccattgtcccacaagtttttgataccagtcgcaacgccgccgttgccgattccaaacacaatcattaataatccaacggcaatcattaacacaatcgctaaaattttaataagtgcaaaccaaaattccagttcaccatatgccttaacagctaagaagttaaccgttgtcatgatgacaagcgccgataaagcccaaatccagtttggtacatccggataccaataccccatataaataccaacggctgtaatttcagccatacatgttacaacccataaaaaccagtagttccaacctgttaaataaccagcaagcggccctaaatagtcgcgcgcgtacttactgaatgaacctgcaacaggtttttgaatcgccatttctccaagtgctctcataataaaaaacataatcattccgctaaatccgtacgccaataatattcctggcccagctaatttaatagcagatgcagatccaagaaacagccctacccctatggctgctcctaaggacatcagcgtcacatgtctttcttctaacccgcgtttcaattctttcccctgagttttcccctgcataaacgtctcccctttttccaatctgtcaaaacgagatgaacacagcctttttgttagcgctttcatataagtttgtgctaaaagacagctaggctgtatatttgtattctatcacctttctctcacttttattttgtcgaaaaacaaaaaaatatcttatcattttgtttaaacgcacaattagacatgggcactgcttttttaatatgtatttattattgcacctaagtaataatatttttaaaaaatagaaaaacgccgactcaactccgtcagcgcatcgttcattttatgcttttttataaaaactagcatttatctcgcgggttcaaagttttacagccaggttcttccgtttcagaaacatggtgactactttcaggactcacaacgtaaatggactctgcactgcatttatttccggatttccaatacatgcactcattcacttcacataatacaccttgggctacgattatccctccttttcttgtcttatctatttactacccgaaatatagcgcttctaacattcacacgcaataaaaagatccgcttgataaacaagcggatctttttattgcgtgtgttcaacatactgttttttagctaaatataactcacggctcagcgtgatccgccgttctctcaagcggcttaatttagcctgaaattgttcgttcgttggttcttcttgaatcaagcgatacgtaaaagaaatatcttcatttaactgtttaaaatcttcccatatctcttgaacgagtgcggattgtttgtcttcaaatgatcgattttgcctcgtttttaggaccgctaaaatttcctgctgccacgtttcgtcttttatttctttggctaataagtatagatctaaataatcatcagtgcttaacgctgtttgtctattgttcaatgtcctcacctttcctatacgaaatgtttcttcctaagaagaggatttcatcatagaaaaagattcctcttcttatctgtcagagctaggctatgctggaattagcaccattcaataattgtggttgctgaggcttcaaagggccagtccctccacctctctagataagaatattccgtttttaaattatttctgactattctaatatgttttataggttacgtcaataacttttcaataaaaagaaaaaagaagtaaaatatggtatgcttttataaaggatggtgagcacatgaaacgatatctgttatctgcttttttgggaagcttgctgctgcttcttactgttgctttttcatctactttccatattgcaattgtcaaaacaacgggaagcattggagggattattttagcagcagcggctttgattatgaacgcacttgaagatcccccctccttagacaatagaggtggaggagccgttgaagtactagataaaggcgctgtttgggctacttatttacttttactttcattaccgaacctcatcgcatgtataacctcttatgttttatggactcgctgacattcatcaacgttacggacgttttaccacttggaagctcattgatatttgtttatctacaaatccaagtttacgatacacatgctgtgcaaaattcccagcatgaacgctgagtctgatttcagggtaccctttaatagacaattcatcaattgctttttgcattaacggcttggctagaccttgcccgcggtattccggtacaacatataattcgtagataaagccaatttcttcttttgaaaagaagttggtagatgcgccgataagaatccagcctgcgagtttattttcttgtcttgaaactaaataataacagcctttttcaagggcactaccaactagttcatttacgcgttcagctgacggatgaaactgcttcattgttccttcaaacagcgcatcagcagatttcgtccgaatttcctgtaattcttcttcagtagcttttgcaatcattatggatctctcctttcgtgttcgttttctacatgcacggatgaattcctgcaaaaaaagatctgggacataactacatcaatccactcgaaagacgaacaaatgggatacatgatctgaaccgcttgttacaccgctgtcgatttccgtgccagacttcgctttccgcgggagtcttagccttgccctacaatcaacagctagaagccactacatacatgaaatctacgttcaccataaccataaaaaatccgaacgaattgaattctccatcaagaatctcgattcatcgttcggatttcccttcaataaaactacttttgccccagcctcttttatttaaattcaaaattctcttgatgattaccttgttcgtccgtccagttaatcataatgtctaaacctgccgcttttccaggaacagcaaaattcgcatagcgaaaacgctgaccgcttttgcttaagctagacctttcaataggagaaaacaagctgtatttcgccttattttttccctcatgccgaaaagcttggacctgcacgcgctctacgtcttttccaatgttttcaacggttaacccatatgtatgatagacgttatttttccactttagctgattctctcccgtcatactcgcttttgtcagttcaaccgaccattgttcagatgatttcttcattggaagcttctcaatcgaaagagcgctgacatgaatggctgcaaaagcaagccagacaaaacaaaaagtgctgactgtataaaatagtcttttcatagattttgatctccttagaaattttagtagtagcatttcctgttcacttaaaaattatgataaacgctttaacaaaaaaggcctccccatttaggagaagcttcttaaattaatgcataagcaaatctttttgtttgtctaatgagtgttttgtatataaatctctttcaatcgcatatttaggacggtgtttcacttcgttaaaaatcttgccaatgtattctccgacaagacccatccccattagctgcaggccgcctacaagccaaatcgataaaataagagacgtccagccgatttgcgtatgatctaaatatttttgaatcagcgcataaataccaaacgcaatactaaagagaaaagaagctcctccaagcagcgtcaataagcgtatcggcgctacgctaaaagatgtaatcccgtcgaatgcaaaagcaagcattttctttaacggatattttgattcgcccgccgtccgttctttgcggtcatatgtgacttccgcggagcgaaatcctactaatggtacaaggcctcgtaaaaagacgtttccttctttatatttcatgagttcgccaagagcacgtttgctcatgaggcgaaaatcagcgtgattttgaacgagctgaattcctagcttattcataaaacggtaaaaccctactgccgtggttcgtttaaaaaatgtatcggtttctctgctgtctcgaacaccatatacgacttcatacccgagccaatatttctccacaaaagtacgaatgacgctgatatcatcttgcaaatctgcgtcaatggaaatgacgcagtcagattgcttatgggctgcttctagtcctgcgagcaaagcattttgatgtcctacatttcgcgctagctttaacccttttacaaacaaattgctgcagctttctttttcaataagcgaccacgtgctgtctttgcttccatcgtctacaaacaaaatggtactttcacttgatacaagacgttcatttatcagttcttttactacagcagttaattgaaaagatgtttctgtgaatacttcttcttcgttgtaacatggaacaacaatcgttaaaataggtctgttcatgttattgcccccttactttgcttcatatacatacactttccaagcggactgtttatcgttaaacgcttttaaaaagtgcaaaccgtcactttcagcattttcgattggcacagctgaaaagatatagcgaccgcccatttttttaaattggctgatattaagctgcaaatgacggatttttttcgttgagtcttttcggtaatcatattttttccctagctcgctaacaaacacatagcagcggttgccccagtgatcatagtaactttctaactttttatttttatcaagctctttggcaatgattttgcgaaactcatgtttatacgttaacggatagaagttgttatacgtatctagcgtataaaagccgttatactgagcaattgatggatgaagcccaatgcttgctacccgataagatgatttaggtttccctatatatctgctgatttcatcgaattgatggacagcataaaattctttgactgacggctcgtgattgtagcgataataaagctcaggattcgctataaatagcacaagcagctgtaaaaccaaacacacccacacaaactttttccacgctttgccccgtttccataaaacatagccgccaactgcaaacatcaaataaataatgagcggacgtaaaaaatgaaatctagcaaagttaaacgtatttaaaagctgaaatttttcttttagcggctcccatcctttataaaaccaaaacgcataccaaatcgacagtagtagattaagaacaaataactgcaaaaacgttttttcaagctttcctttctgattgcgagcgacaatccacagtacaataaaagaaagcggtaaaatgacaaaggtatgaagcgtcattacatgtgtatgcccaagcgtatagttcttcaaagcaaggcgaatggaatgtccgaaacttagagtagagcttaaaaattcatttcgactcgtcggggcctccggaaataaaagagaatcaaccagccggtattcaatgagcagaaagacagcggtcatcgctgcaatactgcttaaaaaaggcatattccacgatcgtttttttactgcatctcttagccatagcagccccatcgctgctaaaaagaagaaaaaccctagcacaaagctcgcgtaaaacggaagcaataaaagagtaagccattccttccacgttccttcgcggtttcgaatggttaaaaacgcccacagcgccagcggctgtcctaatgtactcagcatgcccgaaggccaaaaaggagtaagtgcaaaagcaagcgatacaagcactcgaatcgcataagcatccttgcttttgataaaatgcttttttaataataagtacattccaattaaagcaaatacgcgcgtgatcgtttgactcaggctgtatgcaagcatggtcgggaataaactatacagccactgaataccgctaaattctgttccaaacgtattcctcggcaatccgttaataatttgaggtaatacggcatgactggagccaaacagctctccgcttcgatgcagaactttataccacgtaatatttgagtctaaattatcgtgcacgcgtatatgtgaattttccccgagcaaaaacataggagatacatacgcaagcagcaaaaggaaagcgataataagcaatgttttttctttattcatagctgtttctttcttcatctgttaacacctatttccatttcataattgctagaagctaatcgtgtatgacgactgcttctttttttgcattgaatacaaagtatttttgacccgtataatttaaaagcgtatacagccctgttccaattaatataccgacgtcttttttgaacggacgcacagcagcaggaagttggtgcaataaccagctggagaactgcagtccaatatagtaagacaagccgtagcaaacgccaataaccaaaataaaacgcagtatgcttgtagataaatgaactccgcttttaaacgtaaatattcgatttaatacgtagctaacgactgcccccgctgcgttgcccaaaaacgttgctgcccagtaatgatgaaagatatgaagcagcacatacataatggagagacctactcctgtattgaccagccctactactaaaaaacgtacaaaagatcctttcatacaaactccttttaattttgatactttcataaaaattacatattatgactttaaatacagtttcagtgtagcaacttcacttaaaaatctaatgaaaataacattaaaaacagatgaaaaaaagctaaaagaatcaataaaatcaagatttttttagctatttagtagagccttcaatgattaatttttggtcactttgattgtcaaacgcatccactgccgctacttctatttgatacgcagtatgaggctgcaaacctgataacgggagacttagaacatccggaacagggtcgctgtaatattgagaaaatgcattatatgttttgaccacttctccagtttctttatttttgacggtaatgcgataagaatgaaccatcagattatccaccgcttgcgtaaactggatataaagctgattcgatgaagctttttcttgtataacagaaatagtagagcttggaagaaaaatcggttttactaaatctcgttcattcgtgtagtgaaatttttttgtatctgcaggtatgtcaatttcccacgcttctcccgtccacttatttgcgtgaaaatcccgccttttaacgactacttttcgattataaacctctacaagaagaccttgactcacatctcggtagccaggaggaagttcaccttgtaaatatccggcaccaggccatatataccgaacagaagacgttgcaagagatgtaaaatctctttgaaaaatagtgcgagggtcgtccaacggatggtgggtatgaccggaaaatgtaatgacttgcggataaggttttaacgtattgtaaagaagctgttcattcacttctatcccccatctgtttttcccgtacagtgtattgttaataggctgatgaataaagacaaaaatcgggtttttaggatcgtctcgctttgctatcttcagctgttcagcaagccagttaatttgtttgactgaataatcaccggcggtcagacggctttctgttccaagcatgataaaatgatatccttttatcacttgatgaaaataaagagctttcattttagttttagataaaaaacgctgctgcgcttgctgattagttacgctgtcccggtattcatgattaccaatcgtaaaaagagatacggcctgcggctgtttattttgattataaatagaaaaaaagcggtcgtattcttttaacgcgccggtatcagccaaatctcctactactacaaatgcatcttgtttcggtgcctgctcatttaattgcgttaatgcatgttgaaaagtacgcaaatcaagcgttcctgtttccttaatatgaacatcactgatcacaggaaaaactagctttggttcgatgtatccgcttcgtccgctcttctcttcggctcgtacgtttaaggtaataccgcatataagaacacttattaatactaaagcgagccagtcttttttcagcgtttccataaaaccgccgagcatgatgcttcctcctttcttcactgctgcgtctcagtcattttctctacgtgtatgagcttttattttatgtaatttcaaaatatctaatcgtatagtttcaatatttcttttcgtgtttgcaaacactatgttcacaatcaattcattacacttttcctagtcatagtggtatgattttcgtatattacagattaattgttgaaaatgtaggagtgaatattttgaaaacggtcgctgttattggaggaggaattacgggcttaaccactctgtactatttgcagaaattaaaacgagaacgtaatctcccgcttaaattattattactagagaaacatgcccatctaggagggaaaatcaatacgcgtgaagctggggaatttattatggaaacaggggcggattctattgtagctcgaaaagaaaacgttatgcccctgctagaagagctgtacttaacaaacgatttagtatataacgaaacgggcaaatcgtttatttactctgctaatgagctgcttccaattcctgaagataccatgttcggtattccaacaagcgtggaatctctttttaaaagcgagctgatttcttcaaaagctaaaattacagctttaaaagacttaattactaaaaatacaacgtttacgaaagacagctcaattggactctttttaaaacattttttaggagaagagctagtagaaaagcaaattgcacctattttatcgggcgtctactctggcgatttagacaaactcacgatttcttcaactctcccgtatctgctcgactataaaaacacgtacggcagcatcatcaaaggaatgggagccaatgaaaaaaaatttaaaacggcaggaaataaaaaattcatttcgtttaaacaaggtttatcaacaattattcaccgcttagaagaagagctttctgatgtaacgattttaaaagatacgccaaccaccagcataaaacggaacggtgaacgctaccaaatcagtacgccggggcaagcccattcagcggattacgtggtgttagctacaccgcacacggctgctcagcacctgttgaacgatcccgaattaaacgaagactttgagcagttaaaagattcttctctgattagcgtgtacatcggctatgacgttccagacgaataccttcccgctgaaggcaccgggtttattgcctctcaatcaagcaacttaatcgccaatgcctgcacgtggacgagcaaaaaatgggctcacacctctaagcgagggaacttgttagttcgcttattttataaaagcacgagtcaccactttgacagcctgcggacgatgtcaaaagcagagctgctagcagtggcacaaaaggacattgaaaacagcttagggatcaaagagcagcccattgaaagcgacgtaaccaattgggataaattgatgcctacctatcaccttaaacacggtgaacttgtacgcagcttgactcaaaaattgcatgacaagcaccccgctattacattagccggctgttcttactatggagtaggcattgcagcgtgtataacaaacggcaaacaaacggctgaagctatctctcaacagttgacttaaaaaaagtttgaaaacaataaaaggcctgaaaataaatatattattttcaggccttttattaccttttcgttagcatataaagctactttcattactattaacaactcttttatcgcttttctttttgcaaagcagcagtagcaaacaatacaagatagcgctcgtctgaagttaatctaagccaatgtttcactttatatctcacaggtttccgctcccttccttcaaggttttatatgaaaagactttatataaagattcaataacaataagaaatgatgcttgatatgtattttattcccacgcccgcttatttacaaacttttttaaacgtaagactcttcgtttatttccctgaaaataacaccgttttcgccattatcatcttactatttgagaaaaaagtgtacatttctttcctattttgacgaacattgcgataaataaaagctgccaattgcggcagcttttatgttaaaggactaatctaattatattgcctgatggatcttttgtgatgaaatcttggttttctttagacacagctgctccgatttcacgaagcttatttattgcctgctccctttcttcttcagctggaaaaacaagtgtaaatgactctaaaccaacgctgctttcaagaggactaggcgctccaattccattccaaacgtttagtccgatgtgatggtgatagcgcccagttgaaataaacaatgcttgattatggtaattgctcacaacctcaaaacctaatccatttcgataaaagttttccgtttgccctaattcagaaacgtgaagatgaatatgtcccattaaggtagctgaaggtaatcctgtccatggtttaccgtttccttcagctaatatcgcttctgcatctaaaggttttgtagccattactacttcactgtcattccattcccatgtacttgacggacgatctcgataaatctctatgccgtttccatctggatctgccaagtacagcgcttcgctcactagatgatcagacgccccttgaagcggataaccgctatttaacaaatgctgcagtatacttcctaaatcagaacgagtcggcaacaatagagcaaaatgatataagcctgttgtacgaggctgttttgctgtaacgttttccggctgttcaatcgataacagcgcggtgcgtccatcagctgttaacagagctttgttctcttttctccctaaaagtttaaacccgattatttgctgataaaaagcaagtgaacgctctaaattttctacttttaaatttactttcccaacaaatacatgaggtgcacggtgaaaattcatgattatttctccttttgaatatatcattttttaatcaacttactttatgtaacctattatatttttataactttatttcgtcaagttatttattttactatcataacttaaagcttatatcactgcacaaccaattgaataagcccggctgctcataacatagtatgaacagtcgggcttatttatcattatgcataaactatcaaaacagttctctgcttttgcgtttgatatttccattaacaaaatactgtattctctctttttgctcatttgttggctttttatacgtttcacattcaaactgaaaacatgctttttctaaatcgacttcatttcctacaatttctccaatcgcactcaattggtttaaatctcgccaaagttcctcagaagtttcagggtcaaaatgagatgagagataatactgcgcatcatattttttaagctctctctgaatccgctcaaagtcttctttatcataactccagtcaccgctgtaaaaatctggacatagacaatcacctaaaaacaggactttttcttggggtatgtagacaatagacgagtcctgcgcgtgtactcctccaatatgctgaatgcaacaagtggttccacctaggtcaacttccatatgatgatgaaacgttacgtctggctcctgtaaaattaacgcctctcgactcggcatttctttcttgatcatatcccggcaaaattcaatttcctccccctcctggacgcgtttatccaaggaatcatcgtcccagcgcagtgtctttaaataggccagctttttctttgttaaatgatggctgattgtatacttattcattgcatgaataccaaatgtatgatcccagtgccaatgcgtaatagctactcccttgattggagggacgcccattttttccacttcttctaaaaatgatgatgcatgcgcaggagaattcccggcatctacgatgaaactatacttctccccgcagataagcccgagcaccggccgatccgtttcttcagaatgaggaaagtaataaacgtaatcggttagttttttcagcatatttacacccgctttatgtagtttaataaaagcctctttaccaaatggtaaataatgataaataaactgtatcatactcggtgctgcttgcctatccaattagctgatattggacttttcttgaagagccatgactttttccagctctgctgctttgtactttaagaagatcatcacactaatcatcacaatcattcctcccactagctgagaaacagttgtcatttctccaagcaagaaataagcgagaatgatggcaccaattggctcgcctaaaatagccattgaaattgttgtagcacctacgtactttaacagccagttaaataaggcatgaccaaaaatattaggaataagcgctaaaagcaaaaagatccaccaatcttttgtgtcatattgagtcagcgatacgtttgtacaaatattgtagacaaatagaaccaggccaccgattaaaaaaacggcgaaactatagatgattggaggcatttccctgcataattcttgccccgccagcatatgaacagaaacggccgctgtacctaaaatagaaagtaagtctccgtaaagagccgttttggatactccgatatctcccgatgcgataatcactgagccgctaacagcaattaaaatgctgatgattcctactttgcttgttttttctttaaataaaaaataagctcctatcactacaaagaccggctcaagcgcagtcaaaatcatagcgctagcaactgttgtatgtgaaaaagactccatccaaaacagaaagtgaagccctaaaaacacgcctgatacagctagcattagccattcttttaccgtgctgtttttaaaaagaattttcatttgcctccatggtaaaaacggtaaaaataagaggaccgtaaacagcagtctatacattcctaaaatagaagcaggcgcgtccgaccatttaattaaaatagaagaaaaagaaacggctaatacaccgattaaaagaaagacaggaggcggtaaaggaagagttgatttattcatgccattaccccttttagaatctcttttttcatattcactacaggaatatccactccgtctctatgtacgatttctttttcctctatgtaaaagccgattgattcatacaaagctatattacgagaaacactcattctcaccttgcatgataaactttccttgccacactctttggcgtacgtttctaaccattgaataagctgtttagccattccttttccttggaaagcaggaataacagacaggcggtaaaaatataagcttgtttcttctagcgtaaaacgcgccatcgctaccggcttattttcgacgtataaaatgacagcttcttttccgtgctttaacgattgcataatagattccattgtttcattaagagcactggatggcgggacagaatcgcgatagacggagaaggcttgcagcataagatcgtgaactgtagcagcgtcctcaggctgtgctaaacagtacttcataaatttttaccctctttctataaaaattaagtatatcgaatcattatacaacaccacctatttttttcctacatcttttattgatttttattaagggtaataacctctttttacgcttttactccttcttaactttactccattaatctattaattcattagcacacactcttgagaactttttgtcgaaatggttaaaattctgttgggaggggaatcatcatgacattttcttggcttataccttacatagccgtgtcacttatcattgtcttaataccaggacaagacatgatttttgtaatgacacaaagtattgcttcaggcgtcaaagcaggcatcaaaaccgtattgggatctattacgggaacatttgtacatactcttttagccgcagtggggctatctattatctttcaaaaatcaattattgcctttacgattctaaaggttgtaggtgttctgtacctgctgtttttagcataccaatcgtttcgcgaaaaaagcggtccgttggaattaacagaaaacgttcagcagcaccatcactttagaaaaggatttgttagcaacttaaccaatccaaaagtagctattttcttcattactttcttaccgcagtttgttaattcgtctcttggacatgtaagtttgcagatgattttgtttggtatcatctttatcgccgaaacgctcatcatcttttcacttattgcgctatttgcttctggccttggaaaaaaagtcaaaaaaagccgtatctttcagcacacattaaaatatgtaaaagggacggtttttggcgtacttggcctaaaacttttattttctagcaacaattaagtaaaacaaaatgaaatttctttcatccctgctgttaccgccttttcatacccgcttcatttgtcatatcaccctatttttccatgtgaggttagttgacaaaagaccaaaattattattttatatatatataaggttcagatttagcaacaagattcgacaaggataatgaagaaaaacagcggggaaatagggagatctatctaaatagagggaaaattctataaattcacgttttttattattattctactataatttatgaagaggtgaaactatgcaagaagtagttcaaggttttgttagttcaatcaacgaatttctttggtcctacttactgattgcgatgctgattgcatttggtttgttttttacattcaggtcaaagtttttacaaattcgattattaaaagaaatgattcgtgtattaaaagaaggtgcggatagctcttctaaagacggaatttcgccattccaagcgttttgcatcagtatggcagcccgcgttggtacggggaacattacaggtattgcgattgcgatcgctttagggggacctggtgctgtattttggatgtgggtgcttgccgttattggttcagcttcagcatttatcgaaagtacattagcacaaatatacaaagtaaaagataaagacggcggcttccgaggcggaccggcttactatatggaaaaaggtttaaagaagcgatggatgggcggactgtttgctgtcttaatcactttatcattcggcttaatttttaatgctgtacaatcgaacacgattactcttgcgtttgaaaatgcgtttggaacaaatcgtttagtgttaggaattattatgacagtggctttcgctgccattatttttggcggagttaagcgtattgcaaaaatgtcagaatacattgttgtggtactagctgttgcctacattgcagtagcactcttcattattattatgaatattcaagaaatgccttctcttattgcgttaatcgttaaaaatgcatttggtttcgatcaaattgccggaggttctcttggagcagctcttatgcaaggaattaaacgcggattattctcaaacgaagctggtatgggtagtgctccaaatgcagccgctgctgcaacaacaagccacccggtaaaacaaggattgattcaagcatttggtgtattaacagatacgcttattatttgtagtagtactgcctttatcattttgctttcaggtacttatacaaataaaaatttaagcggtattgagttaacacaagctgctttaagcactcatattggttcttgggcaacaggtgctcttgcaattatgattttcctatttgcttttagtacattaattggtaactactactacggagaaacaaatattgagttcttgaacacaaataaagcttggctgatgacttatcgtgttgctgtacttgcaatgattgtgttcggttctatttctcaaattcagcttgtatgggatttagcagacctgtttatgggctttatggtagtagtcaacttaatcgccattctcttgctctcgaaagtggcctttgccgcactcaaagattatcttggccaaaagaaagctggaaaagaccctgtcttctatcaagacagcatttctggacttgataatattgatgtgtgggatcattcaaaagataaatctagctcgaaagaagcgatctaataaaaaaagccgtgaatattcacggctttttttattgtgcaaatttacttctttttctttcttctagtgaagcagtctaagactaaccaaatacctatagtataaataaatcacgccgtacggagtccagtaggaaaaaaatgtccagccgagattccatccgtttccgtatattactctttccatatgcacatacgttccttctaaaaatgtggtaaacagcgcaataagaaaaataaaaaaatgaggctttccaattcgctggattaaaaaaatcatatagctggccaatacaggatagacgcctaaattaaaaggcagcgcttctaatgcttcattttctaaagaagtgcggagtttccaaaaaccataatagctccctaattcattgataacgattgctaaaatgcaaaaagcagttcctactaaaggcagtaaacgacgatttttaggatgtaaatagaacgtgccaaaaatccaaggtaaaacaaacgccagcgctatattgataagcaaaaatatccgacctttttctttctagtatgccacaccgtttctttttctaatcatctctttaccttgaacgcagcaagcgtaaaagcaccttatctctcctcattaaaaaagagtgcttactttatgattactaaggttcctcccttgcttcttccatttattttaatgaaacaaattcagcgtcttttttctcgtaatagttttgaactaaacgccctgataaagcagctaatacctgctgaaataacatccccagtacgacgggtacagcaacgggagctggaaaataagatacggctaatacggctccggcgctaatatttctcatgcctccgcaaaacgtaagcgtcacaacttttgctcggtcccatcttagccatttgccaatcatccagctgaagaaataaccagctgaactcattaaaaagacgatcacgataataaacagcagttttttatcaatatgttttaaataaggtgcaatcactcccccgtttatcataaccatcacacttaaccctattttcgaaacaggtgccagctttggtcctaatgtctgcttaattgctccttttgtatattgatttaagcacatgcctaacaaagatggaaggacaatcataaaacataaatctttgactaactttagcgcttccaaatgcacggtgtctccaaccaccaataaaagcgtataaggaacgataagcggcgccaaaagagtatcaattaaaataatggatagcgcaagaggaatgcttcctttgtaaatcgagacccatataaaactagtcactcccgttggaataatcgctgctagcaaaagacccgtgcttgtaaatacatcatgtggaaaaatcacttggccaacgctccaagcccacgctggcataaaaatatgtaaaacaaacaaggccataatgattggaaatggacggtgtatcgtggcatttaactggtgaaagtttgaattcaaacttccggcaaacgtcattaatgcaaaaagccatggaattaagaaggtatactgacttaatgacgaaccgataagaactcctatgagcaagctgaccggcgtaataaacggcatcaatttttctagcattctattcaattgacttaacaaagtttatccctccaacgaacgttttaaataaataataagataaattaacgtttataatatcatctatttattatacaacttattttcagactattgtctgtctcttttactaaaaagagatatattcataattatcacttaaatagatttacaggtatttttgtgctattttaatagggaagaatcttttaaaaagcatgaatttagggtaaagaacactctacatagaaatgctttcaatcgacggatataaatggactgtagcacagttttggtaattaggaggtttgtatggattttttgaagtctctgtcatcgttagatgattggaaaaaaatcgtgattgcgattgggatctttttgatctttttaattcttcgcaagctgttcacgacttatttgtttaagtttattattggttttgtcaaaaataaaaaaatcaatttaattacgagcgttttagaagcttttgaaaagccgctgcgctggatttttgtcattattggtttcaagcttgctcttccctatcttccctttgatgttttaacagccgacacggaaagacatttagttcgttcagcttctgttggccttgcaggatggggcttgtataatttagctgcttctaccaatttattttttgcaacatttgccaaaaattttgatatccaagtggatcgaatcattattccttttattgaaaagttcatccgcatcgttgttgttatgctttctatctccatcatcgcagaagaatggggttttaacgtaaacggctttgtagcggggcttggcttaggcggtcttgcttttgccctagccgcaaaagacaccgttagtaatttattcggcggaattgtgattattaccgaaaagccttttaccattggagattggatcaagacaccgagtgttgaaggcgttgtagaagatattacgtttcgaagcaccaaagttcgaacgttcgctcaagcagtcgtaacggttccaaatgctactctttccaatgagcctattattaactgggctaagatgggaaaacgtcaaattgcctttcatttaaacttgaattataatacaccaaaagaaaagttagaaaccgtagtggcaagaattaaaaagatgctgacggagcacgaagaaattcacaatgaaacgattcttgtaaattttgacggcttctatgaatctagtctaaatatctatctgtatttctttacaaatacaaccgtttttgctgactacttagatgtaaaagaaaatataaacttcgaaattatggacattcttgaagaagcaggcgtagaatttgctttccctacgcgcacactcatcgttgagcaggacggaaagctttctggcaatccaaaagaatttctagaaagtgctcgaagctaaaaaaagctgactactaagtcagctttttttcctttcttttttagtttgaaatgaacatttgagtccagtaatgaccgtagcttccgcctttagcgtaacctactccgatttcggtaaattgactcgatagtatgtttttacggtgaccttcgctattcatccatgcgttaaccacttcttttggagttgcttgtccagcagcgatattttcacctgctgtactgtatgtaatgccaaagtttttcatcatgtcgaacggacttccatatgtaggcgatgtatgactgaaataatttttatcaatcatatcctgcgatttatagcgagcaacgcgagctacttcccaattagactttaaaggcttaagccctactttagcacgttcttgattcactagctgaaccacttgctcttcgtatgaacttcctgctttatcggttggaatagtaattttctgtcccggatagatcgaattaggatttttaatagcagaattcgcttcaatcagctcggaaacgccaacctgatattttactgctattttccacatcgtatctcccgattgaacggtatgtacggttgctgcttgcgcagtgttattaagaccaaaagctagagtgacagacaacagtgttactaataaaaattttgatagagttttcatacttttattaaagcaaattgatttcaagattcatagcggtaatattatcccttagttccatcatattactttttcatcttcccagcgcgcttttttcataagaaaggcgcattgcgtttttgcaatgcgcctttttgttatgaagataaagcctgtgactggttcatgtccgacacattaaccgcttcatccgtgctttgatgcacctgacgttttttgaccacatcaatatattgaatgtgatggccttccattttcgtaacggtaaagtcatactgatcaaagctaaggctttctccttgcttgacgtcatatttctccgtcaagacccagcctccaattgtatcaacatccgtatcatcaattgttgtgccaagcagctcgttaagctcacttaccaataatttcccatctacaatataatgatcgggtttgactttctgaattaatggaagttcatccgcatcaaattcatcacgaatttcaccgacaatttcctctaaaatatcctctactgttacaattcctgctgttccaccgtattcatcaattaaaatagccatatggatgcgttcacgctgcatcttaagcaataaatcatgaataggaatcgattcaattacttcaataacaggacggatatactgttttaaatttattttttccttgctgttgttcatgacaatctcggttaaaatctctttcatattgaccattccaataatatggtctttatctccatcgatgaccggatagcgggtaaaccgctcttcttggaccatctcaaggatgtattcgaccgtatcttcctggtcaatcgaaacaacttccgtacgcggcaccataatctccttggcaacgcgatcatcaaagtcaaaaattttacttacatatttaaactccgattgattgatttcaccgcttttatagctttctgataacaagatgcgaagctcttcttcactgtgtgcaagctcattttctgaagcaggctttagaccaaataaccctgttattaaacgagaagaactgtttaatagccaaatgaaaggataggttactttataaaagagtataagcggacgaacaaataataaagtgactttctctgctttttgaattgcaaatgttttcggagcaagctctccgaccacaacgtttataaatgtaacaaccgcaaaagaaatcgcaacagatagtacttttgttaaagctccgcttatccctagttgatcaagtaatggtgacaggagatgcgaaagtgtaggctctcctaaccaaccaattcccagcgcagtaatcgtaataccaagctgacacgcagataagtattcatctaaatttgaaataacttgcttcgcagcttttgcattgctgctcccttctgctataagctgatccactttggaactcctcacgcgaataatcgcaaactcggtagcaacgaaaaaagcagttaatgcaatcagtaccgctagtaaaatcaagttaaatatgtccaatcaagttccttagctcgtttaaaaacgagtaaggactcacctcctaaaaaataaaaaatttggataaagaactctatccctgtactgatcacttggaaaagtgcatataaggaggaatcacatgataaatgtataaacatttttatatggagcaaaactgccagtctttcttccttatctcacgtttcactcgttagtgtagcaggtcattctttattcagctgttctagatgtgaagcaatggctcacatcgcttcatttcatgatgttgcttcagcgctgattctctcttccattcatttataaaaaatttagtagtttacaatctttataaagttaaagtctgttaacgtcttaaaagagcgattatgtgataaagagcgatatgcgtgaagcaaatgtaggtttatataatactgtattgtacggtttgacactggtgcatataatgctacttcgccaacgtggtacactgccccatccaatcacctctatttccgtatatctaaaaagaataaggaataattatcctatttctttttaaacttattgactttattttaaatgttaaaaactttgcagtcaaacgttttagttagtctcctgcccttgctaattactggtgcggcgatttttagcaggtaaataaaagcttgctgctacacaaaaaaaaccaaggacaaaacagataatggggagtttcatacctatcgcttcagcataataagtgagactccttccgtgaatagggacaagattcatttcaaaaatcaaagtcaaaacagctgtcactttgagtgcaataccaacaatgaagagacaaactctcaagcctacactcatatgcgaaaacatcccttctatccattagcgaatggatgatgtactacaccatatgatacatccctacactttatcactaaatgctaaaaaagcgctatgtccatgcatagacgcttataaatttgcgaccacttgtccaatggaatcatagatgaccaaatcaaacaaataatcgtaatgcgtaggttctttattaatcatcaccatgtttgtacgattgtaccggctcacaagcagcggaatctgattaatcggtgctacttcaagcgatgaaccaagcacgatgaataaatcagatgacagcgctgctgtaactgcttcatcgaactgatgaatggcatctccaaaaagaacaacatttggctttaaaaggcgctcacacgctgtacattgtgggagagctgactgatttaaatacgctaagtcatactcttctttacagctcggacaatgagctctcttaatggatccatgaatttcaaaaacgttcgtgcttcctgcatcttgatgcaagccatcaatattttgcgtaattacatgcacagttttggcttcttctagttcagcaataaagcgatggcccgtatttgctttatactgatgcagcattttaatatgaaaaatttctttaaacagcggccaaaattcatgaggatattgttcatagaagtcagcagctactatgtccacaaagcttttattttggcgatataagccattttgagagcgaaagtccggtatgcccgactctgtgctcattcctgctcccgtaaaaaaacaaatgtgtttagcatcatcaatgagctgttttaattctttgtactgttttaccattgcatttctctcctatttaacaattagcacaggaatcgctacttgctgtgcaatcttagaacttacacttccaagcagcatgccttttacaggatttaaccctctgcttcctattactacaaggtcaaatgaattttgattagcaaattgaatcactgttttagccgcgtctccatgcataaacgtaatctcatactccacgtttccttgctttaaaatttcatctgttgtatgtatccgactttccctttcctcgtcgcggctaagtgattttaatcttgaatcaccctctactgcataaataacttgaataaaactgttttccgtcagctgagccagctgaacggctttttctgttgctttagctgcatgctctgagccatctgaggcaagtaaaattcgtttaaacatcacgcttcctctcctcttttgtaaaatggtcttctctctttactatatcactcgctgttcaaatgtaatcatttttttgattatttctataatttttaaaattatttgtctacttttatgataaactgaaagaaaacttgtacagaggggatggaacgatgtttggttttgaattaatttgcactttttgcaaagggctcggaaagctagccgttattcctggtatcggttacatgaaaacatgcaaacactgcgaagggacagggatgcaatcaaaaaaagacgaaactccttccatataagaagtttcgcctcagccatactgtgattagattgaaagttctttagataaacggtacatatcagcattgatatggtgaggttcacctaaaatttccataatatcataatctacaatttcatttttacggataccgattgcacgaccgcctttaccttctagcagaagctcgactgcacgaccgccgaaacggcttcctagcacacgatcttgagcagttggggaaccaccgcgctgaatgtgtcctaatactgttacacgcgtttcaatacctgcagcttcatgcagctgcttcgctacttcattaccattggctacgccttcagctactacgataatgctgtgctttttaccgcgctcttgtccttttctcaaacgatcaaccatttcttggaactcatcttttgcttctgggataaggattgtttccgcaccgccagcaagacctgaccaaagagcaatgtctcctgcattacgacccataacttcaataataaacgtacgttcatgagaagtcgccgtatcacggattttatcaattgcatcgataaccgtatgaagagccgtatcaaatcctaatgtaaaatctgttcctggaatgtcgttatcaattgttcctgggataccgatacaagggaaaccaagctctgttagttttacagctcccatatatgatccgtctccaccaataactactaagccttcaataccgtgcttcttaaggttttcaataccttttaaacgcccttcttctgttttgaattctggacatcttgcagaataaagcatagttccgccgcgttgaatgatgtcaccaacatctccaacttctagctttttaatatttccttctattaacccttgatatccttgatagataccgtaaacttccataccttcatgaattgctttacgcacaacagcacgaaccgcaggattcatacctggagaatctccgccgcttgttaatacacctattcttttcattactttcacctcatcaaagtcatatacatgactactatattatagttctacattttacccgagttcgaactttttgtgtagtaattcacaacatatttctttgttaaattttaaatgtacatactttttcatatcttttagttatttaccgtcaaatattcaaagtttttctagcaatgttgcacatctaaagaacccttttagctacagcttttataagactatattcacctttatatttcatttttttcatatatgtaatgaaattgtaacgtagaacactgtcgaaagatgatatgatgaatttactcaaatcaggaaaaattttcagggggtactagttttatgaaaaaagtaatagcagctcttacgcttgctggcgttattgtttctactagcccgattgtcagccaagcggctctaggcgaccaaacgcttcgccaaggcatgaatcaccaagatgttaaacaactacaacaaacgttgaaaaataaaggttattttaaagggaatacgactacatactttgggactgttacaacttctgctgtaaaatcatttcagcgcaaaaatggactagcagcagatggtattgtcggaaaaggaacgtatgctaaactaggcgtttcagcaaagggtaaatcgccttctagctcagcgcgctataaccctaacgcagtgattaacaaaggaaaacagtatatgggcgttcgatatcgctggggcggaacaacgccaagcggctttgactgcagcggttttattggctatgcgttcaaacatggcggcggggttcagcttcctcgaacagtagctcaaatttatcaaaaaggcacgcgcgtctcaagtccaaaagctggggatattgtgttcttccaaacctatacaaaagggccttctcatgcaggaatttatttaggaaataaccagtttcttcactgttcttcatctaaaggtgtgagcatctcttctctgaaagagagctattggagcaaacgctatttaggtgctaaaagaatgtagtttctataaaaagggcaagctgtgcgattttgatgcggcttgctctttttctgcatgtaaaagatttggtatagtagaagcagcacattacattgcaaaaccaagcgtgtagatgaatactatgaaggaagttgaataaatgtacacccttttaattgacatggattctgtcatttgtgatcttatgacggattggcataaccaatataacaaagattattgcgacagcttatcggttgaaaagttaaaatgctgggaatcagaaaagtatgtaaagccggaatgcgggacaaaaatttatgactacctcgatcagccggggctttttttacatttaaaacctctgcctcatgctgttgaggttcttaaacgactttatgaaaggttttccattttaattgtcacaagcagccgtacctatgcttatacagaaaaagagcagtgggttgaaaaacaccttccgtttatcggaaaatacaatatcgtgtttacacaccaaaaagatagaatatacggagacttgctatttgatgatgcaccgcataatttgaaggcttttcaagctacaggtcgccatgctgttgccatgagctacccgtataacgaagaagtaaaggtccctcgcgtgaacgattggcttcagtttgaacagtacgtaaatacttattttaacgaatgttaagctaaaaaaacacgtggactttgtcatcagagaatgaatgcagtgcgtttgttagcacagctacaagcataaaaaaaccgccttttgggcggtttttgacggatagccccctaagggttatccgctttttatttaaaaaagatatagttttttagtacttatcagctgatgagaaaaagtccataatggcatggataatttcaacggactgaaaagaaaacaatgatatggctgttaatgaaaagaaaccaatcatggccatacgtacaagtaacatagactaatcgcctccctgttttgaactaaatgaacgcacccaaaacaattcgctatctgtctttgtttgtacgacgttttcgccaagcaaaggcagctcattcactgcgtgtaacaataacaatgaatcttcatctttatcttaaagactaagcgtatagttagtatatcaaatgaaactttttcttcaaggctatactagcggtaaaaaaggaaatagtatgaaacgatgcgttttatctttatttcatacaattcagtaccctaatatttattatattaaaccttttaagaaaattgctactattatatctttttttataaaaaagatatcgagacatagctacatacagtaaacctgcgttcaccatcacaatgaaaaaatccgaacgattcatcgttcggatcctctttcaactaaaatacttttgttccggccttccccattttatcgacacgtactgtaatactcattgacaatgtctaaaatggttgggtattcttccacccatgtaaaatttgttttttcattttctttttttactgtttcttgttctgcacctatcttttccattgttcaatctctccctttaactgttatataacatttatattaaattaactttgttttataacaattttcagaaaaaagttggacaatgacgtatgaaaaaaagttattgtgccgataaaatttttacataatacgtacgagtcctcggtccatcaaactcgcaaaaataaattccttgccacgttcctagcagcagctgcccatcgtgaacgattatatgctgagaggagccgaccgtgctcgctttgaggtgcgccgccgtatttccttccatgtgaagatctaacttatgttcccaaggatatacttcatcgaagcgccggatcatatccgtttttacatccggatccgcattttcattaattgttataccagcagttgtatgaggacagtaaacaactaaagccccttcttttaatccttctgttcttagtactgcctgcacctgactcgtaacgtcaatcatttcgtcacgcttattcgtttttaacgtaaatgaatgtagcatctcatcacctcttttctttaccataacatatcttttctattcttccacatttttcgcataactcgtttttacatcgtaaacactaagctcattaatacaataggcggtgagtttatttatgctcgattcaaaatttcagcccaatgcagactacaccgttcaaacgtttctagatttggtgggtcaaaatacagatgttggttccaaaaagttatggctgtctcccacaaaatatatatgcattatttatctccaaggattagtcgacggagaaaaacttgataatcttactcagcatgttgttgagacaaaagcaaaaagtgaaacgcaaacactcgatgacatcgattcgtttatttctgtcattaaagacaaagaagtttatacatacaagcaagcgatctcgtgtttttttaaaggtcagcccttgctgtttattagcgaaagcaccacggcatactcattgaatatgtctatgaccaaacagcgctctttaagtgaacctacaacagaaaaagtagtgcgcggccctaaaattgctcttatcgaaaacttagatgaaaaccttggtcttttaaggcagcgttctaccgaagaagaaatggttattgaagacatttatattggaaataccaaggaacatcgaacaagtatcgtttttcataataaacactgtcaaactcacatcgtgaatcaagtccgagagaaattattagacattcctttagataacattcaagactcaggaatgattgaagaatttttagaagaagcaccttactcaccgttccctcaagtacaaaatacagaaagaccggatcgtgttctcgctgcggtgaatgaagggcgagtagccattttagtagatggctctccttttgctcttttagtgcctacaactttcgatatgattatgaaatcacccgatgattattacgaaagatggatagctggttcgttgctaagattactaaggtacttgtctatttttattaccctattcttttcagctatttatatttcactcgtttcgtttaaccaaggtctgcttccgacggaactagctattactattgcggccacacgagaaaacgttcctttttctccttttatcgaagcggtggttatggaagtgacgcttgaattattgcgcgaagccggtctgcgtctccctactcctgtcggacaaacagttggacttgtaggcggggttgtgattgggcaagcagcggttgaagcacatatcgttagttccgttatgattattgttgtatctgtatcggcaattgcttcctttaccgttcctcagtatggaattggcctttcgtttcgaattttgcgtttcgtatctatgatgattgcagcaatctttggattatacggagttaccatgttttttcttgttctcgtcattcatctaaccaaactcgaaagttttggtatggcttacttcaaaccgttttttgcgttaaataaaaaagcgtggaaagactcttatattcgtctgccaaacaaaagtctaaaacagtctaaaaataaatctcaacaaaactgacaaaaggaggaccatatgcaacaatcacagtcacaatcaagcaagcttctttcagacttttatgccatttcaattatctcttcaaccatgctgggcgtcggtttattaacactgccaagcagcattacaaaccagacaaataatgcagatggatgggttgtacttattatggacggccttttgtttattggaattgttctttttttagtctggatggttaagtattttacgattagctgtatgtttgatttctcgcaagaagtaaccggcaagtttattggaaatatattcaattttgttatggtcgtttatttcacatctgtagcaagtttcgaagtaagagcaatggcagaaatgattcacttttatttactggaaacgatgcctattgaattaattattctttcgtttattttgacaggcgtctatttaatcactggcggcatcgattctatcggaaaagtaatggcgctatgtttccctgtaacggtcatcattcttcttatcttatatcttcttagcatcggaatggtcgatttaaaaaacttacagcccgtgttagccgatggcttcagcccgcttctttctgcttttacaaccgtctctgtttcctttttaggggttgaaacgattgtatttcttccaaagcatatgaaaaacaaaaatcatttacgaaaagtttccatcatcggattttccattcctttgtttttatatattatcacttacatattagttgtaggcgcattatctgttccggaggtaaaaacaaccgtttggcctacgattgaatttgttcagacacatgaagtaaaaggaattttctttgagcgacttgaattatttttgcttattgtctggcttcttcagttttttttaacctttgtaatgtatttctttttagctgtttcaggctttaaaaagattttcaaaaatcgatcaactaccaatattatctttcttgtacccgttttatttatgagctctttagcgcccaaaacagcaagcgacgtgtcgcatttttcaacggtattaggctgggcatttttagtaacatttttagttatccctctttttttcagcatgttaatgaaaataaaaaaggttgtgttcaaatgacgaaaaaatgtcttcctgtcataatgaccatttttttattgtgcggctgtacaaatcatcgaaacattgaacaacttgctcttgttataggagtggcaatggatattacatcgaaaatcgaaccaaaaacaggaaaaaatcagcttgtgctgactcatcaaacgttaaccgagacagaatccggaaatatgtcttcttccattccatacaaaaacattacaacagctggtcctacaattcatgaaatcacgcgaaatatttcgctgaaatctgatcctatatacagccagcatcagcgagcacttttaataggagaaaaagcgagcaagaccatccctcttgatgcgcttatcaatcagtttgtccgtgacaatgaaatacggcgcagcagccttgcgtttgttacaaaaggcgatgctaaaaacgttttaacgattcaaggaatgtctgtaccgcctgtaaacttaatttacgaacttgtttataataaattcaaaacgaacaaaattctaaatcccctaacaatgggagagctatcggctaagttaaaaacagatcaaagctttttaatacagcggctttctaaaattaaaaatagcgtggaaatagacggcgcggcaatcataaaagataaaaaagcaaaattcaccttaactcagcaccaagtggaggctttaacgtggttaacggggaatattaaaggcggaattatttacggcaaacacggtccataccccttttcctatgaaattggagatgttcagcaagatgtgaaggcccggattgattcaagtcactccgttcattttgacatcaacgttcaaacaagcggcaggctatcagaagattgggagacttcaaaacaggctcttgccgcatctaatgtaaagaacaccgaaaaaaaaatagaaaaaatcattcgaaaagacgcagaaaaaacactccacttactgcaaaacaactacaaagctgatgtgattgacctgcatgattacgtacgaattcatcatcctcatttttgggaaaaacatcagcatgaatgggatgaaatatttagccagtcgaccatcgactatcatgttcatgttcaaattaaagattttgggacacagggcagggattagctcttattactcaacgccagcttcagtcagctcttttttctttagttccataatcgtgaacttatcggtatagtttttgctgacgaacagctggcgttcattgtcgttattaaaataaaattttttatcatcttgatattgaaaattcacttttttctttttcatttgtttaataaacgttaagtagtcatctgaatgaatgagataccttttaggcttatccgatatttgcacaacgtcttcgcctgaagactttaattttacaatactccatgcaatgggaagaggattaccttcttgaaagatcgttttgtgaaaaatgagaacaaagaaagcagctgtaataattgaaataagaacaagctgttttttcaccgtatatcatcctttcttcacgtcgttactacgttaagtaatacgacaagcgtatgaaaaaaccttttcatacgcaaaggttgtgtaaagaaataatgcaaaaccaacaaaatataacagtttggttaccttttgattaaataacattacttctttacaaatttagctaatcacgtgatagactaaactcaacatattaagtcaggactaaactaaatgaggtgttgcgtatgactacaatgcggcttcaatcatacttaacaacaatgtttccaaatgttcaaatgaaaagacctcttttttataacgcgcccgcaggtatccgctttacgcttaccaatcaaaaaggcgtatgggaacgagaatacatgaaaaatgtgtacgcacgcgcttatgaaatttttgagacactccatgaaaaaaatgatgagctgttacttgttttcaaagcgaatgctgcacaggatgatttacttttaaaaaagaaaaaagaaacagctattaaaaaattcattcgctctcgcctgaagaaacaagaagttcaatccgtagcattattaaataacgctgagtatattattgcctgtaaaacaaatgatgtgaaagaaaagcttcttttgcaatcaattgccaaccgcgatcttcatattcatccggctattgaagaagagtgttatattgtgaatttgaataaagaaaccatcttccacctatacgacgagcgcgggctggacattgtatcgaacaatcagtcttctcttcaacttcttcagcaaaagtttcacgactggattctagatattgatgcagcttgctctaaaaaagtacaataaaaaaagcaatcattcagtaaaggaatgattgcttttttattaggcttgatggacaggagacgctttttttaaaaacagccagttgataagaaagaataggaagcttacgataaccattgttccgaatgtaagtaacaacgacccgttcgaaaagctttttataaaatgaataaccggttcttttgtcactggaatcgtaaacagtaaaattaaaacagcaccggtgatcatccctcctgtttgcccgaatttgtaaacgatgctgccgagcaaacacgatgctgctgtaataaaaaagataaatacagcgtccgttacaaagtgaacagcgacagtagggtcatgaaagataaaatcgctcgcataataaagctgaacattcattaaattcaaactattaatcacctttattgaaatgctcatgatgacaacattgataagggacattacaattgcaaataaagcaaaaacacaggtcatcgttaaaagatatgctttacgagtagctcctaactttaagcaaaaggagaaactttttcgaatgataataaaacttacaatacctgaaaagatgtactgcggcatacttgttactaatagaagatgctcattcacctgactgaacactaaaatatctactacaacaaaagctaacagaatcgtccaaaagcgaatcattaaatactttagttcaacgtagagcgaataactaatggcggcaaactgtcctttcattacgctacacctccacgatttgctgtaagataaatcataatatcctgtatgtgaacagcttctacatgaaatgaactgtcgacaagctcctcagcataaatatcttcattaaagagcactatttttttctctcctccgaatacttgttcatggattacttgctttcctttttcatattcttcaatttgacttttaggtcctttcacacttacacagcgctgctgcaaattttctgctgtatcctgaagaatcagctttcctttttgcataatgagtacttcttcaaataaattacttacctcatcaattaaatgcgttgaaataatgaacgtgcgtggatattcttcatattcatccaataaaagctcataaaaacgcgctcgcatcgcagcatcaagtccaatataaggttcatcaaagattgtgatgctcgttcgagaagatagcccaacaataattcctaatgctgattccatacctttagataatgctttcactttcatattacaatctaaatcgaactcttccataagcctctcagcagcttcttcgctccagtaaggataaaaaagtgacgcaatttttagcatgtctttgacttttaatgtttttttaaaatttccgctttcgttaattaagcagatgttttgcaaaacagagcggttttcaaatggagattgatttcccacttttacctctcctgtcgtaactggaatatgcccggctacaatttgcatcagagtcgttttgcccgctccgtttctacctagcaacccgtatattttattttgtgctagcgtaagtgaaatgtcttttagcacttgtttagctccatagcatttatttaacagctgcgcttctatattcattttatttcccccttgtctaacagctcttttaactcgtttaccgtaatccctaaatgctgtgcttcttttttcaagggaacgataaaacggttataaaattcttcttttctttgtgtaagcaatacttctttggcgcccgcacatacaaacatccctatccctctctttttatacaatattccgtggtcaactagctgattaattcctttagctgctgttgcagggttaatgcgatacattttggcaaattcattcgtagacggtactctttcttcttctggaaaagcatcattcaaaatattctcttcgatggtttctttgatttgttgaaaaattggtcgctgatgatctaatgattgtttcattttgactacctcacttaagtggttcattactcatgtaactaactatataactaattggttattttttcaagcgttatttccaaaaaaagaaaaaaagtccgtcagttagttactgacggactttttcatttgactgtttaaccacttgaccgttctttttgctagctcatcctgctgctctttaggggaaatactggctttgttgtcgcctttttgtttcccgtacattccaaactgtgcgtgattagctccttttacttggaccagctccgtattttttgaaagtaaatgcttggtttctttaattttttcaggcgtcgacaaaccatctttctcaccggttaaagacaaaataggataagtggaagttgaaaaattatttttattcatcggatacgatgctaaaagaactaagccttttattgagttttgatgatcatacgcataagaggctgcactcactcctccaagggaatgccctccgataaaccatgcggaaatcttcggatagctcttcacaatatccgtcgctttgttttgactaaaaaaactcatattaaacggagaatctacaacagcaacaagatatccttcatttgcaatttgctgagcataatagccatatgctaacggctctactttagcaccttgataaataatatagccggcttttatctctttgttcgtttgaggcttgaatacgtaataatcgtctttcttcactacttttttctcatctactagtgagtgaagctgctttgaaggttcataatcaaaacctgaccatatgacaaaaaaagccacggttactgcaacaagaacagcaagaccgactcctaatatttttaacgtttttttcatgtcactccctctttctgtttttttactctgtactctttttatatcttttagacattttacatgtttgttttaaagatatacaaggaaaaagagaggttcgatatgcccaaagcaggacgcagcagaagtgacataaaccattccatatactcgaaacaaagagagaaaattaaaaaggatgctgcatgtaataacgggacagcctcattagcagacaaccttcactaatgaatatctcgtttcttaaaccttcctcccctgacttcagcaatagccgctacagcaaaaaaagcagatggatctatctcatcgataatcgcttttagctttgcttcttcaagcctggtaataacacaaaaaatgacttttttatcatctcccgtatacgccccttccccatttaaatacgtgacgcctctccctaaacgagcaagaattgcttcgccaatttgttcatattgttcgctgataatccaagctgacttagactcatctaacccttgaatcacaatatcaatcgttttaaaagcaatgaagtaagccattaaagaatacatagcgcgatcccagccaaatacaaaaccggcacttcccaaaataaataaattaaaaaacataatcgtctcacctacggagaaaggcgtacgcttattaaataaaatagctaatatctcggtgccgtctagcgaacctccgtaccgaataacaattcctactcccacaccgagaacaattccgccaaacacagtggctaaaagagggtcacctgttaagaccggtaagtcgtgaaaaatagaggtagcaatggatagaatgataacacctaaaagcgtagatagcgcaaatgtttttccaatttgcttgtagccaataaaaaagaatggaagatttaatacgaagatataaaagccgatttgaacatccgttaagtgggataaaataatagatatacctacaattccaccgtcaataacctcattagggacaagaaaaaattctagcccgacggccattaaaagggctcccactaaaataaacagcatgcgctttacaatcattttagctgatagcgaacgatgaacaaccttttttatttcatgattcgtttgcagcacataacttcccctccttttatgatagagacatcaactaataaccaaaccctccattttaatattatcacaaaattcaaactattcacctgctcttttacaaaaatttcatctaatgaaataaattatgcatatattggataaaattgtagatgataacaagtgaataaatgcccgagtacgttcaaaagtgaatgcatgcccaccacttttcatacgggactaacaggacaaacttagattaaaaggagagtaaaacgttatgaaccgtgtaaagattattgctgcttctttactcacagttttattgctagctttttcagataatttcacttctgcagctgtgcaggaggcgatgatacgagttgtgcatgcgtcacctgatgcacctgaagtagatatatatgtggacaatcaaagcatcgtagtcggcgcatcgtttaaagatgtgacagattaccttaaggtacctgcgggttctcataaagtagaggtatatgccataggtacaaaaggaaaagaaaaacctgtcatttccactaatgtaaccgtcgaagcaaacaaagcctataccctggctgctattaaccaagttgcacacttagaattaaaagtagctcaagatgatatgaacgtagctaaaggaaagagtaaaatccgaattgctcacttttcttcagacgctcccgctgttaatgtaggtattaatcacggccctactttgtttaaaaacactgcttttaaacaaatgacaaattattctgaagtagatgccggaacctatgatttgaccattacaactagtcaagacaataaaaaagtactggacattccaaaccttaatttagaagccaacacggtttacacagtgctcgctattaacaaagccgacagtcttgaaacgcttttattaaaagataatacggctatgccttccgaaatgccaaaaacaggtatgggcggtgcttcacaggataattataattcaattgtgccggttcttactttattaggaattggagcggtcgctatatttgttgttcgtcgtcacagaggatacgaaagcgaatgaaatggataggaggggttttcaccttttcttttatactattcatgagcagctggtttgcccaatcagcaattgcaaacagctcgacagattttgttgtgaagatggctgaaacaaaatcagctcaatccttgaaatcttcaggaaatgcttctacgcctcttccatctcagcttattattccgaaacttcatattaaggcttttataaaaggaatgggccttactaaccaaggtgaaatgagcgttcctgataatggtcatgatgtagcttggtttaagctcggagcaagacccggagaggaaggaaatgcggtcattgcaggacatgttgatgatcaaaaaggacccgctatcttctatcatctcgacaagctcacaaaaggagatgaaatttttgtaaccgatcagcaaggggatcagctgacctttgttgttaccaataaagcttcttatccccgagattctgctcctatcagaaagattttcggtccaacttttcaacaccagcttaatttaatcacctgtacgggaacgtttgatcataaacagaaaactcatgagcgaaggctcgttatttatacaagccttcgcccggaaaaaacagccgatgtttctcactaaacatcggcgtttattacttttaattacatactggttcgttttatttaaatatttacacagccttaatatgaacacaacatctcactagtaaactaatgcacgacccctcaataaaaaggagttttgatatgagacgaaaatggtggtttgtaagctcactcactctttgtttatgcggcatttttatgtttatacatacgcaggccgcttctattcaagcagaaaaagtagccattattgctcatcgaggcgcatcagggtatgagccagagcatacgatgcaatcttatctcgcggccgtccagcaaaaagcggattacattgaacttgatcttcacatgtctaaagatcagcagcttgtagcaattcatgactacaaagttgaccgaacgacaaatggaacaggatatgtaaaacagtatacagtgaagcagcttcagcgtttgaacgcaggaaaaggtaataaaaaagccgtcattccaactttagaagaaatattccgtacgtttggcaatcgaacaaactattatattgaaacaaaatctcctcatgaatatccaggtatggaaaaggaattgttgacgttgatggctaagtacaacattcataccaatcacgtcattgtacaatcatttagtcctgaaagcttaaaaaccgtccatcgataccgacctactatgaaactaattcgactgattcgttctaagcaaaccaatatgttaacagatcagcagttcagacaaatcaaaaggtacgcgaacggcatcggtccgaacgtaaacacgctgacaaaaccatatgtacaaaaggctcgctcgtacgatttagacgttcatccttatacagtaaatgacgaaaaacaaatgagaacgcttatcgagtggggcgtaaccggtatgtttactaattacccggatcgtctttataacgtgcttcataataaataaacacttgccgcggcaagtgtttattctttatacatctcttctattcgctctccacaagtacaggctaattaatgctatagcataaagcaaagcccatccaaacaccaaaaatttgtttaatccttcgttaataaattgaatgattgcagatacgggtggcaaaacatacagcagcagtccgcctccttgatacggaaatgagacgcctgccgctgcaagcgtaacgattaaaataaatagaggtccaaaccacgataagctgccttctcttacaacatctcttgtaaaaacaagacctatgctcataccaagcaaactaaatgtccagtgaataataaacccaaacaccatttgcttagtggatatatccacttcaaacatatcaagcagcacgggataagcaattgaaaccgctgataaaaacgtaaacagcagcatacaggtaataagcttgctcataaagtacttgttcttttcccctacatgaagttttgtaataacttcttgactggaatcttccgcgtgaaacagcgacatcgtaaaccaagtagttagaaaaaagaggaaaagtgccgtattaaaaaagctatcaagcaccgggttcggtctatatgtatagttcatacacagcgaaataatataaagtgcaagcggcggaatatatcgatacgatttaatgtatgtaataaaatgatagcgaatcaatgcacccatcttaaatttcttccctttccatatgatatagctttacaacttcagcttgaacagcaagcaattctgcaagaaactcatttacatattttttatctatataaaaaatccagtagtttccgtgctgttcaattttcgtgcacttttcttttaataaacgaagcggcttattgagaatgacatttgcctcaataaccgttaaatgctcaatgagttgaacgcgctcattttttaaaatgcgctgtgagccaatggtgataacacgatccgctacagcatgaatgagtctttcttcatgacacgtaaatacaatggtcatccctcgttctttgagctttgtaaaaattcgttctacttctagctgagcacgagcatctaatcctgatagaggttcatcaagcaatagcagcttagaagaactcagcagcgcttgcatcatgttgactttttgcttcattccttttgaaaaagaaatgatttcttcatgtctaaactctaccatttcgaaagtttcgagcagctcttcaattctagagctgcgctttttcttagacaacccttgaattcgtcccatgtgctgcaaataacctgctagcgtaaaacgcagctcctgaggaaactgttccaccacaaatccaggcgtaccggtttctttatgaaggtgaactgtccctttagtcggtttagataatccgccaattagctttaaaaacgtactttttcccgcaccgttttttccaacaatcgcgacagtctctcctttataaagggtcgtatgaacgttttctaatacggtatgttttttgtatacttttgcaacattttttaattcaatcagtttttccatctgctgcctcgcctctccataatcctatatgttaaatcatagcatatttatggggaatgtgcttccatctctatacgtttcagctaaatttttcccgtacaaaaaagcctttgatatgatcaaaggcttttcatacacaatatcatatgctcttcatcgataaattcaccatctacttgaagagctcttttttcatacgcataagaagtaaaaccgaggcttttgtatagggcttttgctccttcatttttagcagcgacggccaggtagatttgcaaaacatttgttttggaaaaaacttgttcaacagctgtttttaacagcttctttccaagacctttcccccttgcttcaggggctacgtacatcccccaaatatctcctttatgctgaacctttaaaggcttttgctgctgaaaccctacgatccccacaagctgtttttccataaaagctcctactacaaattctgattggctgcttggaaaataatttcggatgtcagcaatttctttttcatattcttcttcataacttaaaataaaactttcgggatgatctttcaaagcacgaagacggagttcaaagtacacgtcagcgtcttcttttaccaacaatcgtatattcattttttcaccttagtttcttatgttttaattagctattaagggttgtacacgctaaatacttcattccaccgatacagctcataataatttcccggcaggtctaagcctgaaataagtaccttatcatttttcgtatcttttacgcgtgttaaaagatttgcttgttttcgatttgtacgaatccacatcgtttgattcgttgctttatgataaacaggcgcataatctcctaagcttttttgtggaaatgtgaactgactttgcttattggtctttacgttcatgctatacaaaaaaggcagtggcctctttttttcatcattcgaccaccctgcttcgggcacacgtgaaatgatgatgttatctttttctgtccaagtaaaatcccaatctgcgaagccttttggagtaaacacatgttctttaaaaaccggcatctcttttaaagtgaactttttattttcagtggcaaaccttccttccccattaataaatgccagtacttgctcttcattactccacttaaaccaattaggtacattaagcatatctcccactacttgaaaagcttttccttcttttgtaatgatgcacagcttatttgcatctgcagacatcgaagccgttggaatagcgataaaactaatccattgaccattaggagaccatttgaagctacttgttgtatacgcaaaaaacgaatcattttctgctggcagcgtcgtaaaagcctccactttctttacgtctaaccctgcatatttgctcactgtatatagctttaccggtccccatcccgtgggcgctagcgcagcagctgacgtaattaaaaatcgatctccttctggaaaccatgaaaactgatcaactcctacggctacacgcttcttttcatgcgttttaacgttgtaatatactaagattccattcgaaatatacgcaagttcatcagcaaccggtgaccattgataatgagtcacatcatgttcaacaagtagcggttttccttttaacggtgcaatcattaaagaatcattttctgcataagcaactatatctccatgtgatgaccattgaggcatagaggcatgacgggcataggataactgcctttcggtaccgttatcatatacccataggtttccttgccgtataaaactgactttcactgtattggcggcatttatttgcatagggaacaacataagaaaaagcagacataacgctatttttttcaccatgttcactcctgtctttttttatagcgttacacaaatctcctcatctcatcacatttttgaaaaaataaaagaggttaaggcataacgaaatgaatttaatcgaaagacgaacaaatgagatacatgagctgaacctcttgtgacaccgcagttgatttccgtgcaagacttcgtctagccctccaatcaactgctagaagcaacgaaatagatgaaatctccgtttaccataacaaaaaaaacgaaccactaatcaaatattttgattagtggttcgtttttcacttcggttaaactacttttgtcccagcctctttttaaaaaataaaaaagcgcagcaaatagctgcgctttttgtatattatgattttgacttagattttggtgatggctttgttttagcttgtgctgtattattagccgcatctttttcttttaataaactcatacgttttttcaagtagtaaccttgtccaattccaaataagttaccaattacccaatataatgcaagagcagatggaagtgaaattcccgctactaagatgaagattggcataatgttcatcatcattttcattggaggttgaatttcatccgtcatacttacacgaatttgtaagaatgtcgtaatcgctgcaactaccggtaaaatgaagtaaggatctggctttcctaaacttacccataagaatgaatgctgcgcaatttcatgtgttcgcgcaatggcattataaaatgcaataataataggcatttgaataaagattggcaaacatccgccaaccggattaattttatgcgtttggtaaagctgcatcatttctttttgctgcttttgctgtgtttcaggatcttttttaccagcatattttttttgaatcttttccatctctggacgaagtgcttgcatagccatcgtgctcttttgctgttttaaaataagtggcaatagaactaaacgaatgataaccgtcgcaataataatagacagaccatagcttccgcctgcccactcagcaattttcgttaatgccatagataaagggtaaacaaaataatgatcccagaatccgccgcttgtagccgtgaccggtgtttttgtactgctacagccggctagagctaaaagaagcgctcccattaaaccaagcaataataattttttatttcttttcatattctttcctcctaataatgactaaatgtatgaagtgtttttcagaaggaaaggatcttcttcatcattattcttctctttaactggtgtttttctatacacatgtataaatacatttcgtcttttccatattgttaatactgaagggtcaatccctgcattcacatggtcggtgacaggttccgcatgaaaagccgtaaacctagcttcacgaagcatataataacaaaggatgtataaaacgaaagcagataaatacggcgcatatagaaaaagatcgtgataaaattccatgtgccagctctctttctgactataatagtacaatccaatatatgtagtgtagcatttacgttcctgttacacaacatcaacttatctctttgactgttctacgtattactttttaaaaagtttcatatttacgacacaaaatttgctcaccataaaatatgatgagcaaatctaataccattctttattctcttatgcttaccgctacttctcagtcttcttttagtttcatgaaccacgtaacgccgaatgctacacctacagaaataatcatgccgattatatagtgaattaaattgctcataccaagcggtgcagcaatggccatcattggaatacctgtgagtccgtaggcattggctactacgtgcataagtacaacatagcctcctccggctgctccgcctatagccgcagcaataaatggcttgcgaagtcttaagttaacgccgaaaataatcggttctgtaattcctaagaaggaagaaatagccgctggaatcgcaatttttttcgttttggcatttttcgtcttaaagtaaacagccagtcctgctcctccttgcgccacgttcgcgcaggcccaaataggaagtaagaagttaacgccaatcttcggattagcaagcagtcctgcttcaatagcatgaaaactgtgctgcaagcccgttaatacaatagttgagtataagccaccaaacaaaattcctgcaaacactccggctacatcgtatagagactgaaggctgatcgaaattaaatctccaatatagctcccgaaaggaccaataaacacaagtgacacaaagcctgtgataataacagttaaaaaaggcgtaacaagtaaatcaaccgaattcggcacaattttccggagtcctttttcaattttgctcatgacgtagatagccaataaaatcggaacgaccgtaccttgatagccaatcagcggaatacttaagccaaacaaatccatatattctggcttagcatctgctaatgtccacggatttaataacatcggatgcgttaagatccccccgataaccgctcccagataaggatttgaaccaaattcttttgcagctgaaaacccgattaaaatcggtaaaatgataaatgctgcgccagagaacatatccaacagcacaaacaacgcgctatcttctgagacccagtggaacgctttcatcatcccgagcagccccattagtaaaccactggctacaatggctggaataatcggaacaaaaatgttggaaagcatgcgggcaaaacgggcaaatgggttcattttctttttcatttcttcttgatgatccgctggggaagcagcttcttcagcacctaattctttcacaaaagcagcgtggattttattaacgagaccggttccaaaaatgatttgaaactgtcctgaatttgaaaaagccccttttacatcttctatttcatctaaacctttttgatcgattttgctttcatctcgaataactaggcgcaaacgcgtagcacagtgctgcgcactagcaatattttcttttcctcctaaaagcggaacaagttttttagcaatttcttttacgtccatcttacttcctcctttttgtatgtcataaaaaaagcaagacctaaaacacgcttataaaagacacacttgtccttcatgcgcattctaggtcttgcctgctttaccagtcacaatcccgattattcaattaatacgctttcattgtactcaaagcaacaatattcgtcaatgtttttttctatattctttgctctattcggcaaatgtgaagcgtaatgtatcctagctccgcttctggaaaattaattttgtactcatctttgacaaattgctttatcgtttcagcacactgatacgattttttatatttgacttttaatacgtcgagcatctcttcatccatttcatgaaaaggttcattttgcgctaaacggtttaacgcaaagcgcaagtgagtcagcagccgctgataggacatgctgttttcatcaatctccgtattcagctctttttttataattgtaaccatttcattaataatcgttgtattcatcatgagctgctgcattcccggtgaattcagtttcgccgtatgaatatgaagcgcaatatatcccgcttcgtcaattggcatcgtgatatctagtctctttttgatatgctgaagagcccatactcctattgcatactcaggctgatagagagatttaatttcattaagcaatttattttggatggaaattccgcgggctatcctttcgacagcaaaggataaatgatcgctcaaagcaatatgcacatgatgacttaacgtagcagaaagctgctgttcagcataagaaatgatttcttccgccacttgaatatgctcttcaggaaggttttttaatagttcttgaaacttttcctgctcttctttcatgacaaagactttctccacttttgcagcattaataaaatcatttttacctttttgaaaagcgataccaggacccatcgcaattttttcaactccgccttccttaaagacaacggcgttgttatttaacacttttaaaatcttcaaatgcgctctcctttcttaaaagaaaaggccttgcttattacttcatcgttacttttgcacaagccgtttcgcctttttgaaccgtcccttgagccaaaatttcgaaactttcacttgcatcactgtttgtaataacaattggtgtgataatgcttttcgctttttctttaataagtgctaaatcaaatgtaataagaggtgttcctacacttactttgtcaccttgtgccacgtgagcttcgaatccttcgccttccattgccactgtttcaaggccgatatgtattaatacttccgtaccggcttctgtttttaagcctaccgcgtgttttgtatggaaaagctgaacgacttccccagcaacaggtgaaacaacttgtccttctgaaggttcgattgcaaaaccgtctcccatcatcttctgtgcgaacactggatctggcacttcgctgattggcaggatattacctgaaagcggagctagaacggttgtttcttttgattttgtcttattaccaaataattttttaaacatctcaatcacccttttttagattgtacttgtagcataccccaatgattctgcagaaaaacttcccctatcccgatgttacgttaacatggtcattatttaaccatgctttttttgtcttgtaaataaaaatgtataagcgctcttataagaagtacgttctctacgctgcattttatgtaaccctttacatattttccgaaagagggatattgaattttaaacctaaaaaaaagcccttttaaagggcttttgacattagaacgttgacgcaacttcttttgctcttacagatgcttttgctagaatattgtctgcttctgctggtgtgtaagccatgccttctgcaacaaccagttggaaatcttgaacaccaatgaagctcatcactgtacgtaaatagctttgagtaaattctagctctgccgcagggccttctgaatacacgcctccacgagcttctagtaatactacttttttatctgaagctaatcctactggaccattttcagtatatttaaacgtttttcctgcaattaaaatgttatcaatatatgctttcattagtggagggaagcttaagttccacattggagctgagaaaataactttgtcagcttgtaaaaactgctctactaattcacccatacgcgttactttttctaattcaacagctgataattcttcaccagctccagcttttccccatgccgctaaaacatctccatcaataaatggaactgtttctttatacagatcaagcgttgtcactgtatcagtcgggtttgctgttttatactcatctaagaaaacctgtgctaaacgagttgaaaatgatgcttcatcaacctgcggatttacttttacatataatacatttgccataaatgtcatctcctaaaaagtgtctattatcattagttcgagatattactaaacaaattatctttaattcgagatttattatataacgccattttttatgcgtcaaccttttcgcacaaaaaaaactccgcaagcggagttttatacacattgaaattctcgaatttgatttacatctaccccagcatacacccagaaagatcctgtccagcgatatcctgcaactgagcgtctgcctacaaaggttgggtaaaaccagtaaggtcgaccatttctcggccatatataggtatatcggtataagcatcctgaaatagcgcctggatcaacagcataaagcgatggacctcctgaacctagctttggtgtaggtgtaaaagctggcggtggacttgaaggcggctgcgctcctccctgcgggggaaacccttggccccctcctccaggtggcggcggtggaaatccttgccctcctcctccaggtggcggtggcggaaatccttgccctcctcctccaggtggcggtggcggaaatccttgccctcctcctccaggtggaaacgatggaaacccttgccctcctccaggtggaaacaaattttgaaaacgtggatcgtattgatatggatacatacgcactccccctttataaggcttgctacgttacaatatgcatcataatgaagataggtgaatgtctacttttaccttctatagactaattgtacgatgtcaaacttgatgagcttaaagggagccttatcggaggaaataataaatccaacacggaaactacttgcgtgttggatctgcttgcgggaaatatttttcaataaaattatacagccaaaatacggtaatcaaaataggagctatcagaaaaggatgttgaacccacattttcaccagtaccttttcaaatgacggaatcgattttagcacttgaaataacgagcttccgctaaaaataacgctcgttcctatcaataaaaaagatagccagttaaattgatccatccacatgctcatagagatataaaaactaacaccggttcctatgccccccattattccacttaaaatactttttaccgaaaaaggaattcctacaaaccatccggctcctagtcctgcacaccctgctaaaatgctagaaaaaagcagcggctgctcaagccagagacatgcattcactccaaccactaaggtgacatgtattcctacgtgaagggaaattctttcgcccacaggctctgaaacataatgatagtagcgaccgctataaaaaattgtccaccataataataaaaacgctgtcacacttgcccctataatcataaacacacccctctacgttatgattctattaatctctatctattattttcctaatatccagtgtctcttattcagtaatctatccgtataccttccatacgttcgttcgtcagcaagaaagtagcatataactgtattcttgtctcaactgcttacttgtgggggatgctaagaagttgaatgtctgcatgtagaaaaagatagtgaagaacactttctcttatctttactattattcatatgtaaagcttgctagatttagtcctcgcagtttagaatttttcagtcgttcatatgaaactatttgccctttctttcgttatatatatacacgtttctttatcttttcacgtgcaaaaaaagataaattcctataatatgttttcatattaacctttaaggagataaagaagatgaattaaataaatccctgcaaatagagtttttagaaaaaagaaattgttatcatttctcctatttatgttatagaataattcatgtataataaaaggctgtatggtaacgcagcttgcgacatatcttttcttacttttagcaagtctatattcaaagcaaaaactgcaaagtggggttagtgcgactcttcattaatcgactttgcattaaaaaccaacatttttcttttatcataaagaaagaatgagatttaatagtgacaggtgaataatatgggtgaaaatcaaagaaatgttagtagatttgactggaacttggctttcctaatcttcctattgttttgcgtaagcgttgtggcaatccatagtgctgaaaaaattgggcagtatgataagaacttcgtagcgcaacaagttgttttttatataatcggaatggtgattatagggtttgtcatgcgttttgactccgatcagcttcaaaagctaacgtgggttttttatggatttgggaactttttattgcttcttttactagtggctccgtcaagcattgccagagaaattaacggggcaaaaagttggttcacacttcccggcttttcgttacagccatcagagtttatgaaagtgtttttgattatcacactgagtacggtcattgttaaacacaatgaaaaatatcgtatccggacagtaagagaagactttttactgcttggtaaactgggtgctgtacttgctttacctttattattaatcatgcagcagcctgacttaggtaccgctcttgtgttcttagcaatcacggttggacttgtatttgtttcaggcgtaagctggaaaatcatcgcgcctgcatttttgggtattacagcggttggttctgtcattttgggacttgttgtttatgcacctagcctattagaaaagtatctaggggttaagcaataccaatttggacgtatttattcttggcttgatcctgagtcatatagttcgggagagggctatcatttaaagaaatcgttagatgcgattggatcaggaatggtaaacggtaaaggaatcggaaatggagttgtctatttgccagagggacagaccgactttatttttgcggttattggagaagagtttggctttatcggggccagcattgttattagtcttttcttcgtactcgtttattacttgatcaagctaggccttgaaacaaaaaatgaattcaattcttacttatgtgtaggcgttatttcaatgcttacgttccacgtatttcaaaatatcggtatgaccattcaagtcttgcctattaccggaattccacttccttttatttcatatggaggtagttcactgatggggaacatgtttgcaatgggtctgatgtttggaatctcatggcatcacaaacgctatatgtttggaaatgattaaagagagacgatggtctctcttttttcttttatctccctattaagcatgctacaataaagaaaacgcttccaaatcctgttttaaaaggagtagatatgcatgcttgattaccaatatcggcgcaaagcctatgctattttgttaaaacagacatccgtaccttcatctacaacttcttttttcacctggctcatacagctactaaaacgaaacacataaaaaaggtgtgcaattgcacaccttttatttatgcatcagtgacgttaagccaatttgccttacaatttttttactctcttcatttagtccttttacaataacctttttattcaatcgctcgtacttatcgataatttttgagatgccgatcacggccgattgatcccatatatgagaagaactaaaatcaataatgatggtatccgggtctgtttcatactgaaattcatccatgaagaagctgatcgtggcaaaaaataattgccctgaaaccctgtattgcttcatattgccttctgtttgtgaagttgtttggattttagccatcttccagccaaatacaatcgtgcttaaaacaatacctaccattactcctaatgctaagttatgtgtaaacaatacgataaccaccgtaacaaccattacaatggcatccgatagcggatatttcgttaagtctttaagggactgccaatcaaatgtaccggcagctaccataaacataacgcctacaagagcagccattggaatttgtttaacaacatcgccaagcaccataattaagaacaataaaaagactccggcgactaaggtagatagccttccacgtccccctgattttacattaatcatagattgtccaatcatggcacagccagccattcctccaaagaaacctgttacaatattagcgatgccttgaccgcgcgcttctttatttttattcgaaggcgtatctgtaatttcgtccagcaccgttgccgttagcatagattcaagtaggcctacaatcgctaaaggaagcgaataaggtaaaatgataagcagtgtctccactgataaatcaacctttggaaagtgaagaaccggcagcgaacgcgtaatattccccatatctcctaccgtttttaaatctaaatgaaagacaatcgctacaatcgtcatcaagacaatggcaacaagcggagatggtattgctttggtcatgagcggaaacaaatagacgatgagcagcgttccggctaccattgcgtacatcatccaatttgctccttgaaaatggggaagctgtgctgtaaaaattaaaatacctagcgcatttacaaatccaatcataactgtttgaggaagaaacgataaaaaccttcctactttcaaaacaccaagtaaaatttgaataattccggttaaaacagtagctgcaaataaatactcaatgccgtgatctttgactaagttaatcatcaataaagacattgctcctgttgcagctgaaatcatagctggtcttccgcctgtaaaagcaatcacaattgccatacaaaaagatgcatacaggccaaccatgggatcgacaccggcgataatggaaaaagcaagggcttctggaataagcgcaagagcaactgtcatcccagacaaaatatctgctcgaacgtttgaaaaccactgctgtttaatacttgccatcatgatggtttatcacctcttatgaattttttatacgattttcgactttcacgaaaatcagagccgtttttaacgtatcaaatcgtaccatacaatttcccgtttggaaacaattaattttcacaaataaaaagacgagaagcttggttgcttctcgtctttttatttgttacgccgcagcttttcgctgccattcagcaaataaacgaatttatgttcattcattaattgctgcttcaagcgcaacaacaatcatatcgttaaacgtcgtttgacgctcttctgacgttgtttcttcaccagtgaaaatgtgatcacttactgttaaaaccgataaagcattacggccgtatttagcagctagcgtatacaaagccgttgtttccatttcaactgccaatacgccgtgagctgccaatttttctagctggccgtcttcattgtaaaattgatcagacgtaaatacacttcctacttttaactgaaggcctttttcaacacctgcatcgtaagcgcgctttaataaatcaaagttagctgtcggtgcataatcaataggaccaaatttaacgcggttcatttgtgaatcacttgaagaagacatggctaaaataacgtcacgtacttttacatctttttgaattgctccgcatgtaccaacgcgaattaggttttgaacaccatattcattcattagttcatttacataaatagcaattgatggtacacccattcctgttccttgaacagaaacgcgctttcctttatatgttcctgtaaatccaagcataccgcgcacttcgttatagcaagttacatcttctaaaaatgtttctgcaatgtattttgcacgaagtggatcacctggaagtaaaatcgtttctgcaatatcaccttgttttgccccaatatgtacgctcatttcgtacctcctatatgtaaaaaatcttacgctttcactataccatattgtatcccttgcatgtctatttacttctaacattatgtgtcaaaaataaaaagacatactgcccaaaaaatggcgtagtatgtcttttatataagggtacgctaatagcgcaagggatttactaacgttagctgaggtgatatgtatgggaaaaaaacatcgcaaccgaattaattctcctaaaaagaataatcatattccaaaagaagccattatagcagaacatgaagcccatggagatgaatattcagcaacaaaccgaaaaaatggccctggccatcatactcgtgattactgagggttaacatataaataaaaagcggccagataggtcgctttcaccttatatttaacgtacgtgcaggcggttcactttttgccagccgtctgtccatagcttatagtaatactttcctcgagtaccttcatcaattaacaaaatatcgcctgtactgataaacctcgcatcacaatcttttggcaaattatcagcaatgttaaacatctgaaatacttgtgttgctgcgtcttgatgatcgaatgctgtaatcgttagacgatggacaggcttatatccgcgcttttcgcctttttcttctgtttgcataatggttacatcatattctgtgctaatattaaattgtttttttattgtggtccacacactcaacattcttccctccacccaaaagcaagtatttactcttttacgtcatgtattcttatataattagtgataaaatctaaaaatcctttatcgaatcaaaacgttttttgtcgaaattactagttttttcttattaaacatgtacataaaatatttgtttcccattttatcattagttgtttttgaatggatgaatcaataggcctacttaaacaaaatgaaatattaacgaaaaaaatgtaaccattgctcctatttttggttatataggcgcttagaaaggaggtaaacccctaaggaccaagcaagtcctaaacaatatcctgctagtatatccgttaaaaagtgtacgcctaaatacaaacggctaaatccaattaataaaataacaatagcaattacgcatgcagctgccgctttaatagtcctgcttcttgtatacatccatattaacaaaagtactccgctgtaaaacgccattgagttcatggcatgtccgcttggaaaactatagtgagaggcgggaacgacttgactccaatcaggtcttggtcttgcaaaaatctccttcaatccccaatttaaagcgcgaactccccaaaaaacgagcgtgatatataaagcgagcaacccttttcgtttataaagaagaaatactataattgcaaaccatattggcgcagtgacataccaagatcctacggttgttataaatatgatgatgggtgttaacgtgtccgtcctccatccttcaatggtatgaagcacattaaagtcaagctgtttcacccaaggtgtattaaacgtaaataaaatgagtaaaaagaaagctaaaagcgatacaataaatagagaatattttgtagtgcgatttaccattttttatttcctccaacctattaaaagaaaaagcatgtagcgttctacatgctttacttattcacacgttttggctgaatatagtcttccggcttaggagcttgatgaacgacaaattcagccgaaaattcctcttttgcatttatttttttcgtttgctttgattgcggcatatacctctctcctttctttttactgtctttaatatacgaaaaataaaggagagctatgcacgttagctatagcgtgaaataatattggttaatatattttttaactgaggaatttctttttcagaaacatgaacatgaacgagcgactcatctgcatccagcatttcagatagaaagccgccaaaccctctggcacgtcgatctacttctataaataaatcgtagtcatgtaagccgctcggctgcacaatgatttcaatttcatctactttcccagcgtacactccaccgcttggaacaaattcaaattcttgaacaaaaggaagtctttttctcatccggcgaggagcttcttcgcactcgacttggcgcaagcgaaagccaagctgttccatagcttcaattgtgcttgttaacataaggttaggaagcacttttacatgatcaatatctgacggatcaacggcatctttaatatcaagactcgtcgccacccaaacccgggttctccctaatgtaacaggcgtatcatcaggcagctgaaaggtaaaaggaatagacttcgtttcagatggttgaatcgtgaacgggtcgttaatcttaaacgtattaagctcaatatcctgcttgtattttttatcgtctctttcttttacataagttgtgaatagacgcagatagatgctgtcaattttctgctcaacatttcctccgtacacttcaacaatcccttcaattttttcaccagcacgaaattcatcattgacaagcttagcgtccactcgcgctgcacctattccaatgcgggctaacgctttattaaatagcgccatactttcccctccctgagttcttactatttatatagtcataaatatctttttgtaaacttttaatgctttcatacgattcatctgctctcagcattttttgaatgatggtcttaataggtatcgacaaacttagctcttgttcccagcttctttcttgtttttccgtcggctcataaccagagtataataaaaataaaagaaaatgaccaagtgcatagatatcgcttgcagcagatgtttgtctcataaactgctgttcctctataagggtgcttgtttcttcatggtctcctaaaaatctagcaagaccaaagtcaataacatagatggttccgttaacatcaataatatttggaatacgaagatcacggtgaacgattccttgctcatgaatagcagaaactacgtctagaatattaagtaaaatgtcaagcgcttgttcttccgtatacacgcacttctcttcaaaaattaaatcttcaaacgttttcccttgaatcaactccatcactaagaaacagccttcatctatttcgatagcttcatacagtgaaggaatttgaggatgatttaattgagacagcaatttcgcttcataatgataagacttcagcccctgagacgtgcgctgctttgttttacggagttgctttactactacctttttttgttgcacaatgtcgttagcaacatatgttataccatagcttcccattcccagtacatctatgatttcatagcgcccgcaaatgactttcccttttttaaaagggcggtcaactaaccagcgatgaaggtgtttgaacattcgatttttcatcataaatcaacttgagaaaaagcttgagaagaagcttccacttttacgtttgcgcttgtaatggtggtggccatattttgaatgactgtggctgtcataatatttgcttcgtttataatcgctactgctgctatggtgacgaggacgtctgtaatgatgatcactgctgctgtagtgacgaggacgtcgatagtgtcgatcgctgctgctgtagcgtcggtgtttagatccagttaatgattcaaaaatttttctgaacataaagaaaacctcttttcttaacatttgttaccctttatacgtacgaaatgttataaaggtttcaaaaagtcccttaccctttttttatatagttaaacgtttcaaaggaggcttaacatgacttctactgacacaaatccccttattagattggaggatgttcttcgcctgcagcagatgatgcagctcaaacctcctgctactctcccgctgtcttttatcggagaagacgtaaaattgattaaagagattcgaaaaaaagtaaaaaaagctaatcaaaacaatgttacacgtacccaagcttatttagactattatcaaaaacaccccgaaattcactgggcttttttagcacacttggtttcgcgaaacggcggctattacatgacagatctctccactaccttaataaaatcccttctttttccagaaaaacagcacgcgtacttcttgtttttagaacattccaattccgccatttttcatgatgcttacgctcagctgttactctacgaaaaaagcaaagagcaaaacagcaatctgtttcatttactccccgcttttcacatatcttcttttatgaaagctgtttggaatgacttttggcagcatagaaacaaaacgctcttatcaatagccctgattgtgaacgaacagtatcatatcgaaaaaaacgttctctttaaaaaagagtttcagcgggatgttcttcactcctggcagtttcacactcaaaactttctcggtatgactcaaatcgtctttccctattattcaggtaataacattgatttatgtggaacaaaagtgtatcatttcgagtctgtcttaaaacggattgaagtgggaaaaactttatacattcttctttttcattcaaacttgcatgattctatctatacatttagccttaaacatccccacacagggtctcgaagcgattataattcggatatatttacaaagaatcgaactcattccaaaaagctgtatagcccgacgttaaatatgagctggggagaccgcgtacacctttttttaagaaaagatgagtggtttgaagacgaaagcatattttctctccttgagtctattcccgcttcttcagttaaaaaaattccccttcagcatcatataaaagtgcaatctgctattaaagctgctaaccctttttcatagcggctgtctcataaacaaaacgacgagtttccccgtcgttacagatgtatctatctttttattcttcatcttgctcatcaataatacatttatcaatgagataatcaaaagttatatccgctaattcgcctagctcttcttcagccggaacatagcctcgcttgactagttcattgtaaaagaactccgcaatttcttccgtatcaatgaccacttcgatttctttcacaatatcactccttatcccgtttgaacggattagcgtaccttatttttttaaaaaataggttcacttcatcttctgcttgaagttttaccttatacacatttatgaacaattcggcaatagtatgtctaaaatttcagcagtttaaatagaaaggtaattatacccattcttttttcattaccatcgccgtatacacaactaaaagatagctaagagagatgtaatgatctatctcggctatcttttatttattaggcatctacctgctattttccttgttcggattttgctatcttttttaaatgtttcagcactaagttcatgacttcagcgtattcttcatcttcaaaaagctcatacaaaaatttataatcattgtacacatctaaaagaccgtttataatctcatgcttttctttagttaacctcacttcttctttttcagaaccgttttgttttttcatctttggtagcaactccgtctttttaatttctttacctaaatacaacatatcaacactttgagcgtaattttctgtttcctcatgaggagttacgagaatgagttcttcttcactagcctcaagccattctccatctgttacacgtgacaattcatagacaatatcttcccatgaatcctctttataacgccatatttctgttcgaataccaatgattttaaataactcttttccataattaaaaacctggacgatatcgccgaagaaaaatttatattcaagctctactctttcctgtactaatatttgaccttcatattcttctagaagctcaattgtatcttctaaaaaaagaccttcactatggttgatttcgtatacaaaaatcccatccatcacttttatatcggtaatagtgccaacggtcccgtatattgttacaacgactgtttcaccaattccgtatttaggttttttcttccctgccatcgtcgcacctccttagtaaacatacacctactgaaaagttacaatattatatgcagtaactaaaaaaggggaagtataacatctttagaaccaagcctttattatctattgccctctatcatttttacccctgcttattacatgagcttaagaaaataaaaaagcaggctgatggatatccattagcctgcttttttatttctcacgcattattttgataaagctcccatgcttcatcaaatacggtcatacttgataaataatgtccgttgagctctaaataagaactcacttcgtcataatctgttgaagatttcgggaagctgtgatcatcgtaagcacttcgcgcaaactctcccattcgatcatgttttttgtttgatcggaatttcattatatagtgataaaaggatttcatcgtactccccctccagcggtatgtgtatcttttctatcattttttcaagaaatctacaactttcttctgtgatatgtagatgtcgaacactgcaatataagtggtttactggacaaaaaatattaaattcatgttacagttgcaaaacaaatttcactattagcgtaacgaataaatattgttatatcaatatttttcttttttcaaaaagacatttgtaacaaaaacacatcgtttttataacaaaagcattgattcgacaggtttcttaaacctttatgtaattgcaaaaaagaagaattcatgttttaattccgtagtgaaaggttattctaacaataatcgccatttaaataaatcttgttggtgggaggtttacatcagcatatgttgaggaaaaataatactatgaatactcgaaatgcttactttgataatgctaaattcgtattaatttttttggttgtatttggacacatgatttctccgtaccgaacagatagcagcggaatgctgtccatttatcactttatctttattttccatatgcctgtctttattttactagcaggttatttctcaaaaaattttcataaaaaaggctattacaaaaaaatatttacaaaggtggctcttccttacttagctttccaaactatctataccctttattatagtgtgctttatacagatgaaacgtacacgcttcaatatttggttcctagatgggcaatgtggtttctactgagcttaattttttggaaattaatgcttcctttctttgcgaaattcccgatgtggattagcttaactgtctctatttcgcttggacttgcaatgggcttcattgatattgacggatttgataaaattctaagcattagccgaatgtttgtcttcttcccgtttttccttttaggctactatttgtcacagcgacaagagccttttacaaatcttttgacagcgcgaaatcgaatcattgcatccatcgtattactagtgacattaatcggaagctattctttcttagacgacacggcttacacagatatgctgtatggaacgaacacgtacgacaatgtggccgaatttttaatgcgcgtttctcactatggaattgcttttcttgtatcttttgcctttatggctttaattccaacgcgcggttttgctttaacaagcattggacagcgatccctatacgtgtatttattgcacggcttcattttaaaatggttctttacaactgacttctcaaaaagtctagagccaacgtcatggggtattatcgtcttaatcgccctgtccattttagtaacgatgcttctcggcagccgtattgtcgattggttcatcaccggtaccaagctcattgttcagtttgttacacctaaaaaagccattcagaaattttcattagcattcaaacgtacgttttcataaaagtcatactcctaaaggagtatgacttttttcattttcttcgaagaaaccaagtaaataatttcattttgctgaattttatgttaacgttttaatatctaaaggaagggagtttttcaagatggaattagcatattatgctggagagtttagagatattaatgaggctgttattccaattgatgaacgcggtcaccagttcggagacggtgtttatgaatttattcgcgtatacaaaggagttccgttttcgattgaacgtcacttagaccgcttagaaagaagtgcaaaggcaatctttatcgaactgccggtttcaagacaagagctaaaggacatcattcaccaagcaatggaaaaatcaacgttaaaagacgctgatatttatattcaagttacgcgcgggattgctcctcgaaatcatttatttcccgatgtacctgcacaattagcactcacaatacgccaccctcgccaaacacctgaagaagcctatgaaaaaggcatttctacacttcttttggaagacgagcgatgggctaattgctatatcaaatcattgaacttacttcctaaccttctggccaaacaagctgcggcttctaaaggatgtaaagaagctattttagtaaaagacggatacataaccgaagggtcgagcagcaatgtatttgcgataaaagacaacgtcttgttcacgactcctgccacaagaaaaattctatccggtattacgcgcgctaacgtactggaatgtgcgcaggaacaagccattcaaatccgagaacaaaatatgactccttcctttttaaaagacgctgatgaagtttttattacgagtacatctgttggtctcttgcccgtttcgaaaatagacgaagtcgaacttccaactttccgtcctgttacagtggctttaaaacacgcctacagcctgcgcactgctggaacaaaggcttatcaataagcaaagccgccccttacaaaataaggggcggctttttagaatttaaagtagttgcgttttaataatcttggcacttttaatagctcatcataccgaatggattcatcaagtttttttgtatcgacaagaagcagctgtgtttccacttcttctatgatctcttcttcttgatatgacatcccgcaacctgaacagctgatacatggcatatgggtgatttcaatacttctcgttccgtctggcaattcccagtatgcggtattggttgtttctaccgctttttcttcttcgcaccatgcgcattgaacagtcatattacaggacctccttaagatgatggagcatcgtcgcttttaccgtcttttttcaattgagctttaaactttttatcttttaattcatctcttttttcacgtttgtcttttaggctttcgtgagcactgtcactttcatatgttttacgtctttttactctccctaacccttccggtacaaggttgaattgagcatcattcataagacccgagatgccgatggaagaatctttagcatccgatgctggataaacagctcgaaaataatcatctgcacgcccaggcacatagctttctggctccggatacgtcgtaatcactccttcaaagtttcgcagaacaactttacttgcgctttgactaataatatagtttggctgaaccgcaatctttcctcctcctcctggcgcatcaataacaaacgttggaacagcatagccagacgtatgacctcgcagcccttccataatttcaagccctttggaaacaggtgcacggaaatgcccaattccttctgataaatcacattgataaatatagtaaggacgaacgcgtattttcactaaatcgtgcataagctttttcatgatagctacgctgtcattaatcccagctaaaataacggcttgattgccaactggaacgcctgcatcgacaagcatttcacatgctttttttgtctcttccgtaatttcaatggatgtattaaagtgagtatttaaccatactggatgatattttcttaaaatggcacataaattttccgttattcgctgcggaaacacaacgggtgctcttgttccaattcgaataatttccacatggggaatagctcgtaaattcttcaaaatatattctaaaatgttgtcattaatcagcaagccatcaccgcctgaaatgagtacatctcgtacttcgggtgttttggcgatataagcaatcgcagcatctaactgcttttttggaacgcccattccgatttgtcctgaaaaccttcttcgagtacagtatctgcagtacatggagcattgattggtgactaagaacaaaacgcgatcaggatagcgatgagtcaaccctggcactggagaatcttcgtcttcatctaggggatcttctagatcgtattttgttttatgaagttctttgccaaccggaacagactgcatacggacggggcagcgagaatcatctggattcattaaagatgcatagtaaggcgtaatattgagcggaattgttttggttgaaatgcgtactccttcttcttcttcaggagttaagttaataaccttttttaaatcatctaacgttcgaattgtgtttgttaattgccaaatccagtcattccatttttcttcaggaacatctttccataactcaatatctttccaatgtcgggacggcttatataaatcatataacatacaatcgctcctttatgaagatttactattgttatatgttacagcccataagttggttaattatttctcaccctttactttttgacagatccttcacccatacgttcatatcttctaacgatttataaatgtaacaattattcgttaatcgtcccgtatagatatacccaagctgatgaaaagcggcattcattccaaatgaaagcgctctcgatattgtgtatgcacaaaaaatatgccgctgttttagctccgcctctagtgcgcttaataaatgcttcatgaatccatactttcggtaagcagggagagtcgcacaatccgttagttcagcattatgataaacatagtcaatttcagcagaagcagcgctaacgatatcgttcttgtcaactatgatataaaacaaactatcttcttgaagcaaactagagagatactcttcttcgtaaaggggagtaggatacactgtgaagatttgacgatagagctgagaaagttgtttagcatcagatgaaatggctcggcgcatgatcagttgattcgataaaggagaataatcagatgtcggcaaattcaaaacatcttgaagcagctctgtttcttttaacgtctccccgctgtctcggcgggattgagacgtatagtagcataaaagatacgcgtcgcttccgttaaaatagcagggaacagttgcttctaaagaaaatcccaagctcatccagtccaacagatgttcagcacgtgcttttataatccacttttcgtacgttgccttatcaacttctttatatatatagctgtaaatatcgttcacatttccccggtaatcatctattctcagacgcttgttacattcatctaaaaaaagagtcatagcaaaggttggttgacaaatattttcttgtttcgccatttgtttgtatcctctccctttttagcttagtccgcaatactgcaccagtctgctaccgtgagagcaataatttctgctgcgtcaagcatcgtttgaatacaaatatactcattcggaaagtgggccacttctgttactcccggtccaaaaacaactgttggaatatcccctacttgtgacagtatccctccgtccgttccccaaggagatgcttcaatgatcggctgtttctgtttcacttgataaaaagaggacgaaagagaggtcataagcggatgctccaattcaatttcaccgggaagccagtgggccccaaaccattccaggtcgacaggatgctcagcaaaccactcatcacactgaggcaaaagttcaagccaggctttcatttctgctctggcatttttcattttttcatgcggagcaactcctatcctgccttctaatattacttgatcagcgactgaagaaggccacgttcctccttgtatatttccgatattaatcggcacgggaatgggaattttattatagagcggatctgtaattcggctgtttctctctttttcaagaccctcaatatgtttaagcacaacagctgctttttcaatcgcactcacgccttcataccgagtccctccatgtgctgctactccatgcacggtcactcgaaaccacatggagccttgctgcttagggaagatcttcatgttggttggttctggaataatggcaccatcagctttataccctctaagtacacaggaaagtgttcctgcacctccgctttcctcttctactacgctttgaaaaataacatctccttttagtgaaagatctagctctttcaacgcttgaatagctaaaagtaacgacacatttcctcctttcatatccgttgctccgcgtccatataagtttccatcttttacaacagccgtataagggtcttccgtccactgtgaaagatctccgggtggcactacatcaatgtgcccattcaaaatgatggatttccctccgcctttcccttttaacacgcctaccacattcggactatctcgaaaagtagaacggttggaggcaaaagcttcatggctacgaagtattttttcgtccggttcccatatatcaatatctaactgcagctgtcgaaggcgttcaatgacaattgcctgcgcatgcttttcagaaccctgtacgcttgcttcttctacgaaacgcttgagtaaacgcactgcactttgacgatgctctgtcatccagttatgaatagattgctgtatgttcatgtaatggtcctccttatggtatcgtaatcaattgatcactcaggcgaactgtcgcttctgttgaactcaaaatatcctctacggtataaggagacattaactctgttagaagaagcgcatctttttctactttaaaaaccgcccgatctgtaataactaatcccacgcagcccgaagcagtcagaggtaaagagcacgtcttaaccagcttcggttctcctgtcttgctcgtatgattcattagcacaatgacttttttcgctttttgagctaattccatcgctcctcccatcccaggaactcgcttacctggcacaatccaattagctaaatcccctttttcactcacttctaacgcaccaagaatggtcatatcgacgtacccttttcgaatcatcgcgaaggctgtagcactgtcacagtatgaagccccttgaacggtagttgttggatagcctgctgcattgcagacattctcatcttcttcacctaaaggaggggaagatcctaaccctaaaattccgttttcagcatgaaacatcacatgaacagtacttggtacataattaggaataagagagggaatcccaatccctaaattaacaatcatgccgtttttgatttcagccgcagcacgttttgcaatacgatgacgaatatctattcccaaacccatttccaattcactccttttgaaggaacaatataatccacaaatacacctgacgtcatcacgttctctgggtcaatgtcgccaagaggaacaatttcatccacttcagcgatagttatacgacctgccattgccattaacggattagtgtttcgagcgcttttatcataaagcaagttgccgaatggatcggctttttttgcatacacaaaagcaacgtcagctgtgagcggcttttccactaaaaatgtcttgccgtctacttccactttttcttttccaaattgaataatgtcattttctattcctacatcaaccagtattcctccaagtccaactcctcccgctcgaatacgttcagcaagcgttccttgaggagaaaactcaactttcagcttttcttctgtcatgagcgtcccagccactgggttcgacccaatatgagaagcgatcagcttttgaattcttccttggcttaccaattttcccgcaccaatatgaggaaagcctgaatcattacatatcaatgtaaaatttgattttccgctttcaatcagaccgtcaatgagagaaggcgggctgcctactcctccaaaccctcctatcattagcgtagcagcatgatcgacatatccaatcgcttgttccacagttgtaatcttttgaaatgagttttcgacctttgtcacttatttcacctcatttctctgtttttcattttgcacttcatgtaatgttttcgaaagcagatcgaccgcttcatcaagctgacgatgagtaatcgtaaatggtggcgcaataataatgccgtctccttcgactccgtctgttcctgcttgtgaaggataaaggagaagaccatttttttgggctttgcttattatgcgcgccgtcatattttccgaggatgaaaaaggctccttcgtttttggattttgcacaagctcaagaccaactagtaagcctttgccacgtatatcaccaatgatagggtaaagaagctgaagcttcttcaatttttctaataagtagtctcctttcagcgctgctccttgaacaagatcatatttttcaatataggttaaaacagctagccctacagccgatgacagcggattagcgcttagcgtatgtccgctcataattaatttggatccgttcataataggttcaatcgttttgctgctagccaacgtaacggctattggtgtatatcctgctcccactccttttccaagcgtcatgatgtctggtttaactccccagtgctcatacgcaaacatcaagcctgtacgcccaaccccagtcatgacttcatccgcaatccataacacatcatatttatcacaaatttctcttatcacttcataataaccgggaggaggtgtaagcgctgctccggctgctcctacaatgggctctgtaataaaaccagcaatatgttcagggccggttcgtttgataactgtttccaattcgtgtgcacaagcaagattacaggatggataggtttgatgaaacggacatcgatagcaataaggaggtgaaattgaaggatagtcttcaagcaaagatgagaagcgttttcgtcttccaacgtgccctgacatagacagagctcctattgtaataccgtgatagctcatccagcgtgacaaaacctttgttttggttggctttccttgctcttgaaaatgctgaattgccgttttcatagccgtttcagtcgcttctgtcccgctgttaacaaaaaaactccactggaaatgattgctgcttaattcacatagtttcttagctaaggcttctgttggatcacttgtaaactgcgaccgatatacaaacgcaactttctgtgcctgatcggtcatcgcatcaataatttcttttacgccgtgtccgatacttgctgtaactgcccccgacgaagcatctatgtacctttttccatgttggtcgtacaaataaattccttttccatatgaaataactgggtagtcatcgtcgagcagcggctttattacatgagttttattcatttccgcactctcctttcaaacatacactcttattaaactgtatgctgaaacgaagagtttcttgccaataaaaaaagccctagcatatagctagagcttttgcgcttattaagctgattgcgttacagatttatcgatacgctttgcttctgactcagccacaataacggcacacgcagcgtctcccgtaatatttacagatgtacgaagcatatcaagcaagcgatcaattccaataatcaatccgatacctgctacaggcaagccaaccgaactcaataccattgctagcataatgagaccaactcccggcacacctgctgtaccaatactagcaagcaccgctgtcaatacaaccgtcacaagagcacccagcgacaggtcaacgccgtatacttgcgcaataaaaatagtcgctacaccttgcataattgccgttccatccatgttaatggtagcacctaacggctgaacaaaactgctgatggactccgggacacgaagatttttttgagccacattcattgaaatcggaagcgttgcattactgcttgatgtactgaatccaactgtcatcgcaggagcaaaccctttaaaaaattcaatagggttacgtctggccataagagcgactgatcccccatatgttacgatcgaatggataaacagtgcgagcacgactacaatcatgtacagccccatcgctttaattgcctcccagccttgacttccaaccgcggttgcaagaagcccaaatgttccgtaaggagcaaacttcatcactagatttacaagatacatcatcaattcattgccttgctcgagtaaattgtaaagcccttttgttttacttccaagcatcgtaataccaaaaccgataaagatagagaaaacgataagttgaagcatattcccttcagccatcgcttgaattgggttgactggaatcatatttaagaatgtctctccaaccggcggtgctttttcggcttcaaaagaagcgttttttgtatcaaaagatccaaacgtacccggtttaattgcatacgctaaaattaaaccaataataatagcaacggttgttgtaactaggaagtaggaaactgttttagccccgattcttcctagttttttaggatctcctaaacctgctacacctaacgtgatagagaaaaacacaattggtacaacaagcattttaattaagcttaagaaaatttggccaagcggtgtaaacaagtacttgtccagcggagcaaaagcacttggagcaaaaacattaatcaacactcctacaacagcaccagcaattagcgcgataatgatctttgtcgatagcttcatagatttacctcccgcaaataaattatattagaatgattctaactaccatacttattttaccatgcattgagagcgataacactcaaaatatacaatatattaaaaattttcagattaatagttcaggaatatttttagctatacaaaaaaccatgagaatatcatggtttcatagacctgttattccctcactgaatgcttacggagttagctgtcggattcgggtacgtgagttaccctacttgattcattcaagattcaccccaagtacattacgcacaaatatgggtcccccgttctcttataaaacaaaagagattaagcaaataattttctttaatatttttgcatgataataattgttactttaattaaaattcaattcatatgtttctgtcaagtttttattcaaatttaatgcataatttcatcatgataagttgaaaaatgttatattttgaactaattatatcatgtttcaacaatctacaaatacttacttaacaagacttataatctaatgaataaaagattaattcaaaaaacggtttgcaaagtgaactttttccccattaaacaatattcataaatatgcatgattattctaacatctacgtgttttactgctttcataaatattttactcatcaaaaaacatctctttccaactgttgattttatccttgtattgcttgatataccccccctaaaatttcactgaatttattgatggaaagaaatggacattatcaattcgccttattctatttaattctgctcacgatagaagtatggattccgtaatatcttttaaaaaaggagcgggtaattatcatataaaattatcggagctggagcggtacaagttctttacttttcacttattcgctctcgttatttaacacgtataaaaaaagaggccgtgacggcctctttttcttatacagtaacaggttcagaacttgctttgcgattctttaatttttcaacaatgtcacgcgctacccacacaccgcacgcacttgcctgcgcgagccctcgcgtaacaccagctccgtctcctcctacgtataaaccggaaatttcagtttcaaacttatcgtttagcttcggacgggcggagtaaaatttcgcttccacaccgtaaaatagcgtatgttcagatgctaacccaggcgttacgtgatccagtgcttctgtcatttcaattaagcttttcatcgtattgtaaggaagcactaaacccaagtcaccaggtacagcttcttttaacgttggttctaaaaagccttctttaattcgagtcgctgttgaacgacggccctttaaaatatctccatacttttgaacaactaagcccccgtttgacagcatattagctaaccttgatacttcgtgcgcatattcgttcggctgatcaaatggatccgaaaatttatgagaaacaagcagcgcaaagttcgtattttgacttccaagcttcggatctttgtatgcgtgtccatttgctaacataatacctgaatgattctctactaccacatgtcctgaaggattgctgcagaacgttctgactcttgtacctacagacgtattgtaaatgaatttcccttcgtacaagtgcttgttgatttcttccataacaacgttggatgtttctactcgaacgccgatgtccacttgattgttaatcatttttaaacggcgtttttttagtaagtcactcatccacttcgagccgtctcgacctggtgaaacaaccactttatcagccgtaattctttcaccattcttcaattcgataccgcgcacgatatgctgaccatcttctttttctgttattaaatcggctacttccattttatactgcatatcaattttttcttttaagtattcataaatactttttaaaatttctaaattttgctctgttcctaaatgacgcacctgggcacgcaatagctttaatcctgctgcgtatccgcgtttttcaatttcacgaactttatcagttaacggatccgtaatcgtatcggttgctccgtgttttaaattaatttcatccacatatttaattaaatctaccacctgtgattcagacagataatccgtcatccagcctccaaattcactggtgatattaaatttcccgtctgaatatgcgccagctccaccgaaaccatttgtgatagaacaagcaggcaaacagccagcaaactcttttttgccaaccgcaggcggacatttttcaatttttttctgaagaatcggacaattacgtcgatagatatcgtgtcctttatcaattaataaaatagttgcttccggtaattttaacgttaactcatagcaagtaaaaatcccagcgggtcctgcccctaccacaataacatcataatttgagttcattgtacattctcccatcatcttttttctttgggtaaaagataaaagttattgaccgaattttctttttttattatcattcggttattttctagccatttgataatatatcaaaaacaaaccctttagtcaacaatatacacgaacattaaaataaaatattctaaaaatattcgcttttattccaaacaaataaaaaccagtgaacgaatagcaagcgctatgaaatgttcactggttctttaatgtacggaagagcaatttctacttttgttcctactcctactttactcgcaaatgaaatatgcccttgatgctgttcgattattcggtagctaatcattaaccctagccccgttcctgtttgtttagtggaataaaacggttcacctagccgagctaaagattgctcatcaattccacagccttcatcctcgataatgaccatgccgtattcatttcttttctcaacggtgactttaactgtacctttgctcattgactcaagcgcattttgaattaaattaataaaaacttgtttaagcccattttcttcacaaaagattgtaatctcatcactaatctcattaataatacgacagtttttataattggcatgtgtatctaatagtaatgtcacatgacgtatgatttggttaagacttttggggtggtatgaattttcaattttaggcttggccagcgttaaaaattcttgaataatggattcgacgcgattcaattcttcaagcataatatcattgtattcttcgttgtactgtttcgatgcttttaacagctgaataaaccctttaatcgcggtcattggattacgaatttcatgtgctactcctgctgctaacttgctcaccattgtaagcttttcagatttgcttgccatttcatcatatttttttcgatccgttacgtcgcgaataatatactgaatggcatcctgtccttcaaacttaattttggttgccgaagattcaataatgacgactccttttttagtcaatagtttcacatcaacacgcggcctcacggacattccattcatcagctgaaccattcgttcctttacgatttctaaatgttcggggtgaataaaatgaagccaaggacgcccgatatactcttcttttttctcgccgccaagaagtttaacacctgcgggattcaaatattgaattctgccttctcttgttacaataaatgcatcttgactttgctggacaaactgcttatattgcttcatttttcgaatgacttcctcttgcttttcaatacttgaggaaaactctttccactgaacaactaagagcggaatatccccttccgtgcactgaatatggatgtgcatcggaaactgctgatctacttttttcttaagtaaaacaacttcttcctcttgctttcttaacggttccacttcatgcttttcaataaaaaagcgatttggctcttcaaatacattacaggaaagaagtcgttcctccgtcgttttaaaaaggtggcagcacgcttcatttaaaatttgaatatctccatccatattcattacgagcattggtgtaaatgacattgaaaatagttgttgaaatactttttccttttccatatattcaccttcgcttattgagttactagctatagtataatatggtaaatgttgatttggcaaaatttttttattatttaaacaatttatatgtaagtttgtccttttctatctgttataaaaagctcgcacatgcgagcaaatgagggctaatcagcaaaaacaggtgcagccaatgatgattaataaaataaatagtacaacaattaatgcaaatgactggcccgttccgcaatgatgataaccgccaattggatagctaattggatagtggcaagtatcatataggtggtgatagcctccgtgatggcatggatcgtaacaatcgtagttatacatagcaatctctcctcttgtttttttattcatttcgtacactgtactttatatgcgttagtcgattgtcctgtatgtgcattcgcccattttttactttttcttacgccatattcgccttttaggctgaagcgtatatgaaaacagcaaaagtaaaatacttcccatcaccagtgacgtagtaaaatctttcataacctcaataacgttccctatatacgggagatggtatgcatagcttccaatcacgttataagtagcaggcaaagaatctctttgagctgtaaccagtacatcaagctcttgattatgggccagtacaagttcattctttgaagaagatgattcatctctaaagacaactatatctccgcgatgcagatggtgataatccgtttcttgaacggtcacagtgaaaccaaataggcttgggactgtgctgacaaataaaaatgtaaagcagatagcataaagaacaagtacatatcgaaacgcagaaaacatacatttattgatcataagtaatcagctcaattcgctcggttactttatttagcgcgggggtaatgtgaataaatgaagtagagcgctctgtaaattgaattaaaagtagcagcagtaaaaaacttaacataattaaccgtagcatccgagcataaaaatcgcgcatgctctcactccttttttctatactaatttcggtagtacaataagccctcagtcaataatttgattcagtatatgcacgtagcaggcatttggctcattgtttcttctgggaggtcccgggagtgatcggcataaattatgagttttagcatatgtttggttacgtatggaaatgtttttatactccgacaataagggagctgaacatatggctaattattcctttgatcaatatatcaaaaaagcaatgaaatacgattttctagctaactactataagtatagtgatccatctaagcatattcattattatcaaaagcatttgtactatatccagcaggccatcttaacttcttctgaaaataccaatttgcgcgtaaatccgccgcaaattcgtatacttcatgcttctccagattctccatctgtagatatttatattaacaacaaacgagttatccgcaatttaacttataaacaagaaacagattatattgaattacaagaacctggacgatatacgatttctatttatcccgctggagaaacgggaaggcctgtgttaacggaatcatttacatttgaaggaaatcaaaattacacggtagcggcggtggatgagctaaacaagcttgatttattattcatttatgacaatacggatgtaccaagtggagaaacaaagcttcggtttgtgcacctttctcctgatgctcctgctgtggatattgcggctagaggcggagacgtcattttttctggggtgcagtttaaagaagtcacaaaatatttacctttatcccccatgcacgttcaacttagtgtgcgcatagcaggaaccaaaaatgtagtactcgaaatcccggcactgaaccttcgtccaaatcgaacatataccgtatatgccgtcggatttgctaagactcgtcctgcattagaagcactgatttctcaagatcgttaacaaaaaaaccttccaatttggaaggttttttttattcgctgcgtgaaattaaacgtacgcgaatatcatcatttttcagatcaaacttttgtacttttacagcaaaatcactttctaacttcatctgctgtaacgctacgtatactgattcatttttcggatcaatcgttacccattctggtagcgcaaaattattatttacgtatcgaagcaccgtgcggacaggaagctgcagctttccaatagaaagcgactgctgttcaagcacaatatctccatttttttgtacgattggatcaaacgtcattcgaatattaatatcatcaccgaatacttgaatcgtaccgtctactctcaccacatcggtaagggtaattttgtagttaagcggctgattcttaaattctttttttaaatatttatcaatcagtacatttaaatccgcttttttagccaaaatagttaattccgcgtctccttctacttttttagaaggagttggatcggccttgtcaaccggttgaaaaataaacgcaataataaggatagcccctagaacattaatccctaataacgcgataaatagggttttccacttcttcatataacaatctccttactcgttcccactctctttcgtgtttttctctttttcatcagatgtgacttcttctgctgtttcctttttcttgtctccaacgagaggatcctcttcctccattgatttactaatgcgttcagccattagtttgtacccttttttattagggtgaaactcatctttccctaataaatttacgtcagaatcataaaaaatatcatcaatttttacatagcttacattatcatattgagaagcaattttctcgcttgccgcattccattcattaataactacattaatttctttgacatcgcttaacgatttaaagaatggattataaaaaccaattaaataaatatgagcattagggttaagcttacgtatacgtgaaaacacgtcatttagacgtttttcatattttgactgctgtgattcaaacgtcttaatagagatattataaaagtaatctcttaccactttcatcacgtcgttgccgccaatcgtcaagaaaacgatgtcggctcttgatacttctgctgctactcccggctgatttaacctcgctaatagctgatccgtccggtttcctcttttgcctagattctctgttcgtacattttggacttcattttgtttagaaaggtatttagttaagtatggtacataaccgccttttttagactcatctcctaccccttctgttaatgagtcaccaatggctacaatatctaaatctacaggaaaaaagcctttcggaatatgctttttaggtgttaaatccacttctttctgaacggcttcttctttagtgtccgttggcaaaaaagtcgtcgtcgaacagctcgctaacaccaccacactcatactgctgattactatacttttccattttttcattataacacctactaactatgctgtattctcgctgtcacaagcaatactgcttaccgctctgaataactatatctttatatcttatcacactatgtcaagttgatattttactacgtttcttgtatatagtatatgtaaaaaaaaggataaccatgtttctttcataaaaatatccgctaacacctcactataaagatagcttgtgtttggcggatagatttgacggttttatagctcttactgaagggttttgatatctttgatcatatcatcataaggaggatcagtcactccctgataagatttttgaacaactccatttttgtcaatcagaaaaaaatacgtaccgtgaataacctgcggattttcttgcggctttttcacaatcatcttaaattgatccagcgcaaatttttcaatttccgcttgtttataaccagttaagaagtcccaattcgaaaaatcagcgtcaaatttagtcgcataatccttcattttctgtggagtgtccacttcagggtctacgctaaatgaaacaaagcgaacgtctaacccttcttccttggccactttttgtaatttagccatatgcgccgtcattgggggacatacggtttcacagcttgtaaagataaagtcagctacccaaacattccctttcagctgacttagccctactttcttttgatcttggttaacgtaagaaaaagagtccatcttccaattaagcggattttctattttggaaccacaggctgttaacatcatgcaactaatgagcagtaaaaaaaacaatttataagaccagcttttcatatgttcctcctgcacgtttaaagtttagtcataactggggaaaatcaaggtaaaagttgaaccgttccctggtatgcttttcacttcaattcttccattcatttgttcgaccagttgataagacaccattagaccaatcccagttcctttttcttttaaagaataaaacgctgttcccagccggttcacttgttcactggtcatacctataccagtatcttcaatttgaatatgtacatgcccttcttgcttataaagccccactcgaagcgttcctccagccctcatcgcttcaattccatttttcataatattaagcaggacttgattcaattcgtttcggtttccccgaatatacatctcttcttttgcatctagttctatgagtatattatttgttaataaagcataagaagacaataaatctactaagctagtgatacactccaagcagttaataaaacggtgctgatgaacatcgggcttggctaaagataaatagtcatgaataatcgcttcggctcggtccatttcgttaatcataagatgaatgtaacttaattcagtgtttgaaagctttgtgttatcttgaaacagctgcaaaaaaccttttacaaccgtcataggatttcgaatttcatgcgctacagaagcagctaattgaccaattgcgttcattttttctgctcgctgcaattccttttgcattctcgttctttccataataacttccaattcatcaatcgctttggtaattccgtcttttgtatgactgagatctgtctctacattcaggtgttcttttgttactgacacttgatgaaaaagctgctgcagccgctcggtcatttcattaaatcttgtgtgtacgttccctaattcagaatcatcttcatgtgtcagcttcacatcaaacttcccacgacttaccgcttgaattccttctattaattcctcaaggggcgacattaatcgccttagtccccagtcttgaataacaataatgaaggtaaacagaagcgtaaacgcaacgaccaaagccacaattaaacgtttttgatagatatagatagcgcttgcatctatatctacaccaagaatagccacgacttttccagagctgtttgtaataggcgataaaacggttatccatgtcccgaattcgtctttgtatgtagatgttacgatatttttcttttcttgttctgcttgcttaaatgatttgtaaaattcttctccaccataataaatcatggacggctctagcgattgcttaattttcttatttgctgttacgataatcttatttccatgcgacttgaatttttcggtcgtcataatatacccctgcaagtacgacggatgcaattcataaatctttctgaactgcttttctagctcgtctttttcaggaaccgtcccgttccttgaacccactgctgctattacgtcttgtttagataaagactctctccataaatcggccataattaacgcgtgctgcgttaacgtctcttttgccatttttttttgaacttgatagctaatagctaaagaaatgactccaagggcaactacaattaaagtagaaaataaaaccgttttgttaaacacactcaaatgtcgaatatattttttcatcggtatactccggattcaaaagaatagtaaccagcacagcattcgctggtagaaagttgattctattatatcacacgttcgtccacttctctttctcctttttccaaaaaagagaaagcaaaaaaagtgacttgcaaaaagcagcccactttattcagcaaaatacataaaaccaattgcaccaatacccgtatgcgtcgagataataggcgtcgtatcttcaatcgaaaattgcgtatagccttttgccttcacaattgattcttttaacttagaagcgagtccaaacccatctgcatgtacaagccctacccctttaatactttttccctctgtatgctcttcgaactgcttcgttaaaaacttaacaatttgagaatgactgcgcactttagcaacaggagtatataccccgtcagctagagaggcaatcggcttaatatttaaaagagaaccgatcaatccttttcctcgtccaatacgtccacctttgaccaaattttcaagcgtatcgactacgacaaaaagattcgtattttgacgcaccttttccaagcgcgcgacaatttcttctaccgtatgcccatcttcaatcattttcaccgcttcaaagacttgaaacgaaagagcttttgtaatgtacatagaatcgacaacggtgatattcccttctaccatttgagccgcgctttcagctgctcgaacggttccgctcattccgccagtcatatgaatagaaatgacgtcatacccttcactcactaatcgttcatatacttcaacaaaagaaccaatagctggctgagagcttttcggcaattcttttgaatttttcattttttcaataaaatctgtcggcgttaattccacgcgatccaaatatgtttcattatcaatgttaatacataaaggtatcatttcaataccgtatttttcagcttcttctaacgttagatcaattgttgaatccgttaccactttaattttcgacatgtgttcacccctataagatgcattgcagactagtataacatgaacgcatacaacaatatagctataatagaatgcacgttttgctaattcgtaaaacgcatgttcacccttttaggtcaacaaaaaaagttgactctgctgaaaaattcagaaaagtcaacttttacgtttatgcattatgttttaatacatgagacttaaacagctgttcgtaatctttccatttcagcacgcgttttaaatattcttgaaacgagtaggtttgcttcggaactgattcgttcgtgatttgtctaataaataaatcaagttttgcagataacatgaaccgaaacgtgctattttcctctaaaactggaatttcagtaatttttactttttgaccactgacatgtttaaattcaaggctttttaatagcaaggcgatcaaccctctttttacccgtttattttattataatgcttaaggcactttctgtcttgataaaataaaaagaaaacacaaatattttttaaaataaaaatgcttcatcaacttattcgacagttgatgaagcattcctttttaaaatgaccttctatttaaataaataagtgaaacaagttgctttctttattaatttctgtgtaaggaaatccttttttatccatacgattaatcagtggataataatcttctttatgcttgagctcgattcccacaagtgctggtccgctgtctttgttattctttttggtatactcaaagcgcgaaatatcgtctgtcggtccaagcacttcgtctagaaactcacgaagagctcctgcgcgctgaggaaaattaacgataaaataatgctgtaatccttcataaatcatcgaacgttctttgatttcttgcatacgtccaatgtcattgtttccaccactgatgacgcaaacaaccgtttttcctttaatttgctcacggtatgagtcaagagcagcaatagaaagagctcctgctggttctgctacaatcgcattttcattgtatagagataaaatggttgtacaaaccttgccttcaggaacaactacaatatcgtccacaagctctttacttatgtcatacggaagcgttccgactgttttaacagctgctccgtctacaaatggatcgattgccggtagcgtcactacatttccatttgctaaagatgtctgcatgccaggcgcgcctgctggttctaccccaattacagctgtttgaggcgagatgctttttacgtatgtgccgacaccggaaattaatccgcccccgccgatacccgcaaatacgtagtcaatttcatcttcacagtcattgaacatttcaacggctactgtaccctgtcctgcaataacgtctacatcattaaatgggtgaataaatgttcgatgttcctcttcactgcatgcaatagcttgttcataagaatcatcaaacgtatctccgattagtacgacctttacgttatctttgcctaaaaatttcacttgattaattttttggcgcggcgttgtgctcggcataaaaattttaccatcaatatttaaatgacggcacgcatatgctacaccttgtgcgtggtttcctgcacttgcacaggcaattccattttctaattcttctggggataactttttgattcgattgtacgcaccgcgaattttaaatgagcgcaccacctgcaaatcctcacgttttaaatagatattacattcatatcgttcagacaaaacgtcattacgctgtagtggtgtatgcacaacaacatctttaatcaattgatttgcaatcatgatgtcctctaaatgtacgtgttttgttcgattatctacttgttgtttcataaccaacttccttcctcttctaccattattaatttgtacattatatcacaaaaaatttagaaaaatcattatttttcattaataataactaaaaaaacttttccaactattttactgtccacatactttacatatgtttagcaaacgctaaatagacttacaaaattgcccatactttctacatgcagctgatgcaataacaggtataaattaagaaaggttgtggaataaatggagttttcgcttcaaagtcatgaaagtgccgttccgtgcgaaatagttgcagatgaagaaaacggtagatacatgcttcgcaaagcagatacgagcgaagaagtttttaatacaccaagcgagctggttcagtggattgaagctaactggagccctgaacaatttgtgagcccagcggcttttcacgaaatgatgaagcaattaaaatcaatataaaaagagattgaaacataacgaaatcaatctaaagacgaataaatggagtataggagctagctagtaggaggcgcttgttacaccgcatttgatttccatgcgagacttcgctttcctggggcggccggtgagcctccaatcaactgctaaaagcacctacatacatgaaatctaccttcaccctcataatgaaaagatccgaacgattcaacgttcggatctttcttcgactaacatacttttgtaccagactcgcgttttttataaacaaaagagatcagcttcgctcgtatacggtaaaataatacgtgtagggatttttttcatctttaattccttgctgcttcgaaataactttccattcgctcaaatcaatcgcaggaaaatgtgtatctccttcaaaggattcttcaatatgcgtaatataaagtcggtttgcaacgtctaatgtttgctcatacagagtagctccaccaatcacgaagagctcgtcttctttttcagcatctaatgcttctaatttctcaactgaatgaataacggttgctccttcttgttgataatctttttgacgcgtaagaaccacattttcacgattagggagcggtcgtccaattgattcaaatgtttttcttcccattacaatcgtatggctcgttgtgatgcgcttgaaatactttaaatcttccggaaggcgccatggcaaatcattctctttaccgatcagcctattttgatccattgcgacaatgagggaaatcatacgctcacagctcctttgatgtgaggatgcgcattatagtctactaactcaaagtcttcaaattcaaagtcaaaaatcgattttacgtctggattgattttcatttttggcaaagcatgaggctcacgcgttaactgcaggtttacttgttcaatgtgattgctgtaaatatgcgcatcgccaaacgtatgaacaaaatcacctggctctaaatcacacacttgtgccaccatcattgtaagcagcgcatatgaagcaatattaaacggtacgcctaggaaaatatcagctgagcgctgatacaattgacaagacaatttgccgtccgctacataaaactgaaataagcagtgacacggcggcaaagccatattgtctacatcagacacattccaggcgcttaccattaagcggcgagaatcagggttgtttttaatttgattgataacatttgtaatttgatcaattttttctccgtccggcgttggccatgaacgccactgatgaccatacacagggccaagctcgccgttttcatccgcccattcattccaaatgcgcacgccgttatcttgtaaatacttaacgtttgtatctccttgtaaaaaccaaagcagttcatgaataattgatttcaaatgaagtttttttgtcgttaataccgggaaaccttcttgtaaattaaaacgcatttgatagccaaatgtgctaattgtacctgttcctgtccgatcttctttttttgttccatttgctaacacatgctcgcaaagttcaagatattgtttcacttccgacacttcctttattaaaaagtccttttctattgtataagtgttcacgagctaagtaaacaactaaatctcagcgcatatagaaaagttttttatcatctagatacgcaatttccccgaaaaaaacgagaatgagacctaacaaaatcaattaaataatcgagtatgaatcgcttatgacaccgcggttgatctccgtgcaaggcttcgctttccgcgggcggccgatgagcctcctcgtcgcttacacttgcggggtctcctctgttccgctttccccgcaggagtcttcgccttgccctccaatcaaccgctagaagcaactaaacagatgaaatctacgtttaccatgaccataaaaaaatccgaacgaatttcattctctctcaagaatctcgattcatcgttcggatcttccttaggctaaactacttttttaacaacttagtctttgttaattaaatacaattgtgcggttttcatgtactaaaatgcggtcttctaaatgccatttcacagcacgtgccagcaccgtacgttcaattaagcggccttttttctttaagtcatctgcatcatcacggtggttcacgcgttcaatatcttgttcaataattggtccttcatccaagtcgtccgttacatagtgagacgtagcaccaattaattttacacctcgttgatatgcgcgttcatatggacgtgctccaatgaatgccggtaagaatgaatggtgaatattaatgatacgatatggattttcagccacaaaagtcgacgttaaaatttgcatataacgcgccaagataatcacgtcaatattataatcttttaatacctgcagctgtttggcttctgcttcttggcgaatgtcttttgtcgccggtatatgcttaaacggtataccaaatgattcaaccacttcgcgcgcatcttcgtgattgctcacaacgacagcgatgtctgtcatcaaatctccgctttcccatgcccacagcagctctagtagacaatgaggctcttttgacacaaaaatagctgtttttttcaaattatgagcatatgtaaactgccagttcattgaaaatgtatcggcaatttttttgaagctttcttctagttttgcttctttagctaataaatcctcacattcaaattcgaaacggataaaaaacatacccccttcatggttcgttgaatgctgacttgattctacaatattggcaccgtgctcatgtaaaaacgtagacacagccgatacaatacccggtttgtccggacagctaattagcagccgaccgcgatttttatatttctctttatataaagttaaatgtttttgaatatgcgatttcatgtaattccctctctttttttaaatatacagacaattgtaccattatccttgtaacgatgcgacattgaaataaggctttgacaaaagaaagccgaaacgtttgcttcagcttgtgtacttgttgttctaacatctactcccatcaaatcgttcattcactcacctttacgttctacacatacctaaaatgagtgtttcctaaagtgctgtagctcatccaattctcttgctgcttttgaattaaacataaaaaagctgctagcacaaaaccagcggcttttccttattattgcacagctttttcactaacttcatgcacggcattccgtaccttgccatattcgcttgcgtgaggacgatctccgtcatcttcgtatccgtaatcaaacattcgatttcgatttaacgttaatttcgtaatggttggacgtaataaatcaaacaattcaaatcgttttttcaaatgtggaaatgatgcttgataatgtaaaatttctgctcgtacacttttccaaaattccccttcttctacgccttcatgctcttctaaaatagtcgctaaatagcggaagtgacaaacaaataaccctgttaaaataaactgcgtcagtccttccggctcttcgctgcgcaacacttctttcaattcaaaagatagctgctgcagttcttcaaacggctgatcgctaatattcacgtcgtctacaaaatccttcataataattcgaacgggcttgttgtttttaagcaccagtaccgtattttgaccgtgcggggaaaatacagtaccgtattgatacaagtaatgaagaagcggcggcaatacagcgctggttaacgcatcaatccactcggcaggagttaagcccgacttgtctatataagatgaaactaaagctttccctttactgtcaacatgtaaaagcgcagctagcgtaatcgcatgctctccttcttctaactcttgatagatgctttcacgccaaacgactcccagcatttctaaatactgataaggcgcgtttttaatagaagcaaacgtcggctgagttacgtttaacgtagccacttcacctaaaagtcctactttgcacgtatcttttaaaaacgcatcgcgatctcgtatgcctttaatgtgctgagttacttgaggagcaattaccgtccgctcacttggaaggcctctgtacacaagcgtatttaatatactcatgggaagcttcacatgatatttatctcgatttgttgtattcacaaatgtacgaatcgactgctgagggaaatattgatcttcaccttctcctaatggaacaattaaatcatttgcaatgtattcagcgaataaaggaacaatcacgttcatccactgccattcatggacgggaatataataatagtccgctgctaaaaggtcttggcttgttaattctttttcaaattcagctagcgtctcaccgcttagctcctgcttcatgacatcctcgaagccgagggtatctaatgaatgaaacgaagcaacttgcttcgcaacagcaatccatgaaagctgaattttttgtttttgctcaggtgcaaaccgcagataatcatcatagccaaatccgatgcgccctttgttgtatgtaatccaaggatgtcccgtcatttcaccttctagctccgcataatccatacctgctaattcatccgctgattttcgatgttgcaaatgcacgtctgctattaatgtatgaaaatattcttttgctaagtgacctgcggttgagctagacattcctttgtcttcagataagctaattaacagctgcaaggcctccgaaaatgtaggggttgacgctttagatgtcagcttaatactttctggcagtacggaaaaactgtcaaacaatcgctgtttcgcttgatatgtatacgtaacgccccggtggtcttcccatcgatacgtggcaagcgcaccctgcttttgcagctgttttggctcaataatattttcatacatgaattcctgcagcattttagctaaaagctggcgatttgctttttcccatgattgcttattaaatacggaaagattcgtttctttgattttcatccttcattctcctttacttgtcttagaatagggattgttttattacgcagcggcattacagcgctagcagctagcaaagcagcggcaccagctgctaaaggaagcgctaagtttactttgctgatttctagtgctaaaagcggtgcaatcagcagggcaatattttgaacagcaataagccagctgtaatagtaagcagctccttctttgcttttttgaaataaatagatatcaagtataaccatgctgagataaaacccggctccatataaaattcgacttataataaacatgctgagatgatcggcatatgcttgcaaacatagcagtaaagcactagcacccgttacgctataaaaaagcggtataacttttccattaaatagctttgtaggtaccgtaagctttaagacgatcgccataatgctcggcatcacatataacaaagcgctgccttgactgctcatgccatatgtttcatttgtaaacaatgtaaaataagggcgaataacattgtgtccaaggtgaaaaaagaaaatagccagcaaatagaaaaaaataggctcgtttatactttgaatgtatgctggtgttttttctttttttaaagatgaagcttttcttgttatgagccatacggccagtaccatatcagctaaagcaaagtattgatatactttaagcggcatttcccatgcaataatcgtacttccaaacaagctagcgacaataatagccgtatgaacaataaatacataggttgttgcagcacttgcctttttctgtccatttttcatgccgcctactaaatatggatacaaaagatataaactgctttgaaatacaagcagcgctaaggaagtggctaaaaatccataaaaagtagaagcttcgctcaaaatgactttaattaaggctgtcattagaagtgacgttacaactacatattttacgttccatttcttaagcagcattccccataaaggtgtcataacaatgaccacaatccggcagcaaataataaaaaaagacgtcatcatcactccatctacatgaaatgcatttgtaaaatactgtggataaaatggtgataataacacttctgacgtcatggtcataaacaaacagataaaaacaaaacgcgtagaaatcatttcttaaaatccaaacttttggaaaacagtattttcatatattttgtacacgtttttacctgcaatttggttaatcaaaacagcattgcgataagcgcctaagcctaagtctggagctccaactccgtgtgtatgaagctctccgttttgcacaaatagcggggctccttttttcttcacctcaacttgatagagttcgttaattttcagctgtcctttttcatcaaacaccaaatgttcttttaaaccttccataaaagcaggctcttttgcatgatagcccgtggccataatgacaatttcactttcttctttttcaaacgagtcctgctcgtattggtgaagagtaagaagatgtatagcgtttgtcttttcaacgcctgcaagttccgtaagcgcgcgcatcgttagcggcacttcttttcctccaattgttcgttcgtaaattaaatcataaatatcgccaatcgtttcaaagcttattcctttgtataaaagagcttgatttcgtaaaacgctctcttttttctcttggggcaatctgtaaaaatagcgggtatagtcaggcgaaaaatgttcaaggccaagctttgaatattccatcggataaaacccttttgagcgcgtataccaattcagcttatagtcaaactgaggctgctgttgaagtaaatcatagacaatttcagctgcgctttgaccagagccaattacggtaatacttttagccttcagcgtttgttcacgattcattttgtactgagcagagtgatagaacgtatcgctggctactgattgaaagtctcttggcactacgggctgtgtacctactccagttacaagatgatagctgtaataggtatgaagctttccttctttttcaaccgttacttcataaaaaggtttagcgtcttcatgcatttttacttctattactctgctgttaaattcaagcccactcagctggctcgctacccagcggcaataatgattgtattcatttcttggaatgtgaaacttctcaaagaaataaaactgatacaagcgctcatgctcatgcaaataatttaagaacgtgtacggactcttcggatccaccatcgtgaccacgtctgccataaacggaacttgaagagttgtcccttctaaaagcattcctggatgccaattaaactcatttttttgttcaaaacatttatatgtacagtctgttttatcaattaaagctgctaatcctaaattaaatggaccaactcctactccaattacgtctaaaatgtcccgttgttccattcgctccaccttctttcaaatacttttctttcacatttcagcagtacgcctgttttatcagacagcgacacttctttcataaattgaaacccgcattttttaaatactgcaatcattttttcatttcgtatatctggttccgctattactttagcagtatctgctacctggaacttgtgctttagtaaactaagaaggagcggataaatatagccttttcctaaaaaagcaggttctccaattaataaatgaattccttgatctcctttttcataagggtaatagttactgataatatctccgtcaaccgtataagattcccaatagctcataggtacaccgtcaatttctccaattagcagtttttgatgagaatccgctaaaaatgtttttaaatgctgctcatacgcctgttttgaaatatttaaattccaatacggaataacatgcggttcatgcatccacttatagagacggtcgaaatctttattaaaagaaatagagcgaaaggtgatgctctgctccttttgctgaattataaatggatacttcgtttgtaatgctgaattcatacacgcacacctgcagattcgtacagaggattttcaacatttacataaacagactgcgtttcaagagaccctaccagctcatccatatcatgaacacgcgttaagaaattggctttgcaaggcagcgtttcctcttctagcatcgataaaacaagacttgtatgatctttttctttgtacatctctatctcttttcgcaaaatcaatagcaagtccgactcttgaacgagaccagctgtaccaaaagcattgattaatcctaaaatatggttaaaaaatacgtaatagcgaaatctttcttccgctacagcgtcatcacataccgtatcgctttctccgtttaacgaaggaagcagctcgcgaagctcttgttcctttgatttcataaagtagtagccttggttgtcgcggtagtaaaacaccgatggatacccgctttcatcaagcttaataacggaattttgctgatgagcttccagcgcgattcctttttgagtgtaaagccacatcatcgggtgaaaagagacatctaaataacgtttaaaccagcgtttgcttacgtcttcattcgtgctattttcacttgcagcaatatggttaataatattatcaatttgagaagctttcccaaacacatgatcttgacacaaactggctagaagtgttgtacggttcccatgctcaccttgaaaaggattgcttcgaatcatgacttcaaacccaagctccttttttccaagcgtgatgtaagcagggtcttcaatcacttgaaaagccggatggttttcttgaagctccgcctgtaatcccttttgcaataaatggctaacttctactcctctgcttaattctttgcgtttattcactctcagtgaattagtgatctttaccggaatagaaaatttgtacatcacatctgcatctttactgtatacggttctaacagacgaagtcggataaaacggctgaccgtgtggccctagataagcaagcttgcctttttgaatccattcacacacttcttcttttcctaaaagataacgagcttgcagcgggtgcataggtataagtgaataatcgtccgcttggcaatgcgactgtatgaattcttcagaaaccttgttatcttttttcagctgctctttaataagctgtgaagcggtttgactcccggcagactgttctgcaacaagagatttatgtgctttaaaataatgaagctgaaatttgccgttcacttcaggcccaaacacctcttcttcttcaggtaatatcccttgacggcttttaggtgtgggatgcagctggtggccaataagcaatgactgctcagattctaagaacgttttgtcccatttatagcacgtttctaactctttctgtcttttttcaatgaacaatttcatattttcgtagcttaatagcacacgtacaattagctcattcacctgtagtaaatgatctgttacttcttttaaaagaaaggctaaaagagtgacgacatctaattccttgagctcctctttctgaatgcgataataaaagaccggaaagaacaagtgacgtccggtagctgaacggtactttactggaaagtaaagagttaccggctgtttttctaacctaagaacgagcgtttcctcgcttttcatttctgaaacggactgccatactcccttacctgtttctcgaatatagcaattaataatattttgcatcgtaataaaattagccgataactgagcgttcacgtaatcgctcctcctttttctccaactcttttcctaaagccacgacttcctctaactgagtggcaacagaatcaactgtaatcatgggatttaacatcgttagctttaaataagcttgctctttatgctttgtttttgccatgataaaagtgcctttttcatataaatgctgctgaatatgctgatttaacttattttcataatgctgctgtttttgacaatcaccatataaagtatctggcacgtagcgaaatacaaccgcgttcatataaggatcatttaacaccgtaatattcctttgctttcgtaaatgttcagctgtctgcttagccgtttcaatggtatgatcaaccatttttccatactcatctgtacctactgcacggaaagttaaccatagcttcaaggcgtcaaatcgtttggtcgtttgaatactgcgatctaccaaatgtacatgctcatcttcttcgggatttagataatctgcatgaagctgaatgtgtttgaacatagctgaattcttcaatagaaatgcaccgcagctcaccggctgataaaaccacttatgaaaatccatcgtaatagaatctgctcgttcaagagctcttaagcgttcacgatatttatgtgaaaatagcagcgctcctccataagcggcgtcagcatgaagccaaagcccttcttttttagcaagctcacttatttcaaaaagaggatccacgcttccaaaatccgtcgtgcctgccgttgctacaacagcaaaaggaaggtttccctgtgctttgacttcccgtatcgcttcttctaaattttctatatccatctcgtgcctttcattgcactttacactcaccactgcattcatgcccaatccaagctgagctgcagattgctgcaccgtaaagtgggctttttcggagcagaaaatccgcagttttttagcttggagcggtaaaccttcttcactaacattaattgaaaatgcagcatggcaatattcattacgagcaagcagaagtcccgtataattcgactgagtccctccgcttgtaaaaacgccggaagaagagcttgaataaccaatttgttgtgttaactcatcaatcacttgatcttctatatacgtagctgccggactttgatcccacgagtccatagattgattcaaagcagaaatcatcacttccgcagcaagggccggtataatcggaggacaatgcaagtgcgccattgccccgggatgcgaaatatgaagcgaatgatccagcactacggcttgtacgtcatcaaacagatcttctagcggctgttcgtgttcgctaaaatagaccgaacgattgactaagttcgatagttcgtcaacgtctatgtgagtataaggggattttagttcatggtagtgacgtttaatcatctcagccattccgcctatcatcgcttcataattctcgaggctttctttggatgatgataaaaaccacttttcaaacggcgccattttatttattcacccacttctcttctgctgcttttatcgcttcttcaaatcttgttaacacttcatcggtttgttgtttcgttaaaattaatggaggaagcagacgaataacagcaccatgccttccacccacttctaaaatgacgcctctgtcaaaacattctttttgaatcagcttagctaactcaccgtttgcaggataactgccgattttattagccggctttgttgcgtctatgatttcaacgcccagcatcaaacctcttccgcgtacatcaccaattgagaatacttgcttttgaatatgttttagctgactctgaatataagctcctaattcatgagcatgtgcaggtaagttttcttgttttataaattgcagagtggcttgtcctgtagccatcgcaagctgatttcctctaaaggtgccgatatgtgcacccgcttcccattgatccagccttttatcatacagaacgactgataaaggaaggctgcctccaattgctttagatagcactaatacatccggttcgatatcagcgtgttcgaatgcatacagctttcctgttcgtccaattccagtttgaacttcatctacaataagcggaatgtttcgttcttttgtgattctgcgaagctcttttaaccatggaatcggcgccggaacagagcctccttctccttgtacaatttctactacaacacccgccggagtcacaattccactttcaggatcatccagcatattttcaatgtatgtactaatgtaagtgtgaccttcagcacccacgccaaacgggcagcggtattcatatggataaggtagaaaatgtgtatcaggtactagcgcatgaatgtgctttttgggactcgttgtaccgctaatgcttaacgttccgtgcgtggagccgtgatatcccccttgaaaagataaaatcgttcggttacctgttgctgtttttacaagcttcaaagctgcttcaattgcgtctcctccagttggaccgcaaaactgtattttcgctttgtttgcaaattcttctggtaaactagcaaatacttcatcgataaaagcttctttcacaggcgttgttaaatctaatgtatgtaaaggaatagattttgctaaaacgtcttgtattgcttcatgaactacgtaatggttatgaccaagagcaagcgtgccggctcctgctaaacaatcaatatactcttttccatccatatccgtgatcacggcgccttttgcttgtttaattgcaataggaagccgtctaggataagaccttgcattggattcacgttcattttgcatagcaagcagcatttcgtttgatgtaagttgtttcgttgacgttgacatatcatatcctcctgtttgttcaattgataatgattttcattaacaattacaacaataaatgataatgattatcactgtcaatgattattctgaaaatatgaaattattcctatttcactttaaagtcgaaaaaacgcagcatttctcttatgtagcaaggattcaaagggttttatggtgttttccatttagggaaaactatgtaataagtccctttctatttccaaataaaaaagtgctacaattccttgtagcacttctgttacttttgcttattcatcgtttcttttgcagcttttacactccttgggtcaagcggtttcgtatattgacaattcactcgaacccctgaaccaatacgaatttctttcacgggagtaacggataagaacgcttgaagattttcaggtttcagcccttttgtcccgattaaaataatatctttatctttcattcttcttaacagttttttaatatgaggaataccgtttagcgcacttttatccgctcctgaagtcatgacacgctgaatttgcttatagcttaaaagcgtttcaagcgccttctcttgatcactgatttcatcaaatgctaagtggaacgttacattcatttctcctgccgcatccagcagtcgctttaaagcttgctcatcaataattttgtcttctgttaaacagcctatttgaattccatcaatgccaatttctcttgcatagtgaatatcttcaatcattgtttgcaaatcatcttcatcatattgaaaagattgattatgtggacgaatcatcacaaatattgggatatgtatcgtttctttcacttttttcatcaaaccgtagcttggggttaagccgccttcaccgattccagttacaaggcttatacgatcggcaccatgttcctgggcaactttagcatcatgtaaggttgcagctgtgacttctaatatcattctaaaaacaccctttcccctttaatatagagcttttgccttcttttccctgtatttatacttaaaaaactctaccaaactctcttatttaagaaaacacccaaaagatgtgattaatattttcaaaaaattgaatgtcatggaaaaagagtaagaactattctttttctcatgacgtttcaattaataaaattctatatttatactaaagattcaaaaatacatcccttttatctagggtaaagggtttattaaaaagagcgtggatttgtttgttgcgtgaacatccaatcatttaaagaatgaggctgctgatgaccaactggtgctgagaaatcgcggcatccgcaatcatgcatcggcatttggcccattcctccgtgcattagcggcattccaccttgcatcggcatttgacccattcctccgtgcattggcggcattccaccttgcatcggcatttgacccattcctccgtgcattggcggcattccaccttgcatcggcatttgacccattcctccgtgcattggtggcattccgtcttgcatcggcatttgacccattcctccgtgcattggcggcattccgtcttgcatcggcatttgacccattcctccatgcatcggcattccgtcttgcattggcatttgacccattcctccgtgcattggcggcattcctccgtgcatcggcatttgacccattccttcatgcattggcggtagctctccgtacattggcatttgattcatttctttttgcatcggcggcattccgccttgcattggcatttgattcattcctccatgcatcgacggcattgcatctttcatcggcggcatttctccgtgcattggcatttgatttgcgccttcttgcattggcattgcctgcatttcttttgcagaaggcataggtggcattttagcaggtttaggtgctgcttgcatatatggattggatatcggttgtccggtttgtttcattccatacgaatttctcatttttaagggctccttcccattctcttactctgtttacgttattctttttaccatcgatctgaaattcgtccataagaaaataggctttctacacattcaaaattgtagaacgtataaaaaaaagctataatcgaggcaaattgcagatagaaaggtggcacatgatgaataaaaccattatcgtatggattcgaaaagattttcggctggttgataacccagctctgtttcacgcagctaaagaaggaatggttgtacctgtttatatccatgacgactacgaagaaagctcaatgggaagtgcaagtaaatggtggcttcaccatgcgctgaatgactttaaaacctcgatcgaaaaaataaaaggaacgctgattgtacaaaaaggaaaccctaaagatgtgttacaaaaattacttcatgaaacgaatgcacaagatatttattggaatagacggtatgaaccacatgggccaaaaagagataaagagcttcaagcttttttttcagagcaacaaataaatattcgcacatttgaggggtttctccttcatgaaccttggaaaatcacaaaagaaaatggagatccttataaagtatttacagcttattataaagcttctcaaaaacattcagtatcttctgctgtaaaaaaagttacttccatacaggcctcctctaaaccggttgaatctctttcagtctcagatctcgatttgcttccaagcataccgtgggatgaaacgattaagtcgacgtgggaagctacggaaaaaggcgctattgatgtcttcaaaacgtttttaaagaataagctgcttcgttatgaaaaaggacgagattttcctgctgaagcattaaattcatttctatctccttatttcgctacaggacagctctcagctcgcgtcctttatcattatttgagaactaaagctgaaaaagtacgttctgatgcttttgaacagcaagctgaaatgtttattcgtcaacttatatggagagattttgcttatcagttgctttatcatttcccgcacattacaagtgaaccgcttaatgaaaaattcaagcaatttcagtgggctgacagcaatgaagagcttcaagcttggaaaaatggaaaaaccggctatccccttgtcgatgccggaatgcgggagctatgggaaacagggtttatgcacaaccgagttcgaatggtagctgcttcctttttagtaaagcaccttttaattcattggaaacacggagcaaattggttttttgataccttagtagacgcagatttagctaataatacaatgggctggcagtgggttgcaggctcgggggcagacgccgcgccatattttcgtatttttaatccaattactcaatcagaaaaatttgataaagaaggagaatatattaaaaagtggcttccagagcttaaagatattccttcttcttatattcataaaccttgggaggccccagcagacgtattagaaaaagcaaacgttacacttaataaaacatacccggctccaattgtcgatcataaagcagctagagagcgagcgctagagcattatcagcatatcaaataagaggtaaatcacgcctcttatttgatatgctgaattttttaaacgtgtaaaaaattccctttcttatctatttgcaactaaaaacatgtatttgaaatctctttatagggttttcaagcccaattcccctctctatagcacatttgatttttcatattttttcctataatttgaatatataataatgattatatatgcttgggaactctctcattgcatagatctgattggagtgattcgatgcccgtttgtccttcttgtaactataaggaagattataatttttgcagaatgtgcggcactcaagttcggcacaccttcgccaaccaagaagatcagcttttttatccattaaaagatcgaatcattacggatgacaatgaaccaaagcatcaagctattttatctcatacccatgatttagtatgtgctattactgaagatggcatttatgaatacgcttctccttcttacgctaaaacgttaggcgtttatcctgatgagcttattggacaacatgtgcttatcaatgcgtatcccgaagacaaacacataatctcgactattttagctaacatgagcaaaacaaaagatgcctccacgtttgaataccgaaagtttcacgtgaacggcaccatcgttttattagaatgtaaaggcgctccaattattacatccactggagaaatcgaagggtttgtatttgtctcacgagacgtaacagaaaaaagacaagcagagaaaaagatccagaattcagaaaaactttctgtcatcggtcaccttgctgcaagtatcgcacacgaggttagaaatcctttgacaaccattaaagggtttgtacaactgttcagtgagacacagcagccgaaaaaaataatgatttatcgagatctcattcagcatgaactttcacaaattgaacatatcatcacagagtttatgagtttagctaaacaagagtacgtatatacagacaaccttgttattaccgacttgttagatgagatattaaagcaatttgaaccggctactggagtcaaaaacatccacatcattcgccattacccaaaagaacatcccctgctcgttagtggacaaaaaacacagctaacccaagtatttattcatgttatacaaaatgcgattgattcgatggaaagcggcggcaagctggcggtatcgattgaaaaatcagctagagaaacgctgtgcattgtgataaaagacaatggatgtggaattgattcaaagcgtatcccttatataggagagcctttttatacaacaaaagaacgaggaataggcctgggactaacaatttgcaacaaaattattaatgaacataatggtttttttcatgtatccagtgaaaaaaatgacggtacaagtattaccattacccttcctatgaaaacgactggactttacgtagtggaagcctaaaagagaggttgagacataactaaatcacttccatttaaagacgagcaaattagataaatgctctagtataaatagccttttacaccgctgttgatatccgtacaaggcttcgctttccgcgggcgggcgatgagccttctcgtagctaggctcctgcggggcctcatctaggccgcttttcccgcaggagtcttcgccttgccctccaatcaaccgctagaagcaactaaacagatgagacctacgttcaccattccaataaaaaacgaaccaccaatcaaacattttgatcaatagttcgtcatttaccttggctaacatacttttgtcccagcctcttcttcctttaaaacagctgggtgtacagctgatacttataaagcatatagaaacttcctatcactgccaggtaaaagatgagcgtctctgctccgctacctgtttcgtatgttaaaggaggcttaaacttcttcttgctaagaggtgagaaaaaaggtacccctcgtttagaaaagaaatctccaagaatatgaaaagcgtatccataggctattcctaatgtaaagtcattgtcatacatcgtatgtaaataaaaaataagtccacttgcaagaatagaatgcgtaataccccggtgtccaaaaatagatttaattatttttgcgagaccaagagatcttctaccaatatatgaatttggttcatcaatatcaggaagcagtgctccaatcgcgatgcctacaacataaggaaatgtaaacgaagcgtctcctgttatagccacgccggcaccggcagcaatcgatgttgcaatatgtgtgtgatatctcaaatatgccaccttctttctttttcaacttaaggcaagcactgtgatcaaaatcacacatacgttcgcccaacgttaactataagtgaaggtggtaaaaatgtcaaaataatctatgattacgtaagctgcagaccgactaacccgataagcatcacaagaaaactaataagagtaccctttccatttttctttgctcttccatcttttttgacaatagaataaatccacgtactcgaatacacagcgaatccaagaaaaccaaataacgtgatatatgtaaacataccgaaactcctttgcttgtcattactattaactatacgagattttataaaaaaaacaaagtagtatgacggcttgtttaatatctctttctttttcttatactaggaagaggagggatggctatgcaacagaagcagctagaagatatattcgacttctatgggttaagtgaggtttatcgccgcaatttcgaggatgctgaacgccactggttatttaaagacgtggaggtaactatacttgaagatttttttaactctcacgattgcgaagatctcgaatgctgtactctagaagaattttgtttttcattcatgaatttccaatccatacatgcacaaattccccacgtgtactattactaaaaaagtgatttcgcaggaaagcgaaatcactttttgttaaaagcctaaagaaatatattttacttctaaatattcttcaattccgtaatgtccaccttcacgtccaagcccactttctttaaagccgccaaacggcgcttgtggtgtagaaggtagtccatcatttagccctacaataccatattctaaagcttcagcaatacgaatagcttctgaaatattttcagtgaacacataggctgctaatccgtaaggcgagttatttgcacggcgaataacttcttcttctgtttgatacgtcgcaattggagcaattggcccgaatgtttcctcgtacatacaaagcatatcgtccgttgcaccatctacaaccgtaggttcaacaaacagtccgcttccctcttcgcgtacagcccctccagttaagacgtttccaccttttgctacaacatcgtctaagtggcgctttactttctctaacgctttttcatcgattagaggtccgatatccgtaccttcttctaagccgtttccgactttcagctgactaacagccgctgcaaactgctctgcgaacggtttagcaatagactcgtgcacgtagatgcggtttgtacatacgcatgtttgaccagcgttacggaatttagaagcaattgcatttgttactgctttatctaaatcagcatttgctgttacgataaacggagcgtgtccgcctaattctaaagacacttttttaaccgtatcagctgctccgcgcattaacagtttacctacttctgtagagcccgtaaacgatagtttacgtacacgtccatcttgaagccacgcttctccaatcgcttttgcatctcccgtaactacattaattacgccttttggaatacccgcttcttgtgccagctctgctagacgaagagccgttagtggcgtttgttctgccggtttaataaccgctgtacatccagctgctaaagctggcgctactttacgtgtaatcatagctgccgggaagttccaaggcgtaatagctgccatgactcccacaggctgcttatgagcaaataatcgtttattagaagacgaagctggaattgtttctccgtaaatgcgtttgccttcttctgcgtaccatgaaacgaatccgttggcatagccaatttcaccttttgcttctttaagaggcttgccttgctcgactgtcattatttcagcaagttcatcggtgtgttcttcaatcagctgatgccatttaaataataatttaccgcgctcttctgcagtttttttagaccatgtttgaaacgcttcataggcagcatctgctgctagcttcgcttctttttctccaccttttgcaacagcagccactacttcatttgttgctggattcaccacttcgtatgtatcacttgctgaaacaaattctccgttaatatataagtttgcttgcttcatatttcttcactccctgcttaaatttatctactcaatgttctgtgctgtccgaaacatactttcgaattttacgactggcttgtgattggctaataccaagctgttctgctactttgtaagatgacctatgctgttcaaacgcctttatgaccatctctttttccacatgttcaatcatttcaggaagcgtatgcacaggtggatcgatagcaaactcctttgcaaaaggcaaatctttaagcgtaatcatttcttcccctgtaacgaccagacgctcaatgatattttccacttcacgaacgtttcctttccattcttgtcctaaaaacgcatctaacgcctttggtgataaacgtacattacgttcgtatgccgtattaaaatggtgaagaaactgatagacaagcggcagaatatcttcttttcgctctcgtaaaggaggaatggtaatcggcactacattaagtcgatagtacaaatcacgtctaaactttccttcttccaccatttgttctagattttgattcgtagcagcaataattcgtacgtctattgatactgctcttgttgagcccacaggacgaattgtacggtcttgcagcacgtggagcaacttactttgtgctgaaagagaaagttcaccaatctcatctagaaaaagcgtgccttcgttcgaaagctcaatgattccttttttcccttctcgaaatgctccagtgaacgtaccgccttcatagccaaatagctctgattcaataagctgttcaggaagcgctgcacaattaagctcatgatacggctgctgttttcttgtactaagctggtgaagcagttttgctactctgctttttcctacccctgtttctccaagtaaaagaacggttgtatttacagaagcaactcgttgaatggttgaaaaaacttttttcatcgcttcactttttgtcacgatgccttctaaatccacggcttcgtttaactcttttttatagttttcaagctgttcttccatctcttctacttttcgttttaattccatcaagtctgtgagatcccgagaatagctaataacgctttttaaatgtccgtcgtttgtaaataccggccttgtccgcacatgaagataccggccggagtttgttttttgaaccaattcaattgcttgattagattcaatcacttttagcgtggccgaaggataaaaaatacccatttcctgcagttcttttacgtgctttccaataaaatcttccactttcaaagcatagtttttttcacactctgaatttacaactaacacatatccatttgcatcagttacaaagatttcatcaaatgatgactcaaatatatcgtaaagttcgtcgttaatttgctgaatatgctttttatgaatggtcatttgaatcaccttttcgtcaaaaaataattattattttattttatcagaaaatgaaaaatctataaatagagtgtccaaacatacccattttttgtgattcatgaagaatgagtgaagagttctctcttcactcatgccacaatttcacttatacttcaaccgtttgctgtacgcttgcttctagtgctgcttcaaaaatagctaagccttcttctagctgctcatccgtaataacaattggcattaagatacgaagaacgtttccaaatactcctgcgctaagcaataataatccacgtttgtttgcttcttttacgatgcgctgtgtaagctctttgtccgcttcttttgtttcacggtctttcacaagctcaatcgcagacatcgctcctaatccgcgaatatcaccgatacagtcatattttcctgctagtttttcaaatcgtgatgttaccacttttccaaggtactcaccgcgttcgtttagcttttcttcttcaataatatcaagtacagctaaggctgcttcacatccaagaggacttccacaatacgtcccgccaagctcaccaggattagattcatccatgatttcagcacggccaatgacaccgctgattggtacgccagctcctagtgattttgataccgtaattaaatcaggctcaacgtcaaaatgttcaataccgaagtagcggcctgtacgtgcaaatcctgcttgaatttcatctgatacaaataaaattccgtgctctttacataattgatacacttcttgcacaaaacgtttacctggaacaatgaaaccaccttcaccttgaatcggctccattacaacagctgcaatcgtttccggtgctacttctgtatttaagaagtttttgaattctgtaatcatgaaatcttcgtatgcttcaactgataatccttgtggacggcgatactcataaggatatggagctttgtatacttcaggagcaaacggtccaaattcatatttatatggttttactttacttgtcattgtcattgtcattaatgtacggccatggaaaccgcggttaaaggaaataattccttgacgttttgtatatttacgagcaattttcactgcgttttctacagcttctgctccgctatttaaaagtaatactttcttgtcaaattcaccaggtgcaattgctgctaatctttctgcaagctctacgtatgactcatacatcattacgttaaatcctgtgtgaataaaacggtctacttgtttgtgaagcgcttcttttacttttggatgactgtgccctacattgattgtgccaattgcgcctacgaaatcaataaacgtattgccatcgacatctttaacgatcgccccttcagccgtatcagcaaatgtcggaatgccataacttacacctttcggaatggcacggtgtcttctatctaataattgctttgcattttctcccggtaaatttgttgctactttgctaaaagtttgactcattttttatcttcctctcatattaaataattcttcaattagtttatatgcaaaaaacgtgccaacttttaaaaagctgaaaaataagcatttttagataattctaacgatatttcacttattgataagtctatataaacttattgatgagtcaaaaaagactcttcccttacataaagtgcaggaattttatattgccataaaaggaacaagccttttataataaatgtataaatatagtaatgttatgattaacctctttataaaggagtgaaaaatatgctagagggctggtttttatgggttattttattttgggttgtctttttaatgagcatgtttgctatcggcggattttttatgttcaggaaatttttaaagcgcttaccaaaagaagacggcatgtctgagcttgattggcaagatcactatctttccaaaaccgtccacctttggtcagcggatcaaaagcagctattaaacgttcttgttgaaccagtacctgaactatttcgcgatgtagctaaacaaaaaatcgcgggaaaaattggggaactcgcaattgaagaacaagcagcctctataacggaagacttaatcgtacgtggatacattttagctacgcctaaacgtgatcataaatttttattaaaaacattaaaaaaacaaaagatagatgccgtcccctatcagcatttattttaaatcaaaaaaggtggctgcgcagccaccttttttagtttaatatcgttgtattagcaagacgatcattatgcagctttcgttcgagctttttgtacgatgtgtacatagcaatgcgccaaggtacaatcataccaaatgctaaaatccagaacataccgccaagctggccaacatcaattgaagaacttaaatatattttcattgcaattcgaataataagcaaaccaataataatgaatgcaaaagcttttgaacgcttcaagtaaatatgatcgtcacgaatttcaaatttagacgttttaattaacaggattgagaaaatcatgcctgcgattaacgcctcaagcagttctgcacccgttactcgaaacattggaaagataaacattaacgctcccgtactcataaaaaaaggcggaagtataattttttttgcattcgttggtttatcagcagctttcattcgaacaactaatatgaaagaagccataaaaattgcgacaagtgttgaagcaataaccaatgaaatccttcctttactatagtttagtgtttacttatattataatccaaaaaacatcagaagtaaaagtgcaacaaaaaacagaagaggatatcttctgtttttatttagtagaggtgatacctgcttttgctttttgcttttgtttttgctttttcattgcttttagtaagaacccgcctttaaatttacgcggctcgtatgaaataatgaaagcacgaggctcatattcttcaatgaatgctaatagctcttcttctctacttctttttgttaaaatgtctaatctatagcgtgcactgtctcttccttctccttggtaaacagtaacaccaaaaccttcctgtcgaaggcggttaatcaactcttcatttttggtcataaggttaactaagaatgttgtatatccgatagcaagtctagattcgatataacttccaaggataattcccactccaaacccaactgcatatacaaccatagcaagcgtgctttgatctcctgaaaatacaagggataagccgaatacataaattaacgcttcaacaaatccaaaaaccgaggcatacatactcatacctttgactaaaaaaattgtgcgcagcgtcaagatcggtacatagatcagttgcaaaagcaagattaacaaaatatctttcaatttatacacctctttttaacaattaaaaatatgacgatttcattgtatcactccgtatttatagaagatatagtaaaaataaattttttctatatatttttttacatcatattcttgtatatttcctaagagcgaaagtaactattttgtcttttaaaaaataaaaagaatctgccaattcccagattcttttttgcatcactttcccttttcagaagcccgtaaaccctccgaatacgctcgttgtataaataataatttttgtcatccagtcaaaatacaaaataaatcccatgccaatcattgcgtatccgccaactttcatcatggaattcatatgtttttttaaccagttcattttcccaataaaaaacgtcataataaaaaatggaatagaaaacccaagtgaataagttatcatgtacaaaagaccggagcctgggtttgtcgctgcaagcgccataaccgatactaaaataggtcccgtgcaaggagtccagcccgcagcaaaagccatgcctatgaaagaagaacctaagagaccagccggcttatttgcgaatcgaaatttatgttcttgcataagaatgcgaggcttaaaaatccctagtacaactagaccaaagaaaataataagaatagcgccaatctgccgaattaaatccttatagttaaaaaaccactgaccaataaaggacgtcgcaaagccaatcataatgaaaataatagaaaacccaagcagaaagaaagctgtgtgaataaaagcttttcgctgatgtgacttagcgccttcctttagctcgctaactgatactccggttatgtacgataaaaaagctgggtacaaaggcaaacagcaaggtgaaataaacgataaaaaacctgcgccaaatgccaaaaacaaatttaaatctcccacatttcccacttcccttttttgttctttttcgttaccattttgtaaccaaattgtcttatctcacttctttcaaatagtaccattatcttgtataattaggtaaacgacttgttagaagggatacatagcattggcaaaaaaagatattctattagcgattgaaaagaaacgagaagaactcatccgcatagtccgagtaagtggattaaactctccacctgctattaaacatagtcaagaattagatcatttattaaatgtttacaatgaattccctgctcaaacaacagaaacaacctcttcatgaaggttgtttctttttttcaccttcactctatcaattctgtataaatctcttttactcctgtttctttgctgaaattcacttctttttcactgtgctgaagctgatacatgttatagtacaaactgcctttgtttagcagttcagcgtgcgttcctttttcgacgatttttcctttatgcaatactaaaatacagtcggcgtgttgaatggtcgataagcgatgggcaatcgcaattgttgtgcggccttttcccatatctcttaacacttcttgaatcgcttcttctgtttctgtatcaatgtgtgctgttgcttcatcaagaataaggattttaggattccggatgaccgttcttgcaaatgctaagagctgacgctgaccgcttgataaagtcgaacctctttcgactagcacttcattatacttattaggaagtgcttcgataaatgcgtgagcttgcacaaatttcgccgctgcttttacttgttcatcagaaaaatggtcttcatgcagcgtaatatttcgctttacggtatcggcaaataaaaaggcatcttgcagcaccagccctacctgatctcgaagctgttcatttgaaaaagacgatagcggtttattatcaatcaaaatgtctcctttttgctgctcataaaaacgcattaataaattaatgatagagcttttcccgcttccagtatggcctactaaagccactgtttctccttcgtttaccgtaaatgatatatcagaaagcacatctcgaagaccatcataggaaaacgttacgtttctgaattctaccgttcctttttgtaccccctgcttttgttctcctgtcatgactggatttttttctttttcatccatcaagtcaaatacccgagaggctgataccatcgcttgctgatacatagaaagacgctgcatcatttcattaacaggctcaaaaaaacgatccaagtagttgataaacgcgtaaagaacaccaattttaacaggactgtcagctacagaaataccaaaataactgagcacaagaataacggctaaaatgtaaagaatttcgactgccggccttagcagcaaaccatccaacttaatattgcgcatccccgctttgtaatgttcatcattgatttcttcaaattccgagcgcagccgcttttcttgacgaaataactgaataatagacatgccttgcaaagactcatgaagcttggcatttaactggcttagcttttcccggagctgtccgtagtaaatagcgctgtaatgctgataaagcttcataagtccccaaatgaacgggagaagaactaaacaataaaaagcaagcttcacatctagcataaacatggctataaaaataccgaccaaaaataccccattttgaataaaaaccgcggtgacttccacaaacatttctttcatggcttccgtgtcatttgtaattcgagataccaggcttcctgttggcgtgttgtcaaaaaagcgaagagccaagcgatgaacatgagaaaaaacgtcaattcgaatctgctgaataatttgaagcgcaattttttggaactgcagaagctgaaagtattgaacgacaatttttaaaagctgtaaaagcaaataactgcttgcaagccacacaagaggctgaagaggcaaatacttaggagttaaataatcgtcaatgaaaattttaatcaaaatgggccctaataaatccgcagccgtagcaattaataatagtgtgaacgctaaaaaaaatgattttttatgcggaattgtatagcgaaatagacgtttatgtaccgaagaatgctcaattttcatttttcgtctctccttcttctaccgcacgttcaagctgctgtctatcatacatatcctggtaccagccgctcacgctaagcagttcttcatgagttcctcgctgaataattttccctttataaagtacaagaatcaggtctgcatgagtaaccgagctcagtcgatgcgctgtaataatcgttgttcgattttgacgtttctgcttcagcgcttgtaaaatacccgcttccgtttttccatctaccgctgatagcgagtcgtctaaaattaaaagctcaggatctaataaaagagctcttgcaatcgagatacgctgtttttgtccacccgataacgaaacgcctttttcacctactattgtttgatagccatctgtaaaatcgaggatgtctctatgtacattggcaactttagccgcttctttaatttcttgattgcttgcttctctttttccaaacgcgatattatcagcaactgttgttgaaaacaaaaagtgatcttgaggaacatatccaatgcttttgtacaatgaatcaaaagcatagtctttaatgtcttttcctccccataaaacagctccgtcacttacatcaaattcacgaagcagcagctttaaaagcgtggttttaccagcacccgtctttccgacaatacctaacgtttgaccgcgagaaagtgtaaaataaatttcgtttaacgtatattcgtcttctttaacatacgaaaacctatgaataacagcttcaatatttcctgttggcctttcagcactaggatgcgctgcttcttcaatcggattttcttcttttaataaagaaaataccctgtcatatgatgctcttcctcgttccacaatgttaaatagccagccaaacgcgagcatcggccaaataagaaggcccaaataagttgtaaaggtaacaagctgccccagtgttaactcttcactaataaccatcttgctcccaaaaataagagcaagtaaaaaagaaagtgctacaataatcgaaatggtcggatcaaacaatgcatctactcgggctactttcatgttcttttggacaacatctgcagacttaatgcgaaattcttcgacatcagctgcctcttccccaaacgtcttaatgactttaatgccgctaatgctttcttgaaccttatcatttaaagtagaaaatgctgcttgtgcgtggtgaaaccgcgcatgaagcaatgtaccgtagtaacttgttaaaacggccataagcggcataggaataaggcaaataagcgttaatttccagctgattgtgagggccattgtgcatagaacaagccctcctgtgacaatggaatccacgagtgtcaaaacgccggaacctgcagtttgttgaatagcttgaatatcgtttgttgcatgggccatcaaatccccaattcgccgccgttgataaaaggcctgattcatcttggtaaaatgagtgtagagtgtatttctcagctgcttggctagtttaacagatgaaccaaatatcataatacgccatatgtatcttgtgaaataggccacaacagcagctcctagcaaaattccaaccatctgtattaagcgctttccattcagcgtctcttctttaatgccatctaccgttaaaccaataattttaggcgggagaagttctaatgctgccacaataatgagcagcactacccccgttatgtaagactttttttcctgtttgaaaaaccaccataactctcgaaaaattcccatcgtatccccctagccccacaaccattttcttatctctatcataaaacaaaagacacccttctgaatagagagtgtctgtccaattaaccattatttaatttggccgttcattgctttcatcatttggttaatttttttctgcgatggtttcatgcccatttgcatcatcatcatttttaacatttgttcattaattggtggatttttcttcagatagctcatcatatatttacgagcaatgaaaaatcctagcgctatcccaacaattaatgctagaacaccaactagaatatacattcccatggtattacttcctccttcgtgttgtctaacttacagtgtactagaccatacgctattatacaatatttccgttccaatttccttaaataattacacaaattttcttgttttcacaggcctcagccagccgtattcatccgttccataattcactgctaaaaaacaaggatctagcttgcgtaatacttcaaaaaaagctgtctcagcatcaacattgccatctccttcaattgttatacagcgattcgttaattttatagatgctcgactttttttatgaggatattccagcacaaacgtctcttgatgagtaaaaaaatgaggataatgagaaaacgcctgaagcaattctcgttgaataaatgaaatgggcagttggcgagtaatgtaatgaacttgtttttgtaagtgcgtttcctgcaaatgacgtttcattctatattcaatcagcagctgataaatgagcttttctcttcgaaaataggatgatgcaacttcttcctccattaaatatacttcatacgttctcacgattcatcctccctttcggctcgttcttttttgtaccattataccgaatggtgtacgcaatgcttgtctatcgatgaaaaaattcctttgtttttttgtcgaaaaaaagagcagaccacagaagtctgctctttcttatgaaaaagaattatgcattaagcaagcttttcacttttgctactacattttcaactgtaaaaccaaattctttcatgattgtttcaccaggagcagatgcaccgaagtgattaataccaagaacttgtccctcgtctccaacatagcgttcccagccaagtgtagaagccatttcaatacctaaacgttttttcactgatttagggataacactttctttgtactcagcagattgctcttcgaaacgatcccatgcaggcatacttactacagatacgtcaatgccttctgcagctaatgctttttgtgcttctactgctaggcttacttcagagcctgttgcaagtattaatgcatccgcttggtctttaccagctttagatacaacgtaggcacctttagacacgccttcgtatgcattttcttttgtaccttcaagtgttggtagattttgacgagtcaatacaagcgctgttgggcggtcagttgactctaatgccaagcgccatgctgcagctgtttcatttgcatctgcaggacgaaccactgaaagacctggcattgcacgaagtgatggcaattgttcaattggctcatgtgttgggccgtcttctccgactgcgatactgtcatgtgtaaatacataggttacaggaagcttcattaaagctgctaagcgaattgctgggcgaagataatcagagaatacaaagaatgttcctccgaatacttttacgccgccgtgtagagccataccgtttaatgcagctcccattgcaaattcacgtacaccgaaccagatattacgtccgctgtaatcagctgcagtgaagtcttctgaacctttaatcattgttttatttgagccagctaagtcagctgaaccgccgaagaattgaggtacagcttgtgctactgcgtttaatacttctccagaagaagcacggctagctaggcttgaacccgtttcgtatgctggaagcgtttcttcccagccttccggtaactttccttctactgctagttcaaattgacgacctagttcaggatatttttctttatactgtgcaaatacatcgttccattcgttttctttcttttggccatcttcagcaattgtagctttgaagtgagcatacacttcttctggcacatagaaatcttcttcaaatgtccatgcataagcttcttttgttaattttgtttcatcggaacctaatggagaaccgtgcacgccagaagtacctgcgtggtttggagaaccaaatccgattgttgtttttacttcaattagcgttgggcgtgttaaatcgccttttgcttcttcaattgcgtttgcaatcgctgtcaagtcattgccgtcttcaacgcggattacttgccatccgtaagctttgaaacgatcttctacgttctcagagaacgagcgatctaaatctccgtctaaagaaatatcatttgaatcgtataaaacaactaaacgtcctaattttaagtgtgccgctaatgaagctgcttcagcagatacaccttccattaagtctccgtcaccacaaataccatacgtaaagtggtctacaatttctaaaccttctttgttgtatgtttcagctaaatgacgttctgccattgctttaccaacagccattgcaataccttgtcctagtgggccagttgttgcatcaacacctgctgtatgaccgaactctggatgacctggtgttttacttccccattgacggaagtttttaaggtcttcaattgataagtcatatccagctaaatgaagcaagctgtataatagtgccgatccgtgtcctgctgataatacaaagcggtcacggttgaaccagtttggattctttggattgatgttcataaattttgtccacaatgtatatgccattggagcagctcccattggcatacctgggtgacctgaatttgctttttcaatcgcatcgattgataaagtacgaattgttgcaatcgaaagatcttcaatacgttgtgtcatactcttcattcctttcaaaactatgtacatatgttatcatactaatgatttgcttatttgtacaatacttgaaccaaaaaattttccacttttacagtttttgtgtgccttattaaaaatatacaaaaaactagagggaactctccctctagttttactagaacgtcttagtgaagacgcttctttttactctcttttaacttcttaggcgtaacatctttaccttcttcgtccacaactttaatcgtatgaaggtgattagtcatagattgtcggaaaacttttaaatattcctgacgtagctcttgctgttctttcgcttcagattctgtcagaccttcagcctttgccttttttgaaagagcattaatacgagcaagtttatcttttgatagcatataaaacctatctccttataatcaataattaaaattaccgaaccgttccggcaacatgtagtcatcttactaaatctctttcgttttatcaagagattgagcactctcttgatactcttgatagcggcgatgtaccgtcgcttttgaaatattatagccaaaaccttttagcgtaactgaaatttcagcaaaggttaagccgttatgacgaaggcggacaatttcttcaatcggcgcttcttttttttcccttcccgagttaactccttgattttttaaattttgctgcggacgataaccgttttctacggctcttttcattcctcttttaattttggcgttatgtaatttccgctgatgctcttccactaagctaataatatctaacaccattgaatcagattctgaaagctgaagctgaccttgatgactaatcgtatagattgtagcattttctttatgaaaagcatgaagcagcgcaattcgggcatttcctctgcctaatcgtgtttcgtcttgaatgagcagcgcagatattttctcttctttcattgtatgaagaacatccaaaataccctctctgtctacatcatatccgcttgctttttccattacgactttttttacgtctagatggtgaagatcagcaagcttttttaattcttcttgctggcgctgtaaagatgtttcttgggtttttttatccgtactgacacggcaataaataatggcatccacttttatcacgaccttttcggcttctaacaatattcaggaacggccgttacactactgttcaattgccacttgattatgtaactctttttttaaaacaggaatatataatttatctccaggagataaagactgggcagtgtctgagtttaaatcattgacgtcttcaacccatttgacaaattcattggtggtcaaatgatggtgattatgatacttgttggacaagtcccaaagcgtatctccttttgtaatagtaaccgttgaatatttgtctaaatctactttatccgctcctaaaaccagcgtcaatacatatgtaagtgcagcgataactgcaaaaaaaatagcgtaatgtttcatagaatgtaagaattgttgcatattatgaccccccatcagaatatatgttcttattttattgagaacatttgtttctgtcaatggaattcttcgaacttatgtttgtatattgacacatcacgtggtataattcacctaaagaatagctaaaatcgaggtgaaaaatatgaagctatcaaaacgtcaacaagacatactagattttattaagcacgaagtaaaattaaaaggttatccgccttctgttcgcgagattggggaagcagtaggattagcctctagctccactgtacacgggcatttagctcggttagaaagcaaagggttaattcgcagagatccaacaaaaccaagagcaatcgaagttcttcaactagacgaagtaaacatccctaaaagcaatgtcattaatgttcctgttatcggtaaagtaacagcgggtcttcctataacagccgttgaaaatgtggaagaatatttccctcttccagataaatttgtttctccagatgatcatgtatttatgcttgaaattatgggagaaagtatgattgaagcaggtattctagatggcgatatggtaatcgtacgtcagcagcaaacagctaataatggagatattgtggtcgctatgaccgaggacaacgaagcaacggtaaaacgtttctttaaagaagaaaatttcgttcgtttacagcctgaaaattcaacgatggcgcctattattcttcgccacgtaacgattttaggaaaagtaactggtgtatatcgcacgattcactagtaagacactgtatgtaaaaccaactaatcatgatgttagttggtttttttacgtttgttttctaaaaaaattggcatattataaatgatacgttgaatcattgcaggcaggtagaacggtttttgtaaagcttgttttaccttttactttctatctgcatttcctcgactcttacaaggaaatacaaccgaccataggaaggatgtagtttatgaccaatacaccaaggaaaacagaaccatttcaaaccattgtacctaccaaagcaatgaacatgtttctttttcctttttcctttgatcgaaaaaataaagagcagcttgttcatgcactgaaaacaaatttgttcgagtttttttccattcaaaacaaacatttagaaaaagaatactacggagaacagtattacgtatctcatgatagcctggatcaatattttcttccttacattgaatgtattctattccctgactcgtgcaaaaaagaagggttgcttcgattttcaaaaaaaatagaccatactattacgttacacacttcctccaccaccgtgtctagcaacgtgctgtctgtggatgtttttttatgtccttttgaaattggcgtcatgaccattcgcactgagatgagccataatcattacacctatgatgatattttagaattcatgaatcattttcgtgtattagaaccgaagcttgctgaagagcatggatccaccattacctatgaacatcatcgctatagtaaagtgcaagactatattttttcacagctcgcgccatttttgaacgaacacatcaaaaaagaagccacacgtgaacagcacgttgggagccttccttattttatcgatgaacggatgtttgtgttaagttatgtaacggtaaatcaagagcaagagattaattccacaactttatttcgtactggacagctaaatagctatacgcctgacgggaaagcgtttatttctgcacacaatcatgagtatattaaaacgtataatactaaacatgtgtattccagatgggcgcctgaaacctattacgtcataacagaccatgtgttttcgtgtatttctaaatcgacggactctaaaacggatcagcttttgatgaatcatctatttggccagcattactataatttatttttacattttttctataaaatcgtgttgctaaaactatcttatgagtattctcagctcacgtttcataaaaattcagagggcattgaacgactaattcgctctattaccgtgttttcaggtaaatatttatttttagaaattagctctcgcacagaaggtcaagagttttctgagctctttaaaaaaatcttccacatcaattctctttatcaagaagtcaaagaaacccttggtactttgtaccaaaatcaagagaaaatcgcagccaagcgtcacaattacttattattaattttaacgatttacacggttctttccggtatttacggaatgaatttagttattagcaaactaaagggaaacatcaattggggtaatatgaagcagttttctatctttgaatacatcgctttaatagtagctctatcaggaattctgatcagcattagtctcggagtgagttccctatggaatttattaaaagatcgatttaaaacataaaagctgttcgcatacgtatggatgcaaacagctttttctattacgaaatctttttcctactcggcttacccttttatcaaacgttatgccgttgttacaatttcagaacaatctaacattatactctataagaaaaatatatacaaaataataaaatatggtatcatagggtaggaattttgtaccttatttatgaaataatttgcaggaggtaatatgcttaactcatttttatccaaaagcctgatttttttatgtgtcattattcttacatggtctctatggggcagttatagtgcgatgacaaattcattggaattaaaaggcttggctttaagtaattcatttattattgaaggaatatttatcactttccttgtcatttttctaatagctattgcaagtagatacatgaacaaaactgttttttttatttcactgattgttttgaccttaggtattcgattagcatggatgctttctgttcaaacgcctgtaaaatctgactttcttgtcatgttagatgccgcgcgtaatatagcaaaaggaaattatgaatttaatcaaagcgtttatttcactacatgggtatatcagctaggcttttcattctatgaatctgttattattcgctgttttggagataacatttttatattaaaattgttaaatattttttattccactggaaccgttatttttatttatttaattggcgctaaagtatttaacgaacttgctgggagaatggcagctttcttgtatacgttctacattccgaacattctctatagctcagtgttaactaatcagcatttagctacttttttattttatgcagctttttaccttattataaaaagatttgctcataacaagtttagctcgctttatattggccttctattgtcgttaggaaatttaatgcgccctctaggacccattattatcgttgctgttttcatttatttcatcttgcaaattcttcaaccttacattaaaacgaagaatgctgctgagttaaaagctcgtcgaaagaaaataggaaaaaacctcgtaggcatactggctactttttttattgtaaatgcgctgatcaactattcttttgtagccagcggtatttctaaatatcctttaagtaacagagatcctttatggaaattcgtcattggctttaattacgaaacaagcggttcctattcttcagaggatgctagtcgttttatgggtatgccaattggaaaaaaacgagctgaagcagaaaaagaggtaattaaagagcggatagcagataaagagctacttttagatctctttcacattaaattcctaaatatgtggggaggaacggatgcatctacattttggagcatttcattaactcctcaagaagatgtacctttcaataaagagaaattaattagtgctgctcaaagttatgaaagaatcatttatgtatcaactactattatttccattattggacttatatgtttattcttgaggaagcaggataaatatccatatacactgtttttattactaatcataggatacgttcttattcacttgcttattgaaattcaaactcgctatcgattctttatttttccaagctttatgctgctcgaagggtttggtatttcagtgattctatcctatttaatagtacgatttactaaaaatgagcccaagacaaaatgtgaagagataaattaaatggaagggattatgcaaccttgataaaattcctgaaattcggatttgtaggtataatgaataccctgctcactattatcagttacttagcactcattcattttgatatgaattatatattggctaacgtactatcttattttattggcgttataaacagctactattggaacaaatcgtgggtgtttcaagcaactgtacataaatggatgttagctcaatttttcatcgtaaaccttattactttagcaattaatacaagctgcttattccttcttgtacactatacacctgctaatccaataatcggacaactgttgtctacttgtataggaatgtttatcaattttttccttaataaaatatggacgtttaagcacacaaacaatcactcgataggaggtaaagcatgaaagaactaatttcaatcgtggtacctatgtattttgaagaagaagtagctaatgaatgctacaatcgcttgctttccgtcatgcataaaaaccacattaactatgaattcattttcgtcaatgacggcagcaccgaccgaacaattgaaatcttgaaggacgtagcggctatggattctaatgtaaaagttattgattttgctcgtaattttgggcaccaaactgccgtaacagcaggcattgattatgctcaaggtgatgctatcgttattattgatgcggacttacaagatccgccagaaatgattcccgaattaattgctaaatggcagcaaggctatgaaattgtatatgcaaagcgcaagaaacgaagcggagagaccttttttaagttagccacggctaagtatttttatcgctttttaaattatatgtccgatatcgaaatccctaaagacacgggagattttcgtattatcgaccgaaaagtagcggatgtattcaaaaaaatgactgaacgtaatcgttttgtacgaggaatgatgtcttggattggcttcaggcaaacatatgtagaatatgagcgcgatgaacgctttgctggtgaaacaaaatatcctttaaaaaagatgatcaagtttgcttcagatggaattattgggttttcaacgaagcctttgcgtttagtaatggttattggcttgttatcggtttttgtatcacttttagttttaagttattcgattgttgtttggctgataggtaaaaacattcagcctggctggacttctattatggtagctatcaccttctttagcggtattcagctgcttggtctgggtctagtcggacaatacatcgcaagaatttacgatgaaagcaaaaatagacctatttacgttgtacgtgaaaccattaacttctcgaaagcttcaacagattctccaaacgtacgtgaaaaagtatatagctaaaaagacaaggaagaaaacagttgttttcttccttgtttttattctttttgaagctgtaaatcacttggcgtccagtccggaattccatcatcttcatcaaattcaataatgacatccgttactcctttttcctttaaaatacgattttccagacgatctttaatatcatcagcttctgccactgttaaagaaggatcaatttctacttttaattcaacgtgaagctcttctccttctttcatcaccattaatgtttgaatatcacgcacttgtacatcttgcatgacaatcgcgccaatttttatttccatttctttatctgcttcaccaagcgctccagcagcgttgtctaaaaatactcgtcctactacaaaaaacatcataagcccaattaaaatagaagcaattccttcagcttggtgaaaaggtgtaaaccgtgaaatgaaaacagctattaatgccagtacccctcctccagtagctaccaaatcttccataaagacaagcttggttgcaggctttgctttctttaaatgaacaaagctttgcgtaaaaactttgacctctgcggtattcataccgacatcgtgcaaaatttctttcattgccttaaataggacaaacatctcaagtaacaccgagatgccaagtactgcaatatttaaaataaagcctgaagacttcgtcggatgaagaatgtggtgatatccttctttaatcgtttcaaacgccataatccctactacaagaaccgctcctaatagaacgagattaaccaatcggccgaaaccgtttggaaatcgtttggtcggggcttttttacttaatgccgaacctataaagacaaaaaactgattagctgcatctcctaagctgtgcatcgtttcagcaaacattgctacattccctgttaaagcgaaagcaatgcctttaataatggaaataatggtattaactacagcagccatcatggccgatttatttccttttcgcagcaatttaattaattcactcatgtaatccctccgtttgcgcctttgatgagattcaattacggttagtgtatgtgaatttaaaaattaaaaacctccaacatacaagttggaggtttttagtcatgtttcattattttttaaaacggtacggtacagttgtaacaattacgtttttacggtaaagcaaatgtgcttttaacagcagactggactgattgtgaaggatattttgccaactttttttcgtaatgaactgcggaataacgaccgtaatagccatgttattttcccgggctttttcctcagccatatcgatgaatcgaaacagcggccgcactaagctgcggtattgagaatgaaacgtaacaatacgaatatcaggctgccacttctcccacttctcttccattctcttttcgctttctcgatcaaaggccacatgcactgcaataacggtatcgccaatcgttcttgcataatttaatgaattttctactacctttgtcattcctgctacaggaacaatgaccacacttccttcaagctttccaattttttctccttgcttaatgcgaagttgctctcctaccgcttcataatgcgtatggatgcgatgaaaaatataaacaataaccggtaagaaaatgagcacggaccatacttgtgaaaacttcgttgtaaacaaaataattagcacagttaaggtaatgagggcaccaattaagttaatggttagcttcccttgccagccggccggcttttctctaagccatttgacaatcatgcctgtttgagaaagcgtaaatggaataaacaccccgactgcataaagaggaattaattgttcagtcgcacctttaaaagctacaattaagacaatagaagcaattccaagggtcacaattccatttgaatagcctaatcgatcgccacgaatttgaaacattcttggcatatatttatcagacgataagttgacagccagcaaagggaaagctgaaaagcccgtattcgccgctagcactagaattagagctgttgtgccttgaataaaataataaaatccatttcgtccaaacacactcgatgcaatttgtgatacaaccgtttcatctgcttttggagaaatgccaagccaataagctaaaaacgtgatgccagaaaataaaacggctaaaataccgcccatcagcattaatgtatgaacagcattttttgcacctggctctttaaagttaggcactgcatttgaaatagcttctacacctgttaatgccgaacagcctgatgaaaaagcttttaataataaaaacaaactaatacctggcactactgtaccgagagatggatgaagctcaggtgaaacttgacctgtcgctattttaaacaagcctaccgctattaacaaaataagagcaataacgaataaataaaccggataagctaatacagaagcggattctgttacaccacgtaaatttaagacggtaataaaaatcaccaataaacacgcaattactacattgtaatgatgcagcgttggaaaagccgaagttaaagcatcggttcctgctgaaacactcacagcaactgttaaaatataatccaccaacagtgatcccccagcgataagcccgggattttcccctaaattggttttcgaaacaatataagctcctccgccttgcggatacgcataaataatttggcgatatgaaagaattaaagccgtcagcagaaccaataccccaagcgcaattggaatcgaataccaataggcaagaacgccgactgttgcaagtacaatcaaaatttgttctgttccataagccactgaagataaggcatctgatgataaaatagccagtgctttaagcttactaagcttttgatcgcctaactcttttgttttaagcggctttccaatcaataatcttttgagaactgaatagttcacgtaatttccctccgatgattgcttagctactacttactgttcattgctaagctccgttacaagttcacgaataagtgatattatccctaaaaaatacctttttatattaaaaaagcgcacaaaaaaaacactaagggttctcagcgtttttacacagcttaaacctcctctccaaaacgcttatggggttagctgtcggattcgggctatgagagtagccctacctttaaaaaaggattcaccccaagtgacaatgcacaaatttgggtcccccacttctgacgaattaagcgataacaggtcaatataattttcggttaaagggtatgattgataacatgtttctttcataactatcctttgttcttagataatatactcccgtataaatggtttgtaaagcattattttacgtgaacgataaaatagtcctttaggcgcttttaacgggagaacaaaaggccttctgcctgcttacagaagacctttccactttaactgtttgcttttaaaacggctgctagcttatttttcgtttgaggaccataaatgccatctacatcataaggaagatacacaagctgaaaacgtcttactgcatctttcgtttgaactccatatattccgtctactgaccctactttaaaatttaccgcgtttaatgctttttgaagctgcttcacagcttctccagaatcaccttgttttaaaactccatttggaagcagatattgttcagaaggtggtgttggatttggtgttggatttggtgttggtgaagttcctgaaggaataacaattgtttttccaacctgtagtgttaaaggatcagaaagccctgtattcgcttcttgaaccgcttgtactgttatgttgtacttctgtgcaatactataaagcgtatctccttgcttgatcgtatacgtttttgtacctggttcagaaggtgatggatttggtgttggtgttggatttgggtttggaactgcacgacgagataaattcaaatagatggcaattccttttgcatacgattcacccatgctttttaaaaaagcttcgttttggagaagtgctgcatcggtgcggttatcaataaaagctatttcagttagtactgcgggcatatttgttaagcgaagcaccgcataattggctgattttcgaccgcgattcggatgattatacgacagcagcgttggctgtacttggccgtggacaattgattgaaacgttttactggcattgctagcgcttctataaacataatcttcatatcctgttcctccaccggcatttacgtgaatagacataaatgcatctgcgccccacgaattagcttgagaagcgcgctgagataacgataaaaaaacatctgtggtacgagtggttttaatcgtaaaatcactgtatgtgctatttaaatagcttattaaatattgttgaattttcaaaactaagtttttttcatatagtccgttcgctccaactgctcctgcatctgccccaccatgtcctgcatcaagatagatttttttcatattacttgtccctccttattgttaacatatgcacgggggcaaaaagtgttacgtatactagcctaccaagtgaaaaatcactaaaaaaagacccgctgcctaatggcaacgggttattctgctttatagacagaatactgaataaggatagctctcaaggagtgacagctatatgcagagtgttgatttgttgattaaatgataataattatcattttcatttaaagtatacactacgaggaaagtattgtctattttattattagatttggatctacttaaaaagcaggatacctataacaatgagaacaatccaaattggaatgcttattaatatgcctattactaaacctttgaaaaaatttccttcttgcatttttattccattcctctccaacagtattttctaatgacactacgactggctgaaaattctctgaagttatactgaagtgcagagtgaacacataaacaatctctctatctgttatacactacttttacatatagattcaatgagacaaaaagcttatcctttttaattcgtataaccaaattctttcctataataacaaaacaataaaaaacctcccgtaaattgtacgacaggcagctatacttgttttatgaacagtttagttcgatatttaatatacgcatgcagaatgttattcattttgaaaacaaaaaagtccgagagaacgtataaacgatctctcggactttcaggaattaatattggctcatgtattggtcacgttcccaagggtgaacttgtgtacggaacatatcccattcgatttctttcgcttcaacgaagtgctctgctaagtgttcacctaatgcagaaaccataacttcgtttgattggaagctatctaaagcttgagctaatgttgcaggtaaatctacgataccttcttcaacacgctcttcttttgtcattacatagatattacgatcgataggttttggagcttcaaggttgttcttgattccatctaaaccagcttttaatagaacagccattgctaaatatgggttagcagctgggtctacgctacgtacctcaacacgagttcctacgccgcgagaagctgggatacggattaatgggctacggttgcgagcagaccatgcaacataacaaggagcctcatatccaggcactagacgcttataagagtttacagtaggatttgttactgctgtaaagctgtgtgcgtgcttgatgatacctgcgataaattgacgagcagtatcacttagctctagattaccgttttcatcataaaatgcgttttgaccatctttaaataatgaaacgttacagtgcatacctgaaccattcacaccaaataatggttttggcataaatgtagcatgtaagccatgtttacgtgcaattgtttttacaacaagtttgaacgtttggatatcatcacaagcttttaatgcagcagcatatttgaagtcaatctcgtgttgtccaggagctacctcatggtgagatgcttcaatttcaaagcccatttcttcaagctctaatacgatgtcacgacggcagttttcaccaaggtcagttggcgctaagtcgaagtagccacctttatcatttaattctaatgtaggttcgcctttttcgtctaatttgaataagaagaactctggctcaggtccaaggttaaaatcagtaaatcctaactcttccatctcttttaacacacgttttaagttattacgtggatcgccatcaaacggagttctatctgcattgtagatgtcacaaataaaacgtgctactttacctttttcagatgtccaagggaaaataacaaatgtatcaatatccgggaataggtacatatctgattcttcaatacgtacaaacccttcaatagaagaaccgtcaaacatcattttgttgtctaacgctttttctaattgacttactggaatttcaacgtttttaattgttcctaaaatgtcagtgaactgaagacgaatatactttacattctcttcttgaactttgcggaaaatatcttcttttgtgtactttgccatcgtgtgatcctcccctaaatctctatataatatttataatctatacccctcatatacgaacggcataaatattgataactttattaatgaaagaacctggacatatctccttgatttaaagttgctcgattaaaacggcctgcttgcataagttctgcacgaagcatttttcgcaattcatcgtccgttaattctggctttgctgttgctgccacaactttttcttcttgcttatgccctttttgctccttttgaagatgaaacagctgttttacacctgctaagtttacaccttgttcaataagatcacggatttcaagcagcttatcaacatcgttaaatgagaataatcgtcgatttccctctgttcttactggtgcaactaattcatgttcttcatagtagcgaatttggcgagccgacaactcagttaactgcatcacaattccaattgggaaaagtggcgtatttcttcgaatgttgtcactcatttcagttcctcctttggattaactatttacattgtatgctatgttagttcacctgtcaaccgaatgttagtaattctaacataaatttttctgaacatttcttctatacaaataaatagcacttcgtttatttttataagcctatcttttctttcttagcggggagaaaatagtctttctatcttatattttataaaagttctttcgtcagcatttgatctactgccatgcatattgctacttttacgtgagcatacgttaacccgccctgcacgtaagcgacataaggaggcctgataggtccatctgccgtcagctcgaggcttgctccttgtataaacgttccagctgccataatcacatcatcttcgtaccctggcatataagcaggataggccgttacgtgtgaattaattggcgaagcaaattgaatagcctgacaaaaagaaaccattttatcgcggtcatcgaactgcacggattgaattaaatctgttcgttcactgttccacttcggctcactttgcatccctagctcttcgaacatagcggatgagaaaaccgctccttttaatgcttgacccactacgtgcggagccaaaaagaaaccttgatacatttcttgcaagctatacagcgtcgctccagcttctgcaccgattccaggagttgtcattcggtatgaacaagcttccactagttcttttcgtcctgcaatatagccgccgattttagccagacctccaccagggttcttaatgagcgaccccgccatcaaatctgctcctacatgcgttggctcgattgtttctacaaattcaccgtaacagttatccacaaatactacaacgtcaggcttaatactctttacaaaagaaatcatttcttttatttgcgcgactgtaaaagaaggacgaatgccataaccttttgagcgctgaatgcctatcatctttgtgtgctcatgaatagacgctttcacttcttcaaaatccacttgaccttgccctgttaaatctactgatttatagctaatattatattcttttaaagagcctaccccgcttcctcgtataccaacgatttcttcaagggtgtcataaggctttccagttatatataatagttcatctccaggacgcagtacaccaaacagcgaaatgccaattgcgtgcgtacctgaaataatttgcggacgcaccaggcaagcttctgttccaaaaacgtccgcgtatactttctccaacgtatcgcggcctagatcgtcatatccataccccgttgttggattaaaatgtgaatcactcactcgattttgctgaaagctttgcagcacccgaaattgatttgcttcaatgcgctcgtcaattttctcatgtacgggcttaatttgtttttctactttttcagcaagttcccgaatgcgtgcgccgttttttaactgttcaaacatcatttctttgttcctcaactttcttcaagcgtttgtagctttttgtaaaggggatgctcttttgcaatataccctttgcactgatacttctcagtttcttcattgaattttaacgactcaagaatagagaccgttttgagttcagcgagcatttttccttcataagccggcagcagcacatgaaaaaacgccatttcttttttcatttcttcttgaattcttttcccaagcttcactaaatcagtagctttaaaagcgctcattgataaagatgtcgaagcggatgggacaaataattcatgctgcatatcttctttattgtaaactgtcagcatcggaatgtccgttacgttcagctcttctagtaagcgatgcactgttttttcgtggttgttgtaatctggattagatgaatctaccacgtgcaaaacaaggtcagcttcggttacttcttcaagtgttgaacggaacgcagctactaacgttgttggaagatcttgaataaagccaaccgtatccgttaacagagccgttagtcctgacggaagcgtatactgccttgtcgttggatcaagagttgcaaacagctgattttcttcaaaaataccagcctctgttaagcggttaaagatcgtcgatttaccagcgttcgtatagcccacaattgcaatttgatagacatgattacgcttacgtctttctcgataacgttcacggtgacttaccactgtctttaactgacgcttaatttcatcaattttacggcgaatatgtctgcggtcactttcaagtttcgtttcaccaggacctcttgttccaattccgcctccaagacgcgacaaagcggtaccttgtcctactaacctaggtagcagataatttaattgagcaagttccacctgcatttttccttctcgcgtttgagcacgctgtgcgaagatatccaaaatcagctgcgtgcggtcaataatacgcgcagataaccctgctgacaaattgcggatttgactcggtgacaattcatcattaaatacaattaaatcaggttctaactcttcttcaagagccacaagttcttctactttcccttttccaatataagtagctggatgaatgcgatcgcgcttttgcgttaaccttaccagcacttcgccttttgcagtctcagttaaagatgctagctcatccattgaatattcaaaacgttcgtcatcgtcatgaagctgacatccgactaaaattacgcgttcaagttcagtattcatttctgctgtcaaagatttttccttcccttactattaaattgacaaatcattcatatcatatcaaaaaaatgtccatttctccatctttgcaaaagagacagaatacattgtcttttactagtttaacaccctttttaaaatctataaaacgatgattaaaaaaacattgaaatatcacgaaattctgtatacaatttgaattggtttacttatcgaaatttgaatcaggctgcctgattttaaaataatagtcgctacttggtgaaaacagaataaaggggatagcatcatgacttgggacgtacttagcattattggaacgattgcctttgcaatcagcggagctttcattgccatggaagaggagtatgatattttaggcgtttacatactgggaatcgtaacggcttttggcggaggagccattcgaaatctgcttatcggtgtaccggtgtctgccctttgggaacaaggactcttttttcagattgctttattatctatcactgccacttttttatttccaaacaatatcttaaaacattggaagcgatggggaaacttttcggacgccattggccttgcagcattcgcgattcaaggagcgctttatgccactcatatgaaccatccgcttagcgcagttattgtagctgcggtcttaacaggaagcggcggggggattatccgagatttattagcacgccgaaagcctactgttcttaaagatgaaatttatgcggtatgggcgattatcgcaggatttagcgtagggctgcatattacaaatactcctatagaactttatacgttatttatcttacttgtaggtcttcggatgtgttcatatatttacaaatggcgcctgccgatcaaaacgattcgacaaccaaatatgtagaaaaaaaagcctttcgtgacgaaaggcttttttttacagctgaatatcgcttgacgttaaagttagaagctcgttgcgctcaaagctttcttcttctaaaagcctcatggattgagtacgtatggaacgttcgataatgtttcgcacatatcgaccgttactaaaatccctcggcgtctgattgtacttcacgtccatgaaatgatcttttagctttttataggcctctgtactaaactgatactgcctgtcattcatcatgtgaccggcaatgtccatcagttcatttacatcataatccggaaaatcaaaaataaacggaaacctagagcgcagccctggattaagacttaagaaattttccatttctcttggataaccagctaaaatcaatacaaacttatcatttgaatcttccatatgtttgaccaatgtatcaatcgcttcttttccaaaatctttttctccccctcttgcaagagaataagcctcatcaataaataaaatacctccaagcgctttttttacaagatctctcgttttctgagcggtatgaccaatgtattctccaactaaatctgcccgctctgcttcaattaaatgtcctttggacaaaatgttcatattcaaaaataatttacctagcaggcgggctaccgtcgttttccctgttcctggatttcctctaaacatcatatgcaacgcctgctttcccgcttttaagccctgttcctctctttttttgttaatatataaccacgcatatatttcttttatcatttttttcaattcttccattccaaccagtccgctcatttctcgttcaatttcccgaagcggctcatgatttatgacagcttttttggcaggacgcggaattgatgtcgtatacgatttttccttttttgtttcattatttaaaatgatattaatttgcccattatttttaagagttatcggctgctccaccatgttcacctctcgtttcatcccacttctctgtatcgcatagctgcatgcgatgaacgatacgaagacaatgatctcttattaccgaagaaataatcgtctattataaggtttatgttcgatgagtaaaaacaatgttaagaaacttttttaagcctttatttgcataaaaaaagcatccgaatatgcggatgcttctctttaatctctattcaagttctactgtaatatttttatttggtacaaatgtcgaaatcgcatgtttataaatcagctgttgttttccttcagattcaattaacacagtaaagttatcaaatcctttaattagtcctcttaattgaaaaccatttaaaagaaataccgtcacatagatattttctttacgtaattgatttaaaaattggtcttgaatattaactgattgtttcattattcggcctcctcgtttctctatctgtttacttaattcgcttctttcttcagctttcctgcaatatatgtaaaaatttcagcaaacttttcgggaaatttgtcaacttccatctctatccattttacaggcattttatttcgaaaccacgttaactgacgctttgcatatctgcgtgaattttgtttcaactgttcaacggcttcttcgagcgtgcagcgtccttcaaaataagcatacagctctttgtagccgatagcttgaattgattgtacatcatgcagcccactttcgtacaatgatttgacttcatcaagcagtccagcctgcatcatcatatcgactcggtgattaattctctcatataatacgtctctatccattgtaagtccaataatgcttacgtcatataataactcttgcgactgttcttttgtatagtcactgaattttttgccggttacttcataaacttcaagcgctctgattacacgacgatggttgtttttatggatagcagctgcactgtctgggtcaatctcttctagcttttcatacaggggatcaatgccatgagctttaataaatacttccattcgttcacgaactttttcatcactcggagtttccgtgaactgataatcataaataacggattgaatataaagacccgttcctccaacaatcatcggcatttttcctctagcgtgaatatcatcgatttgttttcttacaatctcttgaaattctgccacagaaaacgattcatctggctccttaatatcgatcaggtaatggggaataccctgcatctcttcttctgacaccttcgctgttccgatatccatccctttataaatttgcatggaatcacctgaaataatctctccgtctaactgtttggcaagttcaatgctcaattttgttttaccaaccgcagttggtccaataatgacaataagttttggtttctctcccgtcataacaacactactttcatctataggcattcacatcattccattttatccaaatggccatgatttattcaacaaaacggctagctgcagctagccgcattgcctacatcactcgcttaaacattttttccatttcatacgtcgaatgatgaataataattggtcgtccgtgcggacacgtaaatggatctgttgtttttctcaacgtttcaagtaaagcaaaaatctcatcgtttcgcaaatgatgattcgctttaatcgatcctttacagctcatcataatagccgcttcttctcgtaacttttcgatattgactcgtttcatcgtaaagatttgctgaatcatttcttcaatggtttcctgttcctctccttttggaaaccactgcggatgcgaacgaactatataggagttttgtccaaacggttctaaaaagacccctacttcagcaagcatgtctttgtattcttctaaaatcaaggcttcatttcccgagaactctagcgtaagcggcataagcagttcttgaacttctgaatctacttctccaagctttcgcttaaaatattcgtacttaattctctcctgcgccgcgtgctgatcaataataaataatcctttttcattttgtgccaaaatatacgttccgtgcatttggccaattgggtacatcgcaggaacacgcggttctggctgctctttggctgaatagtttggttctggaatagcggcgttttcttccaccgattcttcatagtgttctatttctcgaaacgttggttcaagttcttcatcttgacgtatgacctcttttttaacaggcggcatgatctcgtctacacgagcgggagcctccttaaagctaggctctcgaactgtattagacggttgatagccagacggtttagactgatgatcaaatgtaaaggtctgctgctcagttggctgaacagctgattttgacttagttggtactacagcatccggaattaactgctgctttttaaaagcagctttcactccttgttcaataagttcaaacagctccgcttccttacttaagcgcacttctagtttcgctggatgaacattcacgtccactaacaaagggtccattgtaatggttaaaaatacgattggaaaacggccgataggtaaaagggtatgatagccctgctgtaccgcttttaacagcccgtagtttttaacaaaccgaccgttaataatggtcgacatatagttacgagaagctcttgtaatttcaggaagagcgacgtaaccattcacttcataatcaagagactgaacattaatcgaaatcatttttttggccactgccattccataaatagcggcaagcacttgacgcacatctccgcttccgttcgtatacagaagctgtcttccttgatgcatcagccgaattgaaacttcaggatgagacatcgcaaggcgattgactacgtccgttacgttgccaagctccgtgtttaccgtcttcatatattttaaacgtgcaggtgtgttgaaaaataagttttcaataacaagttcggtaccttttcggcttgacgttaactcgtgatgaacgatttctccgcctctaagtttaagatgagtgccggcttcttctcccgtactcgttttgagttcaagcattgaaaccgaagcaatacttggcaaagcttcaccgcgaaatcctaacgttcgaattcgaaataaatcttgttctgttttgattttacttgtcgcatgtcttttaaaagcggtcaagcagtcttcagaagcaatgccgtctccattatccaatatacgaatttttgaaaggccagcttcttctagttcaatttcaataactgtactgtttgcatcaatagcattttcgactagttctttcaccaccgaagcaggtcgttcaacaacctctccggcagcaattttatttgaaagttcgtctgaaagctgcacaattttacccacagactcactcctctcaatctatttcttctttaatgatttttgcagttcatacatcgcattcattgcgtctaaaggcgtcatttctaaaatatccagctcttttaaacgatctataattgccctttcccgtttcgaaagcgcaggcttttcttttttctcttctatttcaaagaacgaaagctgattagcttcatctgcttttttactatctgcacgttcttcttgaatcaaagaagcacctttttgtggaacttgttgcgtcatctcttctctttttggagcctgacgtacaggttcacgctcagaagattgttctaaatcgtgtaagatgacgcgagctcgctctagaagcggatctggaagttctgctagttccgctacgtgaataccataacttttatctgcggcaccatctttgattttgtgtaaaaagacgactttcccattcttttcaactgcgcttacatgaacatttttgagcgcaggaagcgactcatcgagtacggttaattcatgataatgagtagaaaatagtgtcttacagccaatatgttcatgaacgtattcaataattgcttgagcaagtgccattccgtcatacgtagacgtgccgcgtccaatttcatctaacagaattagactcgactgagtggcatttgtcactgcatttttcgtttctagcatctcgaccataaacgtactttgacctgaaattaagtcatcggctgccccgatacgtgtaaacacttgatcaaaaatcggcagaatcgcttcgtctgctggcacaaaacagccaatttgagctaatatcgccgttaaagcgacctgacgcatgtacgtacttttaccagacatattgggtcctgtaatcagtaaaattgaactatcatccgtcatttgacagtcgtttggcacatattcctgcgaattcattactttttctaccactggatggcgtccattttgaatcgaaatatcttcatttgaaaaaataggcttcgtgtaatgacgttcttcactgatttttgcaaagcactgcagtacgtcaatctcacttacttttttagcgagttcttgcagccttggaatatatgcttttacttcttcacgaatttgtaaaaacaattcatattccagctctacaatcttctcttccgcttctaaaatcagcgcttctttttctttcagctcaggcgtaataaaacgctctgcattggttaacgtctgttttcgttcatacattccttcaggcaaaagatgcagatttgcccgcgttacttctatataatagccgaacacgcgattataaccaattttcagtgagcgaatccctgttttctcacgctcttgctgttcaagtgacgcaatccacgtttttccgtttcggcttgcatctcggtattgatcaagctgttcatgatagccgtcattaataatgtctccttctttaattgacaaaggagggtgctcttttaatcctctttcaagaagattagctaatcgctcacaaggatcaatgtcttcaacaagcttggtggcataaggatgattcaaacgattcacaacctcttggatatgaggcacattttgcaatgatttttttaattgaattaaatcacgagcatttacattaccaaaagctactcgaccagctaagcgttctaaatcatatacgtcttttagcaactcacgcagttcttctcgttcaaaaaactgtttcattaagacatctaccatattcaaacgattatcaatatccgcttgttttaaaagcggacggtcaatccaattttttaataaacggccgcccattgccgtaacggtctggtctaataaccatagaagcgagcctttctttccttttgaacgaatcgtttcggttaactctaagtttcgcttagagaacaaatcaattttcatatattcattgatttgataaaactgcacgggctgtaagtgttcaagcgaacgcttctgcgtgcgagttaaatactgaagaatacgcgcaaatgttgtaataagcttttgctgctgaagcgactctactaaataatctagtccttctacttgttctgtactattctcataggaaatggtaatcgtcatgcgctcttttagtgtttgtaataagtcagcaggaaactcagagcttacaacgacttcttttgcttcttttgcataaatctctgagactatatcgtgaaacgaactaacaagcgttacgctgttttctcctgtagacaaatcagaaagagcaagaccaaacgtttgatcctcgaacgcagtaacagaacaaatatagttattttccttttcatgcagtccgcgttcgttcatcagtgttccgggtgaaatcacctgtaccacttctcgctttacaacaccttttgcatgcttagggtcttctacttgctcacaaatagctactttaaatcccttttcaattaaacgctcgatatacgtaggagcagagtggtacggaaccccgcacatcggaattctctcttgtcctcctccgtctcgactcgttaatgttatttcaagttcttgagaagctgtcgtagcatcttcaaagaacatttcataaaaatcacctaatctaaaaaataaaaaggcatcttgatactctgccttaattctcaaatattgctgtatcattggcgtatacgctgccatactattcctccataccacatctagttgtgcgttttgctacacgtattataacataagtctttcttaaacttaatttattcaaatagaacaatcttcaatttcttttcataaaacaaataaaaaagcttcggacgaaggaagaagcttgtccgaagcttttcattatttactgctgttcaaatgactatgcttacgtccgtataagaagtaaaccactagccctagtacaagccaaattacgaaactaatccatgttaactttggaagctgaagtgctaagtataaacagaacacaaaagctaaaattggaatcaccggcacgaacggtacgcggaaaccagtcgattctgaagtttgttttgatttacgtaaatataaaattccaattgatacggtcatgaaagcaaaaagagtaccgatgtttgttaactctgctaatcttcctaatggtactaaaccagagaagatggatactagtaaacatgtaatccacgtatttactactggcgtttgttttttctcactgatttttgaaaaaggcttcggcaatagaccatctcgactgatcgcataaaataaacgagtttgtccatacatcataacgagtaataccgtcgtaataccaacaattgcgcctaatgaaataaatcctgctacccagtcttggttaatgtagcttaaagcaaatgctacagggtttttaacatttaattctgtataaggtacgattcctgttaagataagcgatacgacgatataaagaactgtacaaatcgcgagagatgcgataattccgattggcatatcccgctgaggcttgcgtacttcctcggccgctgttgctacagcatcaaacccaatgtaggcgaagaatacagttgctgctcctgtcgctactcccgagaaaccaaacggcataaacggcgtccagttttctggtttaacatagctaactcctaccccgataaacagaagtacaacagcaagtttaataataaccatgatagcattaaaacgtgaagatttttttactccttgcgttaaaagtaatgtgattaaaaacacgatcataattgctggaatatcaatatacgtgccgtttgcaggattgtatgcacttgttaaaacttttggaaaatgtatgccaaaccctgctaataatccttggaaatacccggaccatccgctggctacagctgaagaagcaagaccgtattccaagataagatcccaccctaaaatccaagcgattaattcaccaaatgttgcataactgtaagtgtatgcacttcctgaaacgggaactgttgaggcaaactctgcataacaaagagctgcaaacacacacgcaagtcctgacataatgaaagatataactaaagctggaccggcatgttcagcggcggctacgcccgttaatacaaaaattccggttccgataatggctccaattcctaacattgttaaatcgaaagcgcctaaatccttttttaatttaacacctttagagttggtttcactaattaacatttgaattgattttttacgaaataagctcatagtaaacccccaaaaaatacttatctgatataactaaattttctgaaaattaatgcattattttctttagatttactatacactgcgcattcgacaaaaagcaatatattttttatttttataagaattttcttaaaatagtaaaaataaaaaaactaggaagaacttcttcctagttactcatcgtctcctaatataaaatcaggatccaaatcttcaaattcatcgtcatctacgtctaaatcaaactcgtcttcatcatcgcagcctttcggatttactgcaacacaaaccttggtttcgccaatcacttccgccaataattctctctctacttgaacaatcgttttattgccatttggtgaaattgtgcactctaggcaatttggctgctgcagcacgcgaacaattacttcgtaatcgtctccaatagaatcttcgtctttatagcgcagcttaatattatctttgtatgatacggtttccgtccaaacttcggtttttgtattattattgtacgaataccagatgttaacatcatatctgccgtcaacttctacattgctgccgcttttctttgctttgtactcatggttaatcacccagcaccctaagatgcttgttggtcgatttttcggtgcaagcgtatgagacgattgtgtaaacttgcgacctttacctacgactgcttttgtaataatttctctatagtgttgtgacatgtgagcataccctcctcaaactatcttcatttcatcctatgcaggctcattcacttgtttgcacattatttttaagaaactaggtttaaggcataaaaaacctatgttccattgtatgcaaggatatagaaaaacgtgacaattattagagagaaaatctgcccaattttcatgccacgggatgcacaaaaaaatgcctcagcaaattgctgaggcattttttctttatgagcagctagatccagggctgtttcgcacctgcgaacctgtttcaccgcgcagtaaatcaccatctgttgacacaataatttcatccgttactgtgtttgaaatagtgttagcaacaagttgaagcaaatcattcacgtttatttgagactcttgaaactgctgaataatcggcagttcatccagctcttcctgtaaacgatcaatttttgcctccacttgttttaatgcttctgttttaccataatgttggaaattaacagcttgtttttgcaaacttttaatgcttgcaatggtttcacgcactttttgattttcgttaagctgagcttcggcacgcttgaagaaatctacttcttccgtttcagcaatcatttttgccagctcttgagcacgtttaattacgtcactcttgttatactgcgccatattacttcacctctgctgtttcttctaccatttccccgtttaatgtccatgttttggcttttgtaacttttacttttacaagttgcccaatcactgacttaggtgctttgaagtttacaagcttacttttttccgtgtagcctgctaatacttccggattatttttactttcaccttctactaatacttcgacaactttaccttcatattccttcaatttctttgcagaaatttcatttacgagagcatttaagcgttgaagacgctcttttttcacttccattggtacgttgtcttgcatcttagcagctggcgtaccttcacgaggtgaataaataaatgtataagcactatcgaattcaacctcacgatatagcgacattgtttcttcaaactgctcatccgtttcatttgggaaaccaacaataatatcagttgttaatgatgctgttggaatggcttctttaattttacgaacaagctctaaataatgttcacgagaatattttcgtgccataatttttaagatatcgctgcttcctgattgaacaggcaagtgaatgtggtcgacaagatttccgcctttagcaagaacttcaattaaacggtcatcaaagtcgcgaggatgacttgttgtaaaacggatacgagcaacgtcaattttacggatttcgtccattaagtcgcctaggccgtacgttatgtcttcaaaatcttttccgtatgcattaacattttgacctaaaagcgtaatttctttgtagccttgagcagctaaatgacgtacttcttggataatgtcttctggacggcggcttcgttcttttcctcgcgtatacggaacgatacagtacgtacagaacttgtcacagccgtacatgatgttaacccatgctttgacgctgcctttacgtgctcttggaaggttttcaataacgtccccttctttagaccatacttcaatcaccatttcttttgctaagtatgcttcgtttaaaatgtgaggcaaacggtgaatgttgtgtgtaccaaaaatcatatccacgtgctgatgtttttgtaaaattttatttacaactgactcttcttgagacatgcatccgcagacgccgattaatagctcagggcgctcgcgctttaaggccttcaagtgtcctaattcaccaaacactttattttccgcattttcacggatcgcacacgtattcaataaaataacatgagcatcttcaacagagtcagttggctcgtagccaaggcctagaaaaataccagccattacttctgtatcgtgctcattcatttgacagccgtacgtacggatataaaacttacgtccctgtcccattccatgaaactgttcatcgattgcaaaatcattgtgataggaaacttcttcttttcctcgtttcttcgcatcttttaaagaaggtggcatgtatactgtttgaaaatatttactgtaatccttttcggattttttgtccgctggattaacttggttgctttctaaacgttgtttttcattcataaaaaaatctcctttcgccatgacaattgtcacgttgcacctgtaaatcgcaaaaaaatgtgacagccttatgcttatgcataaaactcatcacattaacatagtatataactttcaagtagcgaacacaatcatatacctattttctatacctgtttcgttaaaatttcgttcgactttcgaaacatttattaaatcacaaaaggagattgatacataactaaattaatctattttagagacgaacaaatgggataaaagagctcatagaaattcgcttattacaccgctgttgatttctgtgcaaaacttcgctttcggcgagcggccgatgagcctccccgtcgcttccgctcccgcgggttctcacctatttcgcttttcccgtcggagccttctcctagctctccaattaacagctagaagccactcccttcatgaaacctacgttcgctatcactatgaaaaaatccgaacgagttggattctccatcaagaatctcagttcaacgttcggattttccctctactaaactgcttttattgcagcctctttcacataaattcagctactagctcatcaaatttttcctcagtcatgcctaagtctgcttttgacagcggctcttcactataaccgtgaacaagctgctgatacgacggctgatgcgcattttgataaataagccctgttactaagccgttatgctccattaacgtctgcatagcttgcatacgattgtttgcatcataaccttcaattgtgctaagactagttaggttttctttaaaccaatcatacgtgttcactttgttatacgttacgcacgggctaaatacgttaattaaagaaaaacctttatgctggatgccttgttcaattaagcttgttaactcttttaaattcgttgaaaagctttgagccacaaacgttgctccagaagttaacgcaagctccataacagataaagacgactcgattgatccttcaggcgtactttttgtcttgaatcctacttcactgcgaggagatgtttgtccttttgttaaaccatagatttggttatccattacgatatacgtcacatcgatgtttctgcgaatcgcatgtaccgtgtgtcccatgccgatagcaaacccatctccatcgccgccagatgcgataacggttaagtcacgattagccattttcacaccttgagcgatcggaagcgcacgtccgtgaataccgtgaaaaccatatgaattaatataaccagagatacgtccagaacatccaatacctgaaataacagcaagctcatgaggttctaaacctacgttagcagatgcgcgttgaatggctgcttgtacggagaaatctccacaccccggacaccagttaggttttacactgttacgaaaatctttaaacgttgccatttaacacaaacatctccttactttttgcgtatacttcttgcggaagaaatggatttccatcatacttcaatacgctttgaattttatcatgacttgcaatattcatttttaaaatattagcaagctgtccagtagcattgttttcaacgacgactactttttgagctccttgcacgtaaggaagcagttcgtcagctgggaaaggatgaatcaaacgaatgtgagcgtgatttacttttataccgtcctgttccaaacgttccattgcctcttcaatgactccacgcgtcgaattaaatccaacaaataaaatatcagactctttttcatgatagtgaacatgaattggcgtattaaaacgaattccttttgttttacgaagacgcttattcatttgatcatggcggttcaccggagattcagatggctttcctgtctcatcatgttctactcccgtcacgtgatgaatgccatgcttcattccaggaatgacgcgtggtgatacgccgtcttctgttacgcggtagcgcttgtagtattgtttttcttctagctcttctagctctccttgctgaagcttaccgcggcggatttcaacgcggttatagtcaagcggttctactgattgcttcccaagtgaaagctgtaaatccgttagcataataactggacactgatattcttctgctaagttaaacgcttcaatcgtatcgtagaatgcttcttcaaccgtacttggcgccatgacgatcttcggaatttcaccgtgcgtaccgtaaatcatggccattaaatcagactgttcttgcttagttggaagccctgtacttggaccgccgcgctgcgtatctataatcacaacaggctgctcagtgattcccgctaatccaatcgactccatcattaatgatagaccaggtccagctgatgctgtcagtgcacgtacgcctgcatagttagctccgatagccatcgtacatgctgcgatttcatcttctgtttgaataacggttccaccaaattgaggaagctttttaattaagtattccatgatttctgaagcaggggtaattggatatgctggcataaaacgagcgccaccggctaaagcacctaacgcaatcgcatcgtttccaatcataaacatacgttttttaccatccgctggatctagtttcattgtttctaattgttcgcctagctgttcacgaatgtaatctgcaccttttttaatagcttccatgtttttttgtacaactttttggccctttttaccgaagatttcaagtactacttcttcaaatacttctgtgtcaatatgaagcacagcacttgaagcgcctacagcaaccatgttcttcattagcgacgttcctaattctgttgcaatttccgtaaacggaacagcatatagcgtagcagttgtacatgtttcgggcagacttgggttgaatttcgcatctgcaattacaacgcctcctacgcgcaactcatggacgtttacatcgattgtttcctgatcgaacgcaactaaaatatccaaatcatctgacacagatcgaacctgagttgtactcactcgaatcttattatttgtatgtccacctttgatacgagaagaaaaatgacgatagccgtataagtaataacctaatcgatttaaagcggttgaaaagatttctcccgtactttcgattccctcaccctgctgtccgccaactttccatgaaagttgctgtaccataaatcaacgccactcctttaattgctcataatatagaaatctattttattgataaaaactgaaaaaagtaaattagcaaacgatttcatttccttctgcatttcaccaaccaaaatcatctgcaaaactcccacagcaccttgccgctgtgcaggatacgtttctgcttgagcagctccataatccgttttcaattttattccgattgccagaaaaatgcaaccctttccattgaattctcaatcgttttaattatatttatatttaatgaataagatgaagttttttaatgatcttttctgccttcacatgaggcattagtatataaataacctctataaaaaagagcttttccaagaagaaaaagctctttttttattagctgcatacacgatcagcaaagttttgaaataaaaaacgttttacctgctcctcagtgtaatgcttaaggagctcttcgattaaatttgtatactgttcataccttccgagacgatgaacagttttgtcaatgccgtcaaagtcagagccaaaaccaacggagtattcgcctcctctttcacacatgtaatcaagatggcggatcacatccgctatttgcgttttggcagaactcgttaaaaattcaggcacaaacgtaatgccaattacgccgtttcgctttattaaagcatgaatttgatcgtctcttaaattccggggatgagaacacaatacgtgtgaattggaatgagtagccactacatattgcgctagctcaatcacatcccaaaaacctcttaccgataaatgagagacatccgtccacactttatattcattgttcaattcaacaacttctcttccaaaagaagataaccccgcgcctcgaggttctaaaataccgtcacacacagcattgctgtaattccatgtcaaacctactgaacgtacacccagtgaaaaaagtgtctttaagcgaactaaacttgtatcaatggcatcgcagccttcaagcgtcagcattgctcctatttcaccttttttcaagctatctatatcgcgttttgaacgaacccatttcacaccgggaagcgataaaatatgactctgaaacagctggatcatttctaacgcaacatcaaagcgctgagctgcgggaaccgcttctggaatataaatagcgaatagctgaactttcccttttgctttttttattccttctaacgtcacatgcagcgctgaatcatatgtaaaagataaacgtttatttaaccagagtttcatcaatacatcacaatgagcatcaaatatcacaacccacacccctttaactctatacaaaaaggacctgtttggcttctatgctttacaggtccgtggtttttataattatcgcggctctacaattaatttaatggctgttcgctcttctccatcaatttgaatatctgtaaaagctgggatgcagattaaatcaaccccacttggtgcaacgaaccctcttgcgattgctacagcttttactgcttgattaagcgccccggccccaatggcttgaatttctgctgcgccgcgttcgcgcagtacgcctgctaaggcaccagcaactgaatttggattagactttgctgaaacttttaatatttccatatctagctcctccttattctttacaatgtatgatgagagatcattagaccaatgacttaattgatttcaatgttactatattcacgatatgtcaaacgtattcctgcttgtttttcctaaatattcaaaaacttatatttctacacctttcttttttctttttacgtttttgacaaaataaaaaagccaacgtatcgtctttcgacacattgactttttccctttattcaaaaaacggatggtcttcgttaattaaaattcgctctgtttttgttgctttccccgtcttttgatcaatatcaataacgattccactaagctgcgttcttccttcttttggcacttcaaatcgaacaggaagagacgttaaaaaacgcttaataacagcttctcgctccatccctaaaatgccgtcataaggtcccgtcattcctacgtcagagatgtaggctgttccttttggcaatatacgattgtcagctgtttgaacatgcgtatgagtgccgacaacagcgctgacacgaccgtccacataccagctaatcgcttgcttttcacttgttgtttcagcatgaaaatcaataaaaataagcggagtgcgctgacgtgcttcttcaatcagttcatctgctttttgaaatggacaatcaagcggagccataaacgttcgcccttgtaaattaatcacggctacctcaagctgattgtacgtaaaatacgtaattcccttgcccggtgtaccttcaggaaaattagctggacgaacaagattttttgcatcgtcaataaaatcaaaaatttcacgtttgtcccacgcgtggttaccaagggtaacaatgttagcccctgcttgtaagaactgacgataaatcttttcggtaatgccttttcctgaagctgcattttctccattcacaattgtaagtcccggagagtattttctttttaatcttggtaaatattcttcaaccatttcacggcctggagaaccaactacgtctccaataaataaaattctcatgtaaaagctcctatacttcattcttaatctgcatcttcatctctacgaaaaaaaataaagtggcgtttcgccacttcatttttattttgcatactctactgctcttgtttcacgaataacggttactttgatgtggccaggataatccagctcatcttcaattcgttttcggatatctcgagcaagtcgatgcgcttctagatcaccaatcgtatctggtttcaccataatacgaacttcacgccctgcttgaatcgcaaatgatttttcaacgccttcataagactctgaaatttcttctaacttttcaagacgacgaatgtagttttctaacgtctcactgcgagcacctggtcttgcagcagataatgcatctgctgctgcaactagtacagcaatgattgatgttggttctgtatctccatggtgagaagcaatcgcgttaataacaaccggatgttctttatactttgtagctaattcaacaccgatttccacgtgacttccttctacctcatgatcaattgctttaccaatatcatgtaacaatcctgctcgtttggctaacgtttcatcttcacctaattcagcagccataagtcctgataaatgtgctacttccattgaatgtttcagcacattttgaccatagcttgttctgaattttaagcgaccaagaattttcatcaagtctgggtgcaacccgtgaacaccgacttcaaacgtcgtttgttcaccaacttcacgaatatattcgtccacttcacggcgagatttttcaaccatttcttcaatacgcgcgggatggatacgaccatcttgaacgagtttatcaagtgcaattcttgctgtctcacgacgaattgggtcaaatcctgataaaataactgcttctggcgtatcatcaataataagatcaattcctgtcaaagtttcaagcgtacggatgtttcgaccttctcgaccgataattcggcctttcatttcgtcatttggcaagttaacaactgagacagtcgtttcagcaacatgatctgctgcgcaacgctgaatagcaagtgaaagaatttctttcgcctttttatcggcgtcttcttttgcacggttttctgtttcttttaccattattgcaatgtcgtgggaaagttcattttcaacacgatctaaaataatcgctcttgcatcttctcttgttaagcttgaaatgcgctctagctctgtttgctgtgcacgtactacttcttcaactttgctttccatctcttcaatatgctgttgtttaacagtaagagaatcatctttcttttcaagtaacgcttcacgtttatcaagtgattcgtctttacgatcaagattttcctctttttgcattaatcgattttcttgtttttgaagttctgctcgacgatcacgaatatcttgttctgcctctgtacgaagctgatggatttcatccttcgcttctagtaaagcttcttttttcaaagcttccgcctcgcgggttccttcatcgataatttgttctgcactagactttgctcccgcaattttagcttcagcaatcgatttacaaacaaaaaagccaacaactgcaccgacgattaggccaagcaaagcgaagatgattgtattagtatccatcatttcacctccccttgctataaacttgtaagttttaaatttcatgtcggcatgtacatcgtattcacctttcaatatacacacaaaggcttttaaacgctaaaatgttttaaaaagggaaaatatacatcttaattgtaaatctgtgcatttttattgtcaagcctgcctctacagtatatattgaaatttcgtatgttacttttctagcattaacaatttttacaaaaaaaagaccccttctttgaaatagaggagtctttttttatctcgcagcaaattaaatatttaaatcgccttgatcgtcatcctcaggagctggctctccatcttggtctaaaccatgatgttcacgcacctgtcccgcaatttcctgacgaatatcagtattttcttttaagaattgttttgcattttcacgaccttgacctagacgctcgtcattatatgaataccaagatccacttttttgaacaatatctagttcagaagcgatatccaaaatttcaccctcttttgaaataccttctccgtacataatatctacttcagcagcacggaaaggcggagctactttgtttttcacaactttaattcttgttttgttacctacaatatcgtttccttgctttaactgctctgcacgacgtacttctagacgcactgaagaatagaatttaagcgcacgtccaccaggagttgtttcagggttaccaaacataacgccgactttttcacgaatttggttaataaagatagcgattgttttagacttgttgatagctccagatagtttacgcaatgcttgagacattaaacgagcttgtagacccacgtgagagtctcccatttctccttcaatttccgcttttggcactaatgctgctactgagtcaacaacgataatatctactgcaccgcttcgaactaaagcttcagcgatttctaaagcttgttctcccgtatcaggctgagataataatagctcatcaatattcacacctaatttttgagcatatacaggatctaacgcgtgctccgcatcgataaatgcagcctgtccgccctgctgttgaacttctgcaatcgcatgaagagcaactgttgttttacctgagctttctggaccatatacttcaactacacgtccacgtggatatccacctacacctaaagctatatctaacgctaatgaaccacttggaattgtagaaattcttttttccgtttgttcacctaatttcataattgaacctttaccaaattgcttttcaatttgttttaaagccatatcaagggctgcttgacgatcgttcactcaatttcctcctctatctctttgaaatcatctataaactgcaaacttactacgatgtagtagcaatgtcgaattaacaactttctataacttactatactagtttttgagtcgtttgacaagcaaaaagcgaataaatgttcgtttattattttataaaaaaaaggctgttttggaaaaaccaaacagccttttttctttatttctttatcatctttaatacgtaatgacagccataattaaccgttcgtgaacgaatcccctggcggcttccagatagctgcaggctgtaaacttgaggagcttgatctttataggctacccctatatatactgttcctacaggatgtccttcttgtttggagggtccagctacacctgtaaacccgatgccaatatccgttttgtataactgttgaatacgctgagccatttcagccgcgcactgctcgctaacggctccgtactgattcagcgtgtgttcgctcactccgagaatattttgcttgatttcataatgataggcgaccaggctgccttttacagcttctccagcacctgaaacagttgttaaacgttcgctgaataaaccgccggttaaactttcggctgaagcaatcgttaatccttgtgccgttaattcttttaccaattcattatgtaaagaagttgcttcgtatccatataaatactcgcctacgcgctctgaaatggttttttccacttcgtctaacatgcgctgagcttcagcagcatcagcgtgcttagcagttaagcgaagcgtcacttctccatctcctgctagcggcgcaatcgtcgggttggtttgcgcatcaagcaaatcttcaatttccgtctcaagctgtgattctcctattccgaaaaagcgaagaacgcgtgattcaatactttcttttaattcaagcttttgagctaaaaattcttgaccatacgattcatacattggataaagctcttttggaggccccggaaatagcatatagtgttttccctctaccgtaagccccatacctggagccattccgtaatcgttagggagcactgccgaaccttctagcacaattgcctgttttttattgttaggtgtcatgacacgatttgactgtttgaaataggcttcaatgctttcaagtgcttctgcatttgttgtcagctctactcctagcacactcgcaattgtttcttttgttaaatcatcttttgtaggaccaagcccgcctgtgaaaataattaactctgcacgcgtttgagctgtagcaatcacttcttttaagcgctgtgcattatctcctactaccgtatgatagtaaacattaattccaagttcggctaattttttcgataaatactgagcgtttgtattggcaatttgtccaagcagtagctcagagccgactccaataatttcagcgttcatcatatcatctccatcttacttattttgagttaacaaaagcctgtttgtttttagcaaagtagtcccagcctgaaataaccgtaaaaatcactgagatccaaagcattacgctagcaaatggaatggaaacccattcaaaaggcaagttatacaacagaatagctgaaatagctaaaatttgagtccatgttttaattttacctaacatatttgctgctacaacttccccttcccctgctagtacaagtcttaaaccagtgatagcaaattcacggctaataatgatgatagcagcccatcctgcacctgcaattaaatctaagtcaacaatagctacaagcgcagctgaaaccaatagcttgtctgctagtggatctaaaaatttgcccaagttcgtgactaaatcgtactttcgggcatagtatccgtctatccagtctgttgtagatgcaataataaataatgctgcccctaataggtgagcgatcggaatctcttttcctgctgcctccactgtgccaaatggtagcggcaccatcataaaaatgaggaatacgggaattagaaaaattcgcgaaatggtaatcttgtttggtaaattcacttcttctgcctccaattactgttacaaactgaaagcgtgcaaacgaagttgtttgcacggctttggttttattatagcgtgaatgagtgattaattcacatattatctttatttacaccctgatcactttttaaaacaggctgtttactgtgcttctgccggctgatattgaatcgttacaacttgtcgaacttgcttggatgaatcaaacggtaagtcaaccgcttttccatttacttttaactctactccaggtgaataaccgatgttgacacgagcttcagtttctttcgtcaaatcaaattcttttgtttcacctttttttagaatggagctaaagaaagcatttccttttccgtttttcacatctaaccaagtatctgcttgagtggatgttacttctagattaaatgcatccgtaccggaaagagcatacgtagcacttctgcctgttttttgaacttccttgtattcttgtttaccgctgtctttcttttctttttcagctttttcttttttagccttttctttctcagctttttcttttgcagctttttcttttgcggctttttctttttcttgttctttcttatcagcagcactttgttcatcttctgacttgctattgtcattttttgcagtagtttcattcgtttcttcctgcgtgttagactgctgaacttcgctgtttggagcttcttggttagcctgctccttgtttttatccgagacgatattttgagcgattacccaaataataatcccaacaactacaactcccgccaccactagaacagttggaaggtagtcatatgcttttgaaactccttttgtatgctgaggaatttctttgcggctgcgaacgcgcgaaagctgctgcggcatgtcttctgtttgagttgaaggaatgtctgatttgtattcttcaaaaatagcatctgtgtctaacccaattgcttcgcagtattgcttaataaacgctcgtacgtaaaatttccccggcataacctcataattgccttcttcaatgccaagtaaatagcgtttttgaattttcgttagtttttgtaaatcctctaacgacaatcctttgctttctcgttcttgtcttaacctttgtcctaaatctgtcaatgctaacacctaccaattatgctaaaaatcaaacatcgataatccaccgtcttgaaacatttgaggaccttccattatttcatatgtaattttctcattggggtcgtttcttatttcaataatgtaggcaaaatcatctaacgaatactcggtattttgtacaaatacatccggatgctccacaatttttgtcgcgggtacattcattacttctcgaacaagctgccagtgcttttcattcgctcgttttgtcgatacaatcccgtcaataataaaaatattatcagcgttgtattcgtcagcaataagctgactgcgaatcgtttgttttaagagtgtagaagacacaaaaagccaccttttgttcgcacatacgctagctgctacaatggattcggttttgcctactcgcggcatacctcgaatgccgataagcttatgaccgtcttgtttaaacagttccgccataaaatctacgagcaaacctaattcatctcttacgaaacggaacgtctttttatcatctgcgtcccgttgaatatagcgaccgtgacgcactgctaacttatcacgcaatttaggcggtctcatttttgtcacaatgatattatccattgttttcaaaatagattcaagcctgtctatttgctcatgtgaatcacagcgcagcaataatccacggcgaatatcatccactccattaattgtgacaatattaattgacaacattccaagaagcgatgaaatatcacctaaaagacccggacgatttttttgtatttgatattctaaataccactcaattttctccatcaaacccctcccatttcttggctggccttcgagaggtgccccctttttttcacctagtttaactataaatgatttccattatattataaaccctaaagacaagtagttctacatttgttatgtatgtaagcgcttatttatttgtactatttatttctaagaaaaaaggagctctcacacgcggtgaattagctcctttttagaaacgataacttattttactgatccgttattttgaactaatttcaccatgctgctcgcaatcgcatgctgctcttctttagaagcaacgctccaaaggtctgctaaaattcgctcttgatcattttttgcatcaacttggtttgctaaatatccaccaatttgataagcaagatcatgaataacttcttcttgcatcccttcgttttgcgcatgatgtaaacggtcgcctaaaaaatctttccagctatcccagctttctaatactgacatgagtagccctccttaaggtttattcatatcatagtttgtaccgtgtttttgattttatgcacactttatatgtaccaaccgccattaaccgataatatttgtcccgttatgtaggaagctcgtgaagatattaaatatgaaacgacatctgccacttcttttggatatcctattcttcctaaagggatctcttcagctagctctttgacctcttcttttgaatagctggccatcatatccgtttcaatcgctccgggagcaactccatttactcgaaccccacttagtgcaacctcttttgccaaagcttttacaaacgtattttgtgcaccttttaccattgaataaaggacttcaaatgaagctcctgtaagtccccaaatggaagaaatcatgatgatttgtccgcttttagcactaatcattttaggtaataaagctttggtaataacaaagggagccgtgatgtgaagatagatcatttcttcggtttcttttgccggagtatctgtcattaacccgctaacgcttcgtccgctgttatgaataataacttctaccggcacaataatttcctctaaaaacttctccactccctctttacatgataaatccgcttgtaccgtaaacacggtttttaccttttcagcaagctcatatgcaagcgcctctattctgtctcttcgttgatgatagtgcaaaataagcgaatatccatcctcagccaattgcttagcaatcgctgtgccaattcctccgcttgcacctgtcacaagggcaaatttctccataaccttctctcctttacatgcaaaaaagctgatgaacatcagcttttttgacaacaatcatctttatttaggtactacttcacaaaccgtaaagtttctttcatcaataatctcgtttagcacatcttttatttcgttcaccttcagtttttccagcgtttcaacaatatcaaataaattcatatcattaaatgcatagcgtgtaaactgattagcgataaactcaggtgagtttaatgaacgtaaaaatccgccgattttctttttacggatacgctcaagctcctcttctgttagtgattttgttttcatttcaagtaaaatttgtttaactcgatcatacagctgctccggttggtccgtatctcctccgataagagcaaaaccaaatcctctttcctccgtataatcataagcaaatgtttcatcaatgagcccgtctgcatataactcctcatagtacgaagagctttttccaaatgcgtaatctaaaataatattcattgctaactcatatttaagcatttctccacctgaacgctgcggatttttcgcttttagacctaccatacatttagaagactgcaccggcatttttagtacttgtttttcttgatccaccgtttcaggctcttcgtcaaaatgacgctgtatgtcggagatttctttataatcttttttctgctgattgtctcgaacttgcttcattaccttttccgcatcaataggacctacaatgaacaacagcatgttgcttggatggtagaacgtttcatagcatgtatacagcaaatctttattaatatgtgaaatcgattcgatcgtgccagcaatatcaattttaacagggtggtttttgtacatattttgaatggtaccaaaatacaagcgccagtccggattgtcgtcatacattgtaatttcttgaccgataatgcctttttctttttcgacagttttttctgagaagtacggctcttgtacaaagtccactaatgtttcaaggttttcttcaaaatttgacgtacagctgaataagtaagctgtgcgcgtaaaagaagtaaatgcattagccgaagcaccttgtttactaaactgctgaaagacatccccgtcttctttttcaaataatttatgctctaaaaagtgtgcgattccgtccggaacttttgtcatttcattttcatttagtggtacgaattgattgtcaatcgatccgtagttcgttgtaaaggtagcaaacgttttgttaaactccggctttggcaaaatatatacctgcagcccgttatccattttttcatgatacagctgttcctgaagctgcgaaaattcaattttctccattttcttcaccgcccgttcctgttaagaaataaattgtatccatttcaattttctcagccactttaataatttcctgcttagataccgcatcaatatgctttaagtattcgtcaattgaaatgtctttgcctgttaattcattatgatacataacctctactaatcctcgtggagtatccaccgtttcaagcagctgattgtgaatgacggcttttgtttgagcaatttcgccgtctgtgaacgacccttgcttcatctcctgcatttgttctttaataatagtaacggcttggtcgtaatttttagcatcaatacccgacatgaccatcagtaatcccttatgactttctacccttgaagcggcataataggctaagcttgctttttcacgcacattgataaatagcttagaatgtgagaaacctccgaatataccgttaaatacttgcagagcaaaatactgtctatctccgtatacaacatttgtgcggtagccgatatttaatttcccttgttttacttcttgtttttccactacttcatttacttttgagatatctttagacgtaatagaatcttcaatgtctttttgctcgcgctttggtaatgtaaatgtttcttttactgtttgtaaaacctcttcgacttgcaaatcgccaatagcataaaggtgaatggcatcttcttttaacacctgctgataataggcgtacaaactttcacctgtaatttcttccacgtcgtcaatttgaccgtttacatgtaaagagtaaggttcttccttacacatttcttcgactaatcttaaattagcatagcgcattttatcatcaaatacggcttgaattctctggcgaagcgaacgcttttcttttgtcataatatcctttaaaaaagagtcccctttaactgctggctttaataaaatatcgccaagaagcgctaacgctttttgcaaaagcggagttgaatctttcaaatatttttcattcgctatatcaatgcgaatcgtaatatcgtggttatcacctttttttgttaagtctacttgtaaagtagcaccataaagctcatctaaatatgtacgaagctttgtcgtagacggcagcgactcagtagcgctttgaagcacataaggtaaaagggcacgcattgtcaccgttttcttatctaaaggggcatttagttttaaaatgaacgtgtttgttttgtacttagctgtttgaatagtgtgaacagtcaatccttctagttcatgtttttgttcagtcaataatttcatatataaacctccttttaaattttgatgtattaactagacaatacttctattttgaatctttaacgctaattttagtcttataaccactatatcgaattcaaggaaacattttcaagtaacttgccgcgcgcttcctcatttcttttcatattctttctctcaatgaaaaaaaggcggagaaaagaatatgattcctttgtctccaccttctatatttatccaactttagtcattgttagacctcgtatagaggatttattagcggcggcctttttcataaggaacgcctagcgctttaggagcctcagcacgtcctacaaaaccagtaagtgctaagattgttaatacgtacggtgcaatggttaaaaggacggatgggatatcttgaataaccggaatctgagctcccgtgatactcaaagactgtgctaacccgaaaaacatggctgcacctaaagcaccaataggatgccatttcccaaaaatcatagctgcaatagcaaggaacccttgtccagcaatcgttcccgccgcaaagtttgtagcgatagacgtagcatacaccgcgccgccgattccagcgaacattccggaaatcataactccaacgtaacgcattctcacaactttgatccccatcgtgtctgctgccattgggtgttcaccaactgaacgaagacgaagaccaaacggcgttttataaatgatgtaccatacagcaaaagctagcgcaattgcaatataagacgtaataggaacattcaaaaacagaattttgccgattactggaatgtctgatagacctggaatacttactttatcgatacggaattggataaaatctgtttgtcctttcccaaaaatctttttgattaaaaagattgaaagacccgcagctagaaaattcagcgctacaccacttacagtttgatctgcttttaatgtaatacttgcaacagcatgaatcagcgaaaacacagcgcaaacaacagccgcaattactatcgctacccacggggcccaagcacctaatgcatcctgaagtaaaagggttgaaacaatacctgtgaatgcgccaaacatcatcagcccttctaatccgatgttcacgaccccggaacgttcactaaatatccctccgagcgcggtaaagataagcggtgcagctgaataaagcgccgctggaataataatggctaacacctctaagaagttcattttgctccccccttgcctgcacggccaagcatccagcgaattaaataactagatgcaacaaaaaagataataagcgcaatgacaatttgaattaattcagacggtacgcctgtcataaagttcatttgaggagccgcagtttgcaatcctccgaaaaagaatgaagctaataaaattccaattgcactgttagctcctaaaagggctacggcgataccgtcaaatcccgtacctgtaaacgcagtgaatgtgcccatatactgaaatgttccaagcccttccattgccccggctagcccggcaaaagcgcctgaaatcgccatggataatacaatgtttcggcctacattcattcctgcatactgtgaagcatgttgattaaaaccaacagctcttagctcgaagcctttagctgttttattcaaaataaaccacattacgacggctgcagcgatggtaataagaatgccgtaatgaaggcgagagttattggttaactgtgctaaaaagcttgatgctaaagatgccgattctttaatatcatacgatttttcattacccgcatataaatacgtacggattaagctgctcgttgtataaagggcaatatagttcatcatgatggaaacaattacttcatgaacatgaaattttgcctttaaaaatcctggaataaacgcccaaactgctccagctgcagctgctgctaatacagctaaaggaatatgaatgactgctggtaaattaaacgcatacccaacccatactgaagccaaccagccaactaaaagctgtccttctactccaatgttaaacagaccggttttataagcaaacgcaaccgcgataccagccagagcaagaggagtcatggcacggatcgtttctccaatggcttttggcgttccaaacatcccgtcaaaaagagattgatagccaagcattggatcatagccgcctagcaacataataaccgctccggcaatgagtcctaatatggccgatacaacagggatcaaaatcatcattacgcgttcatttttcacaagtttattcatgctgttccacccgctttctcacgcgtaccacctgccattaataagcctaactcttgttcattcgtttcttttggatctacaatgtcgactatttccccttcataaataaccgcaatgcgatcgcttagattcattacttcatctagttctagcgaaacgagcagcactgcccgtcctttatctcgttcttcaatcagctttttatgaataaattcaatggctcctacatccagccccctcgttggctgagctgcaattaatagttccggactgcggtctacttcacgggcaataatggctttttgctgatttccgcccgatagcgatcgcgcttgcgtatattcactaggggttcgcacatcatattctgcaattaactcttttgcttttttatacagctctttataattcaaaatacctgatttagacatcggcttttgataatacgtttgaagaccgatattttcaccaattgtataatctaatacaagtccgtgcttatggcgatcctgcggaatatgtcctactcctgactccgtaattttacgagtggataacgtagacagttcttgattttttaatgtgatcgaacccgactttatttttctcagacccgtaattgcctcaatcagctctgtttgaccatttccatctacacccgcgatgcctacaatttcgcctgctcgaacgtttagattaagtgaacttacagcctctactcctcggctgtcttctactactaattcttttattgttaacacagcttcttttggagtcgctgttttcttttcagttttaaaatgaacttctctccctaccattaaagcagcaagttcattagggttcgtctcttttacgcttaccgtgccaacccccacaccttttcgaataattgtacagcggtcgcacactgacataatttcttttaatttatgcgtaattaaaataattgactttccttcttgaattaactttttcataatttgaattaattccgtaatttcctgaggtgttaaggcagcagtaggttcatcaaagataagaatatcggctcctctgtaaagcgtttttaaaatttccactcgctgctgcatgccaactgagatatcttgaatcttcgcatatggatctaccgataatccatattgatttgaaagctcttgaatatcttgagctgcttttttaatgttgattttccccgtccgcgtcggttcgttcccaagaataatattttctgttactgtaaagttttgaacgagcataaagtgctgatgaaccatcccaattcctaagtcattcgctacgttagggtccgtgattttgacttcttggccgtttacacgaatctgccctttttcaggctgataaagtccaaataaaacgttcatcagcgttgacttacctgcaccattttctcctaacaaagcatgaatttctccctttttcacttggagtgtaatattgtcattagcgacaataccgggaaactctttgcgaatatctagcatttcaataacatattccactgctttcactccctattcctgcctgctacaggattctgtcttccgttttttggctatgaaaaaggctagttttcactagccttttatactcatataatcattgcttaacagatatcagcttattttttaagcgttttttcaaactctttaaattctttatccgtttgaggcactgtaatgtcaccgtctagaattttttgcttatactcatcaactgcttttaacgcatctttgcttacattatcttgtgatggagcaattcctactccgtcttcttttaagccaaacacaacttctttaccacctgggaatttgtcgtccattgcttttttagcaacatcttctacagccaagtcaacgcgtttaaccatcgaagttaacgttacgttttcaggcataccttcttcatgctgatcgcggtcaactccaattacccaaacctttttgtctttcccgccttttgaacggtttttagcttctgtaaatacgccgtttccagtaccgccagccgcttgataaataatatcagcgcctttgctgtaaatcgtagaagcaatagccgaacctttttctggagagttaaaactttctgcgtattgagagataacttcagcatctgggtttacagatttaacacctgctttaaatccgttttcaaacttcttgattaatggagattcaacgcctccgataaagccgattttattcgtttttgtttgtttagctgccactacacctactaagaaagagccttgctcttctttaaatagaatgcttgccacgttatctaagttctctgactttagcgtatcgtctactaatgcaaagttagcatcaggatactgctttgctgcttttttaatatcttcttttaacaaaaagccaattccatacgtcaagttgtagccactctcagcaaatttagatagattgctctcgtattcagatgcttttgtagactgcaaatacttatatccagtcccttcatcaagtccgttatctttcccaaactttgtcagaccttcccaagcagattggttaaacgatttatcatctaccccgcccgtatctgttaccattcccactttaaaatccgctgcttttttatctccgccgctcttacctgcatcgtctgagccgcacgcgcttaaaagtgttcctgccgctaatactagtgataatgcaagtcccgttttacgttttaacatgttttaaccccctgaatagttttaaaagtataaagccaattttctatttcgtccttgtgacctacatttgacacctccttaaaaggacaatgttaaacagttgtaaattttctgacatttaaacacaaaaaaactagacgcgtttacgcagtacttggaaactaaattgatctgctttaaaataattgatggaatataaaatgggttcatcatactggtcataatgcatttgtttcagtacaagcaaagcggtttctggttcgcattgtaaaataggagaaactttttcatgatagcctagaggctcaatgtttgccacggcgtatgaaatgtgctttcctgcttgtttttcaagaatttctagcaaagactcttgtttatattcaaaattttcagtcaatattctttgaggaaccttgtccatgcaatatacaactggctctccgtttgccgttctcacccgttcaacaaataaaatctgttcgtcttccccgcatgcaaaacgtgttaaatcattttcagacaactcttgtatttgagaagataagaagattgttccagccttcataccggcttgttcaatcatatgtgttatactatttaattgctcaatccctgacaaaaaagtaggcttcgtgttgacaaatgttcccacgccgtgtctgcgaacaataatattctcttcttctaatatgcgaagtgcctcacgtagcgttgcgcggctaacccctagctgctttgataaatcaaactctgaagggagtctttccttttctttaaaaattcctttttctatattttgtttaattttatcaatcacttgtaaatacaagtgccgattatccgcacgtatagacatcattc

SEQ ID NO: 5 - DNA, 227196 bp, Priestia aryabhattai
  source 1..227196: mol_type = genomic DNA
aaggagaagtttagtgggaaagttaaagtcgaaaataaaaaaagttcttaaggatagcagtatatttcggaattactttagaataaaagatactcaagttcctttaaaaaaaagacagtattttttctataaatatataggttattttatcaaagataagaaaatatattggccggttcataaattgtctaatgtaagtggaaatataactgttggaattaatagttcagtaggagccactccaggatgttatatacaagggctggggacaatccgtattggagactatacaataatagggccaaatgtaggaattattagtgctaatcatagtttgaaagattatagattacataaattagacaaagtaattataggaaattattgttgggtaggaatgaattcagtaattctaccaggtgtagaattaggagatcatacaattgttggagcgggttctgtagtaacgaaaagttttaaggaaggtcattgtattttagctgggtcgccagctaaagttgttagaaagctgcagcctaatgaagtttctaactatagagatgaacatgaattctatggatatatacctaaagataaatttagtgaatacaaaaaaaggtttctaagtgaataatttttatttttattatttgtaggagggcatatttaattatgaaattggttttactttcgggaggaacaggtaagcgtctgtggccattatcaaatgattcaaggtctaagcaatttttgaaggtactagaaaatgaaaacaaacatttgcaatcaatggttcagagagtttgggatcaacttaacaatgtaggattagcggaatcaaccattattgcaacaggtaaatcgcacgtagatattataaatagtcagcttgatagtcaagctgacttaattgttgagccgagtcaaagagacacgtttccagccatagcgcttgctgcttcttatctctacagtataatgagtgcggatttggaagaggttgtttcaatattaccagttgatccttacgtgagcgatgagttttttaataaagtgaaagaattagagacagtgattcaaagtagtgacgcagagattgctttaatgggagttactccaagctatccatcaactaaatatggatatattgttcctgaattagctgaaaggtttgaaacatatggaaaagttgaatcttttattgaaaagccatctgaggctaaggcatcggatttaattaaagcaggcgcattatggaattgtggcgtgtttgcctttaaattaaaacatattctttctattttaaacaagaagggttttcctcttgaatataaaaaattattgaagcaatatgatgagttaccgaaaataagttttgactatgaagttttggaaaaaactaaaaatatagctgtagtcaattatactggatactggaaagatcttggtacttggaacaccctaacagaagagatggcaaccaatcaaattggtaagggagtcataagtaatgatagtaaaaatgtacatttaatcaatgaattagatattcctattacaattttaggagtttctaatatagtagtggcagcaagtcctgacggatttctagtatcagataaatcagctagcccacgcattaaagacttagtaggtgaatttgacaatcgtccaatgtacgaagagcggcgatggggatggtatcgtgtattagattacactaaatttggagataacaaggaagtattaactaaaagaattggcatcaaagctggtaaaaatcttagttatcaattacatgattatagagatgaagtttggacaattataaaaggtgaaggtgaagttgttttaaatgatagattaataactgtaaaatcaggtgatacacttgaggttaaatctggaaataaacatgctctaaaagctgtgacggatttagaaattattgaaattcagacaggaacacaattaattgaagaagatattgttcgtttatatatgacatgggaagaaattaaagaacatgtattaagtataaagaaagcataaacaaatttgtacaacatctacttctgtaaaaatagttgtgcacaaattttaatgaagaaattgctaaagcgaggtagaatagttgaaagagccaatttttttaaacccattatttaaggagcgggtatggggaggggaaaggttgagagaggtttataaatataaaatcccctctctaaaaactggagaatgttgggctatttctgctcatgagaatgggaaaaatagaattcgaacaggtaaatatgcaggtaaaaaattagatgaaatgtggagtgaatatccggagttgtttgggaattttcaaagcgaacaattccccctgttaacaaaaattttagatgccaatgatgatttatccattcaagtgcatccaggtgatgagtatgcgcaggagttcgaaaatggtgagcttggaaaaacagaatgctggtacatcttagattgtaaagaggatgcaacgatgatttttggtcatcgtgcacaaagtaaagaagaatttacacagttaataaacgaaggtcactggaatgatttattacagcgtataaaaatcaagcccggtgattttttctatgttccaagcggcacgttgcatgctctttgtgagggaactctagttctcgaaacgcagcaaagttcagatacaacgtatcgtgtgtatgattacaatcgcattggccaagaaggaaagctgcgagaacttcacttagaaaaagcgattgatgtgacaaccatccctcatgctgcaacgcatatagagcctattagtattcaagaaaaaggcggcaccatcactacttttttagaagaagattatttttctgtctacaaatgggacatacagtcttcgcttgagttacttcaaactcaccattttacattaggaagtgtaattgaaggaaacggaacgctttggacagaagaaggagaatttccgctgcaaaaaggagaccattttattttgccaaatgcgattaaagcattcactttgacaggccagcttcaagttattgcctctcatccaaatgagaatagtaagcgtatatacgaagctgcacatattgctggagatatggcgaaaatttaatggattgtgcaagaggataataagccatttatcataaatagtataaatattttacatgctatgtcgatataaaaatagaaagaaaaaataagaactgtcaatatttcatttaatttacaaaagaatatagtaaaagaatcttttgtcaactataatgaacagtatattgaatttttagaagttactaagttcggaggtcaactatggaagagacaattagtttgcgagagttgtttgcagtacttcgtaagcgtctttggcttattgtactgattacaattatcgcagcaaccgtaagtggtgtgatcagcttttttgtgctgacgcctgtgtatgaatcaaagacacaaattttagtcaatcaagcgaaaaatgatcagcagttatatagtaatcaagctgttcaaacaaacgtgcagcttatcaacacgtacaatgacattattacaagtccggctatcctagataaagtggtcaaagagttgaaacttggtaagtctgctcaatccttaagcggtcaaattcaagtgacaagcgcacagaactctcaggtagcacagattgtcgtacaagatacaagtgcaagacgtgcagctcaaattgcgaatacaacagcttcggttttccaaaaacaagtgcctaaacttatgaatgtagacaatgttaaagtgctgtcaaaggcaacgattggcgcaagtgcaagtccggttaaacctcagccacttttaaatattgcgattgcggtagtagtcggtttagtggtaggtattgggttatcattcttacttgaatatttagacaacacgttaaagaccgagcaagatattgaaaacattctaggacttcccgtgattggagtcgtcacgaatattaaggatgtgcctaagccatcaaacgtatcgcgaccagatgtagctgctcgcgtaacgcaaagaggtgaaacgtatggctcgtaaaagcaaagctcaaaaaaatgataaaatgctgacgttaaaaagacgtttgctcgctcataacagtccaaaagatccggtagcggaacagtatcgtacgattcgtacaaatatccagttctcaaacgttgatcaagacataaaaacaattgttgtaacatcaagcggagcggaagaaggaaagtctacaacttcttctaatctagcaacggtttatgcacagcaaggtttaaaggtattactcattgacgctgatttacgtaaaccaacgggtcattacacgttccgtttagaaaaccacattggtcttacgaatgtattaactcgtcaatctacgttagcgcaagcggttcaagagtcagaaattcctcatctttctgtcctaacaagcggtcccattccgccgaatccatctgaactgttagcatctgctcaaatggctgagttgttaaaagagatgaaagaacagtttgacatgattatttttgatacgccaccaattttagctgtagctgatgcgcagattttagcgaatcaagtagacggtacgattttagtagtcagcagcggtaaaacagagaaagacgctgcgttaaaatcgaaagagctgttaagcaacgcgcaaggcaagctgcttggggttgtgttaaataaccgaaaagtagaagaaggtaattattattactactacggtcaaaactagttagtaaccagcgcctctctagttcgaactagagaggcgctttttttgcgtttatttttatggagtgtaggtgttttgaaccacaaataaaaggtttattagtaaaatatatttatagccttcacgtttcgtgataaaatctacgtagtatatttgtagataattagaaggaaaactattattttctatgatgtttactggctaatagaggaggagttattcaacatgtccaccaagacaatgaataaagcaaaagaagctgaccattcagcagcttatttacatagggatgaagaaaaagatcttattattgaaaaattaatcaacgaaaaagaagcattagagcaggaattcacagaaatccttgaatttattttgaacgatatgaaaaatcaagaagacttattctctgaaaaaaacaaaggattattgatgcacttgaatcatgattctctgtacaaacagaaatatgaaaaagcagcagctgatttaaagcatttgcatgggatgaaaaaagaaacggataaacttatcgaggttttacaagaaaatgaaaaaaaagaacagcagcgagcggtgcaattacaaaaagaaaaccagcaactaaatcatacgcttgcttcagttaatgaagagaaacagaatgtgataaaagaagtgacagcactaactgctgaaaatataaaggcagtaaatgaacgaatagcactcaccaaggaattggagctgttaaaacaagcgaagcaagaagctttgaagcaaagtgaatcactggcagaagatattcagcagcaaaatgaagaaatgaaagtgatgaaaaaagaaaaagagcgcttgaagacagaagttcttacgttagaagcttctaataagaatacggaacgtgaattagagtcgttaagaaagcagttaacaagtgctaacgagcaaatcaacgaaatgaagcaagaaaaagagctactaaataatcaagtagccgagcttcaagatgaaaaagaaaaattagagcagcgcgtatatagtttagaaaactcgacgttgggaaaaattacggtttcatattggaaaatgaaaaataagtaaaaacgaatgaatagcaaagtctatttaatgagtatgagtggaggaacacatgagtaatcgttttttgcctttatataaccagtatagagtagaaatgaaaagtttggacttcttgttaaaagccaaacacagctacccaaaagatatccttagtttgaataaagaaaattggagcgtacatacggaaaatgtaacagtaacgaatgaggcgaactcactgtatgtagatcatactatgagtaagagagattctttttatattgcgtatttagaagagaatactaactttagtacaggtccaatgtatgactgtcaattagagcctgatcaaaaataccttgttaactttaacgggctcacagatgagcatgtgaaaatcgatttatttgtgatttcgtacaaaaatcaaaagaaagtgaatatccagtcggttcatttgaatcgcagccaaacgattgaaacagaaaaagacgccgattcatttcggatagccattcgttttatcggaaaaggaagttctgttattcaacaagttcaatttgttgaattaaataaaattttagagacggtttcaccttctgtacagccgaaaaaagaaccgattaacttagaagaatacaagtggcagcatgttattaattctaatgaaatgtttaatgaaaagtggtttgttcctaaagcaaaaaatacagcaaaagttacgttttcttctaactgtattcatgcggatttcgattttgaagaaaatgagtatcagtatatttcgtacagggaacaaaatattaacttcagccaaaagtcaatgaagtttccaatagaagttaattctgaatatcgatatgaagcaacggtaaaaggaaataaacaagatacagcaggcgttcactttttccttattttctacgcggaaaaaggaacaaaagagcaagtcgaagtattaaacttaaatgaaacaaagtcgattcagcttgattcttcggttgtgtcttgtcgtcttgcggttaaattttttggcaaaggttttgcagagattgaagaaattgagattaagagaaaacgagaaaacaacttcttgtctcatacacatcttcgtcagctaggctttgatatccctaaaaaattaaaggatgttaaattagctgtgatttgtgatgatttcacgatgcaatgcttgaagccggaatgtgacctgattacgtttggaccagatgattggaaagcacaatttacgattaagcgacctcacgctctttttgtagaatctgcatggcacggcaacggaggaagatggacgaggaaagtagccaaagggaacggtaaaagtaatttagatctttttgaacttattaactggtgtaaagaaaacgaaattccaacaattttctggaacaaagaagatcctgttcattttaatgcatttgtagatatagcaaagcattttgattatatttttacaacggatcaaaactcagtggagaattatcaaaaaagagctaaccataagaaagtagctgctcttccgttcgcggctcagccttctatccataatccagtggagctatataaacgtgaaaatggaattagttttgcaggttcttattacgctgttaaatacctcgagcgtcaaagagatatgaatatgctgttagaatcggctgcacattataatttaacaatctatgacagaaattacggaaagaatttaattgaattttattttcctgagcatttgcgacagtatacaacaaacagcttaaagccatctgaaattgacaaagcgtataaagggtataaagttgctttgaatgtaaatagtgtcgttgattcaccaacgatgttttcacgacgtgtatttgaatgcttagcttccaatacaccggttgtaagtacttattcaacgggaatcaaaaatatttttaaagatatcgtgtttatgggaacgacggagcaggagtttgaaaaagaatttgacaagctgttacatgatgaggcttattacagacgccgagcgcatcaaggtttacgaaacgtgctgcagcaccatacctatgagaatcgcttagagtatgtgttcaaccaagccggctttgacttagaagcgacgtctgtcatgattcatgtatatagcttagtagaaaatagcagtgagatgagacgcgttttagatatgtttgccgagcagtcatatgattacaaaaagctaacgtttattcaaacaaagcctttcgcttacgaacagctgaaagcagatttggagaaaatgaatgctgtttgtgtaacagaagatgaatttaagcatttatcgcttcaagacaagacaggctatgttgcttattttgattcctctaacttttatggagaacattatttagtggatttagcattagctacaaaatatacaacgagtgaagctatcggaaaaggaagctattatacgtttgaaaatcagcagtttacattatcatacgcagataagagacatgtctacacaaatgagttaaatattgatgcttgtatgctaaaatcagaggttttacgtgaagtaagtatgaatgaattagtagagcttttccgtttgaaaggttcagttgattttctatttgcaaaaggataccgacttttttctatagatagttataactttgttcgaaatctcaaaaaagttcccaaacaggctaaaaagcaattacatgacttggtgaatatttaagacgggagttatataatgaagacattttctttaacacctaccgaggttctgaaatttgaagatcagtgggtgtacggcaaacaaaatagctttacgtttgattcaaaacgtatagcgcaagagttgattattaatgtgaaaaaaataaaagaagaggctagttatacatttatttcttatggtgaagatttagaagtggacgttcgtgctgacaatacgtatatcgctactattcaaggagatacgtcagatagcttggatgttcagcttattgtatcaggtttagtaaatggaaaaagtgtattaactgagcaagttgggttggatattagtaaaacgattacgttccctgaaggtacggaaaaagcaaaagtaaaattacgtgtaagcggaagcggacaagcgaaaattagagaaatcaccttgtctgctttctcagaagagctagtagaagtggagcaagctatttatcgtagtaatcaagaagcagaatatctcgttttaacgaacgtttaccctgaaaaaaataacctctatcgaaatatgtttgttcatagaagagcggaattatatgaacagcacagtttgaacgtggatgtattcagattaaacataaaagaaaaagcattaggctattataattttgaaaatatttctgtcctaacaggtggtcaaaaagagttaactaaggtattaaataagaaaaagtataagaaaattttaattcattttgtgaatgagcatatgatgaaagcaattgaagccagccatgtaaaacagacgccgattcttgtttggattcatggagtggaaacagagaaatggtatagaagatggtttaactttaccaatgattcaagcagtctggaaaaagcacttgcttctattaaagagaataaaaaacgaacagattttatgaaatctatctatgagagtacaacgttaaatattaaatttatatttgtttcaaaatggtttaaagaggcagttgcagaaagtgatacaaacgcatttgttaaaaactattctattattcataacgtagtagatgatcagctgtttaattatgtgaaaaaagatcccgagcagcgtaaaaaaatactaagcattcgaccatttgcatctcataaatatgcaaacgacctttcagtgaaggctattttaagcttatctacaaaaccttattttaatgagttagagttcaatatttacggtcaaggagcattgtttgatgaaatcttagaacctattcgttcttttagcaatgttcatattcataaccactttcttcctcaaggagaaatagcaaacattcataaagaacatggtttatttctatgtccaactcgtttagatgcgcaaggtgtttctatgtgtgaatcaatgtcaagtggattaattcctataacgaacggtgtcactgccattcctgagtttgtgaatgaagattgtggatttttagcagccagagaagatgctgaaggacttgctgaaagcattgattatctttatcatcatccaaaagagtttacgagaaagtcagcaaacgcagctcagcgtatgagagaacagtgcagtattgataaaatcattgatcaagaattagctgaaatcatgtattgataaagaggggattattacgaagaaaattgttattttaggaagctgtgtgactagagatgctctagagttcacagaaaacagtcagtattcgttggaaatgtattttgcccgttcttctctcattagtctctattcaactaaagtaaagattaaaaaagcagacattcagttagcttcaagctttcaaaaaaaaatggtctactatgatcttatcaaatatttcccgcgttatataaaagaaactgaagctgattatctcctgattgattttattgatgaacgaatggaagtgcttgagagaaacggcagttatgtaacacgctctaatgaatttgttcattcaaatgtaaacgaacagatccaatataaggaaagtgaattagctaaagaagaaatcaacgaactgtggaaaaaaagtgctttgcagttaattgaagatttaaaaagcagatttaatcctgaacaaatcatactgcacaaagctctctggcgatattcttacattgacaaagatggagaagagcaaacgtttaaagaacattactggatcaagcggaacaacgacaaaatagatggttactacaaattttttcaagagagttttccaggcattcacgtgatcgatttaaatgatcagtatcatgctgatgaatctaacaagtgggggctttctccgtttcattacgaagaaaaatattataaagcattcattgagcagttgaataagatatgtcaataagtactatcagatttattcataataaggagaaaagatatagtttctcaggtgaaaacatgtaaaaagacataagtattttatggtaaattaaaacgttgaataaaagagtcgctcttaaccttgttattaaaatgtagtctaaccaggcttaaaaagcgcttttaaagccttaaaaagtaggtagatttaaatagatagatttgtttataatattctaaaaaaatgacaatagactctggagagggaaattcgacaaaaaaagacatagaaatacatgtcataatatgctaacataagtattgcttttattaggtcttaagaaggatagggtgaaagttgatgattgacttacattgtcatattttagctaatattgatgatggttctcaaagtgatgaaatgagcgtagcgatggctagaaaagctgtttcagaaggaattacccaaattgtggccacaccccatcatcaaaacggccgatatgtaaatgagaaagaccttattgtgaaaaaagtgaacgacctgaataaattactcattaaagaagacatccctttgaccgtattaccaggtcaggaaaatagaatttatggcgaaattttggaagattatcaagattccaaaatattaactttaaatgatactggcaaatatatatttatagaattgccttctagtcaagtcccttactacaccgagcgacttttatttgatattcagtctaaaggaattgttcccattattgttcatcccgaacgaaacagtcgattgatagaagagccagagcttctgtacaatttaatcagtaaaggtgcattggctcaagtaacggcttctagcgtaacgggacgattcggaaaaaaaataaagaagttttcccatcagttaatagacgctcatcttgttcattttgtttcatcggatgcacataatctcgatggacgttcttttcatatgcaggaagctttggatagcattgaaaaagaaaatggaacagaagtgatttacgcttttttagagaatgctgattacgtcataaaagggcaaatgtgttttaaagaacctccagaaagagtaaagaggaaaaaatttttagggattttttagaagtcggataggtgagagaaatgaaaacttttgatacattacctaaaacagtaaaaaagaccgtccggtacattagacaagacgcttcttatgatcagcttcttgttttaaaaaggtatttgatggaagcgattgacaaaaaagagcaggaattttataaacgaaataactaagcttctagtaaactagaagctagtatttcttatacatacatacttacatgaaatcaggtgactctatgaaaaaccgtattaaagtaatgacgatttttggaacacgtccagaggctattaaaatggctcctcttgtattagaattaaacaaacgttcagaagaatttgaatctatcgtaacagtaacagctcagcatcgtgaaatgctagaccaagtgctgcgtgtgtttgatattacaccggatcacgacttgaacattatgaaagaccgtcaaacgcttatggatgtcacaacacgcggacttcaaggactagatcaagtcatgaaagaagttcagcctgacatcgtacttgttcacggcgatacaacaacaaccttcatcgcaggtcttgcggctttttataatcaaatcaaagtaggccatgtagaagcgggtcttcgtacatggaataaatattctccgtacccggaagaaatgaaccgccagttaacaggtgtattagcggatcttcattttgctcctactacaaaatctgcgcataacttgctgcaagaaaacaaaaaagaagaaacgttatttattacaggaaacacagcaatcgatgcattaaaaacaaccgtattagaagaatattctcatccggtattagatcgtgtaggcgacgaccgtctaattctgttaactgctcaccgtcgtgaaaatcttggtgaaccaatgcgcaatatgttccgtgcgatcaaacgaattgtagaggaacatgatgacgtacaagtagtctaccctgtacatttaaatcctgttgttcgtgaattagcggatgaagtgttaggaaatgatcctcgcattcaattaattgaacctctagaagtagtagacttccataatttcgcttcgcgtgctcatatcattttaacagattcaggcggcgtgcaagaagaagctccttcattaggtgttcctgtattagtacttcgtgatacaaccgaacgtcctgaaggcattgaagcaggaacgttaaagcttgcaggtgtagaagaagaaaccatttattcacttgctaaagagcttctaacaaatgaagaagaatatgcccgtatgtctaaagcatctaacccatacggtgacggctttgcttcaaaacgtattgctgatgcaattagcgaatatttcagtggtcaaaataagtaattagtagatgggggaagtttaatcatgtcaaaagtgaaaaaagcaattattccagctgctggattaggtacacgtttcttaccagcaacaaaagcaatgccaaaagaaatgcttccgattgtagacaaaccgaccattcaatacattatcgaagaagcaattgagtctggtattgaagacattattattgtaacgggtaaaggaaagcgtgcgattgaagatcatttcgataacgcacccgaattagaacaaaaccttgtagaaaaggaaaagttcgaacttctagaaaaagtgcgtcaatcagcaaatgtagaaattcactacatccgtcaaaaagagccaaaaggattaggacatgcggtttggtgcgcacgtaaatttattggcgatgagccgtttgctgtactgttaggagacgatattgttcaagcagaaacgccttgcttgcgtcagttaatgaatcagtatgacgaaacgttatcttctgtgattggtgtgcagacggttccagaaaacgaaacgaaccgttacggaattgtagatcctatttcaagcaatggccgccgttatcaagtggatacatttgtggaaaagccagcattaggaacagcaccttctaatctagccattatgggacgctatatcttcacgcctgaaatcttcaagtttttagaacagcaggaagtaggcgcaggtggagagattcaattaacggatgcgattcaaaagctgaacgagattcagcgtgtatttgcttacgactttgaaggcaaacgatacgatgtcggcgaaaagctaggtttcattcaaacatcattagaatttgctcttcagcatgaagatttacgtgaagatttacttacatttatggatgagctattacagagagaaaacgtaaaagcttaattgatatttcactagttcacttggtgagctagtgaaattgtattggagtgaagttgttttgacaaaaagggtacttgtgatttctcaacatttttatcctgaaatcggtagtgcaggaaatcgtataaaaaatatatacaaactcttaaaagatgaaaattatgacgtaaatgtactgacgactgagcctacatatccaaataaaaagatatatgatgatgaacagttttgggatgatcattcaattgatgaagaaaatgatgtaacgcgcgtcggtgtgaaaaatcgcaagtattctagaagtattatcaatcgcttaatgtattatttagagattgcttttaaaatgatgttcttcattttaactgaccgaaaaaagtacgatgtgatttttgttacatcgccacctatttttattgcagtagttggattgcttgcaaagtatcgttaccggagacctcttatattggacattcgggatctgtggccggagtcattaaaaggcgtaggtgtgttcaattatccaattgtcatttctgttttcagctggcttgagaaaatattgtatgtaaaagccaatcacattattgtcaatagccaaggatttattcactttatgacagagaaatattcaattccatcaagcaaaattcattttatgcccaatgctgccaatggaactgaaatttctatggttgaatctggaagcgatacgtttaaagtgatgtatgcaggtaatattgggttagcccaagatgtaacggttctaatggatcttgcaaaagaattacatgagtataatattgaattgacggttatgggatatggttttaaaaagaaagaatttgttcggtttgcgaaagagcataagttaacgaatgttcgatttattaagcctacaacccgtcagaaatgtttacatattatttcagagcaccacattggtcttgttacattaaacggaaagcaagtgttcgaaacggtgttgcctggtaagattattgattatatgacatgtggaattccaattgttgcatctgtttctggttatgcaaaagagatcattttgtcacatgaagctggcgttgtgtcgggtacaaatacagcagatgaaatgctaagacatattttacatttgtatcagcatccttctaagcgcagcaagatgtctcgcaacagcttgaattatgtgaaaaagcatttctattgggagaaaaatatacaagtgttattacagttgattgagaataaaggttctgaacctcttcaagtagaacagtcagaatcagttgataaggttgaagtattatgagaaaaaatgtctgtatgtttgtgtggaatcattttacaaatgatgcgcgtgtactacgtgagtgcacggcgctatctgaaaatggctactctattgatttgatctgtattcatgatccgaagaattcagatttaaaacaatacgaagaagtaaatgaacattttcatgttcatcgcgtgaagcgctatccgtcttctctactatttatgaaaaaagcgtatcgtgcacttctaaaatataaagtgctcgctctgatcgcttttttgctgtggttaggagcagcgtgcgtagctccttacgtagtccttcctgttacaattgtagctgctctgttattaaaaacgaagctgcaagtggtctgggtaagaggaagtattatcttaaggatgattttaaaaggcaggaagaagaattatgatatttatcattcgaatgatttaaatacgcttcctcaaggattcatctgttcaaagcttcggctgaagcgcaagtatcttgtgtatgattctcatgaggtacaaacgagtcgaacgggttatgacagcggcgtatatgcaaaaatggaatctttctttatcaataagattgactctatgattgtagaaaatcatacacgtgccaaatacaatgaagatttatatggtttttatccgaacgtcgtctacaactatccatttcaacccaaaaagcgtcatcaagaaacaattgacttacatgaacgtttagggcttcctgaaaacgaaaagattctgttgtatcaaggtggtattcaaacgggaagaggccttgaaaagcttgttcaagcagcgccgctatttaaagaggggacactagtctttattggagatggacgtattaaaccagagctagagcgtatggtagcggaaatgaagttagaagataaagtgaaattcattccgaaagtaccgctgcaagatttaccgaagtatacaaaaaatgcgtacttaggttttcaagtattaaataatgtttgtttcaatcattactccgcttcttcaaataaattatttgaatatatcatgagcgatgtgccggtggtagcatgcgattttccagagattaaaaaagtagtagaaggcgagcatatcggattgtgtgtagactcgcatgattacgaagaaattgctagtgctgtcaatcaattgttaagagatcctgtgctgcgtgcaaccatgagtaacaactgtaaaacagctaaatttaaatataattgggaaaatgaacagcttcaacttctgaaagtctatcaagcaatataaagtagaaaggagttatttaaaggcatggccgtagaattaaaaaatcatgtacctgcagatgtgttggaaaaagaactggctttagtcaaaaaagagctaatcgtgcaattaaatatgagagaaaaagagctcaaagaatataacgatctgcaaaagcgttacgtaatgttagagaaacgttatgctgcaattactcgatcttttttgggaaaagtaacgttaaagtattggaaactgagaagaaaactgagcaataaaaacgtatcaaaggggaatgctaaatgataatcgatgttcaagaacggatgaaattgattaatcaaaagagaaaatgggtaaccgctccacgtgttcaaaatatagaatttgtagaagttgaatttaatagcggttggtttagaaaaagtgaagcgtctgtttcatttgatacggagtcaagaacttttacgtctgctttaaattctactgaatatacctatctaacttatcgagaacaaaatttagattttcaaaaagggcctgaagaagaaataattaagccagcctctcctacagaaaagattgtctttaaggggagtagtaacggtgctgtgattgagttatttatcattgagtatggcgaggacggtaagctcagtacgcatagagttgaaatgaatggtgaacaaacgctgactttttctgaagaagttcaacaaatacgattagcgattcgagtaaaaggaagcgggagctttaaaattgaacagcttttaattggagaagaaaattattggaatcaaaatgaactttcaacagcaggaaattatattgtactagagcaaaaccaatggtatattcctaaatcaaataagctctattacaatccttgggaaaaaacatttcatataaattttccagaaaagcagtttgcttatcttactcaccgagaagggaatgcctcattttcaacagaacctaaactggctattcctttgaatgtagacaagctttcagtagtatttaatggagaaaaagattcagcagttgaccttagattggcatttattttctatacaaatggacaaaaagttaaaaccactgaactcaaattagccactcaaaaactaatagttgttcccgaaaaggccgattcgatgcgcctggctattagagccgctggacaaggtgaattttctatccataatcttattataaataatgtgtcatattggtggaataaggatattaaatggaatgcacagtatccgttaagtgatacttcttataagttgttattaaatcaaaaaacattggttggatgggaagagtcaaataatcaagttgtttattctccttggaaccgagtatttgaatcaaagctccaaggaaatgaatttattcatttgcattgccttggcgcaaatgaaaatagcacataccgcttaacgcctaaaaaagattataactatacgataattcctgtcggacaaaccgatggagatatagaagtttcattattagctgttggctataagaatggaaagaaagtagagttccatcaactagcactgaataaccaatctccacttcgttttcaaaaagacacggagtatgtggagttcttagttcgagtgacaggccaaggattctttaaaggactaaagctttgttataatgaagagcccattgaaattacaaatcagcttaaattagatttaaaagattctaattggtttataggttcaaaaaaagctttacaattgtcagctcaagaaaagtcgctagaaggacatgcagatattgaagatgggaaaaacgtgtacatgtcttacaaagaaacaaataatagtttcaaaatgttacctacccatcaattaatgactatgcagaatggttttgagtatgaattttttgtaaaaggaaaagtagaagaaggcgttacggttattccgatgtttatcggctactctgataatgagaaagttcaagttttacagttgaaatttaactcactgacacgaattcagccccaccccgatgtaaaacaatttagagttgctttacgtatctcaggaaaaggtgattttttagtagatacgtttgatgtgaatgagatgaaaacaattgaggcgcaatttccaattaattatatggataaagcagaagtagatgctttcaaaacattgccttctaaatcaattagagaaatgaaaatggctgttattttcgatgaatttactactgcatcttatgagcacgaatgtacattgattaagatgacgccggataattggcttgaggtcatgacaaaggaacagccagatttattaatggtagaatccgcatggcgaggtaacggcggtgtttgggataagcaagttggctattacggtgaagaaaacatgaagccccttttctctatgttgcaatggtgtaaagaacataatgttcctacagtattttggaataaagaagatcctgttcactttaatcgttttattgaaacggctaaacgctttgattatatcttcacgacagatgagaatatggtaccgttctatcaagagcatgcaggacatcaaaatgcattttcattgccttttgctgcacagcctgctattcacaacccgacaaaaattgtcgataaacgagagaacaaagcttgttttgcaggttcttattatcgtcgtcatgaagaaagatgtattgatatggatcgtttattggatgcggctgcaaaagtaggtttagatatttacgaccgaaattatgtacaaaacctaaaaggattaatgcctaatcatcaattcccagatcgttttcaaccgtttatcaaagggaatttaaaatattatgaaatcgataaagcttataaaggctatcaagtaatgattaacgtaaacacggtaaaagaatctcctacaatgttttcacgtcgagtatacgaaggcttagcttgtggtacaccggttattagtacctatgctcaaggtattgaagaaatttttggtgatttggtatacatgtccgagaatcctgaaagtttgtatgaagaattcaaaaagctgctagaagatgaaagatattatgaacaaaaggctctaacaggtattcgagatgtattgacaaaacatacgtatacacaccggttgaagtacattattgaaaaggttggcttgaattttattgctacttcaccagctgttacggttgtggcatgtgctaacagtttgaaagagtatgaagaaattgttgagcaatttaatcgtcaaacctacgaaaataagcaattatatatattaattgacacgtttgatggatatttaaatctttataacaaatacaatacggctactattcatacgtttgtgcgcagttatatgcataattacttaaatattcgtgactggatttctagtccttatgtgacatactttgataaggaaagctactatggatccaattacttattggatttaatgttaagtacaacgtttactgatagcgattttattggaaaagctacttactacacgttagatcaagagcaagtgaaagagcaaaatgagggtagagagtacgaatacgtaacagatttgtctccagagcgtaccgttgccaaaacaactgtatacagtaatgtttcacttgagaaagtaattgaaatgttcgaacagaatcaacgcttagcatcttatgcaagatatggaaagcaattttttagtaatgataaatttaactacttaaaaattaaaaaccatactgataaaaaactagattctattctaaaacaagtagagttatgaggttttaataatgagaaaaacaaaagtgttatttgcagggcatgatttaaaatttgcgggtattattatgaatgatctctcaaatagagcagaatatgaaattaaaacggatgagtggaccggacacaatgctcacgatgaagcacaaagcaaattatgtttggaatgggcagacgttattgtttgcgaatggggtttaggaaatgctgtatggtactcaaaccacaagaagcctcaccaacgtctaatcgttcggatgcaccttcaagaaagagatacagtctatccattgcagtttaatatggaaaaaatcgataggattattgctatttctccttatgtatatgaagaattttatcgcatcttcaagtttccgcgcgagaaaatgacaatgatttataatattgttgatgccgacagattagataagcctaaagtaaatgatgctagattccaccttggtattattgggatatgtccacagcgaaaaagactagatctagctgtagatatgtttgagaaactatggcttgaagataatagatataaactatatgtgaaggggaaaatgcctcaagagtattcttggttatggaacaaagaagaagaaagagaatactacgaaggcatatttgctcgtatcgaaaatgctccatggaagaattctgttgtctttgaagggtttggagatatttctgaatggttatcgaaagtaggttttgtactatctacgagtgattttgagagttttcatctttctccaagtgagggtatggcttcaggttcatatccaatcatcttgaaatgggatggcagtgacactatttaccctaaggaatatttatttgcagatgtagaagaagctgtggaacgtattacgtcgctaaattcttatgcattaccaaacgatttttctaacgcaaaagattatgtaagagcaaattttggggtagaacaaatcaccaatcagtggagtcaactgatagatgaattaagtgcaaccgttgttaagtagttatatacatatagatacttctgtttaatgaatgacgtggtatgtatgtttgtatttataaatttatattttagtagtgctcaggaggaaataaaatgaaactttgtacagtaggattaggatatattggattaccaacatctattatgtttgcaaaacatgatgtagatgttgtgggtgtcgacgtaagtcaacgcgtaattgaatcattaaacaacgggaaaatccatttagaagagcctggtctgcaggaagcattaaatgaagtaattgaaaaaggtacattccgcgcagcattacagccggaaaaagcagatgcattcatcgtagctgtaccaacaccaaaccatgatgatcaacacaaatcttgtgatctatcatatgtattaagtgctgtaagcaatgttattccttacttagaaaaaggaaacgtattaatcgtagaatctacaatcgcaccgcgcagcatggatgaccatgtgaaaccgttagtagaagcagcaggctttgaagttggtaaagatgtgttcttagtacattgtccagaacgtgtacttccaggacaaattcttcacgaactaatccacaacaaccgtattgttggaggacttacaccaaattgtacggaagctggtgcgatggtatacagcacatttgtacaaggtgaaatcattaaaacagatgcaaaaacagcagaaatgtcaaaactaatggaaaacacattccgtgacgtaaacattgcattagcaaacgaattaacaaaagtatgtaacgaattagaaatcgatgcattagaagttgttcaaatggctaataagcatccgcgtgtaaaccttcatacacctggaccgggtgtaggcggacactgcttggctgtagacccatatttcatcgttgcaaaagcacctaaaacagctcagcttattaatctagcaagaacaattaacacatctatgcctcaatacgtagtagacaacacaaatgctctaatggaaaaagtagacggccgcgttgtgacagtattcggtttaacgtataaaggaaacgtagacgatatccgtgaaagtccggcaatggaaatctatgatttattaaaagcagaaggcaaatacgaaattcgcgcatttgatcctcatgtggaacaagattgggttgaacaagatatcaaggaagctgtacgcaactctgacctagttcttgtattaacagatcataatgaattcaaagaattaaactggagcgaattagaaggtatggcaacaaaacgtattttcgatacgaaaaacgtagtagctaaccgttctgacgatttcagttacattaactatggcaacctacatgcattccttaagaaggaagaagtaatggcatgaaccttgtagggaggattttgaaagaacaatcctcgaattttcatttgattttaaggctagctcgttacgatatgaaaggcaaataccaattgcattatttaggagctgtatggcagtttttaactcctgttatacaggttctcctatattggctggtgtttggaattggcattcgaggaggagcacctgttcacggtgtaccattttttgcatggttaatggtaggactgattccttggttttttatcagtccatcaattcttcaaggttctaacagtgtatatgcaagagtaagtctcgtatccaaaatgaagttcccggtaagtattttacctacagtgactatcattagtaactcttttcaattaattgtcatgttagttgtattagcgtttatttttatagtatatggaatcaatcctggactacatatcttgcaattgccttattatttggtgtcattatttgttttcttgtttgccgttacgttgttaggttctacaatctcaacaattgtaagagattttcaacaagccttacaagccattatgagaatgatggtgtatttattacctatcctctgggatcaatctagacttccacacgtattccaaactgtgttgaagctaaatcctatctattatttaatagaagggtttcgtaatagttttctaggatatgcttggttctatgatgattggatatatacactgtatttttgggttgttacgttattaatacttttagtaggatccgttctacatataaaatttaggaaaaagtttatcgattacttgtaatctaggagcttaaatttatgaagctaaaggttcaatttgaaaatgtaagtaaaaagtacgtactttaccaaaagcgatctgataaaatacgagaagtgttttttccgaagaagcagaatgaaagcttttatgcattaagagatgtttccttttctgtgtacgagggagaagtgattggaattgttggggtaaacggttcaggaaaatcaaccctttctaatatcctatctcaagtggttcctcctacttctggagaattaacgattaatggtgaaacttcattaattgccatatctgcaggtctcaacaataatttaagcggctatgaaaatatagaattaaaatgcttgatgcatgggttaaccaaagaagaaatcaagcagattaccccgaaaattattgagtttgcggatataggtaaatttattaatcagcctgttaaaaattattctagtggaatgaaatccagactgggctttgcgatatccgttcatacaaatcctgacattttagtagttgatgaagccttgtccgttggagatcaaacattttatgataagtgtttaacaaaaattaatgaatttaaagaagatggaaaaactattttttttattagtcactccgtatctcaaattagaaatatttgtgataaagtaatttggatgcattttggtcagttgcgaaaatttggacgtacaagagctgtgcttgccagctataagaaatttatagaatggtttaacaagctaagtgatgaagataaaaagttatacaaaacgaaaatgctaaatcagcagcaagctgcaatttctcaggtgaaagaacatagagaacctattctcacaactgctgatcagcgttttcaaagatatcagagtcaaaaaatgaataagaagcgaagaattcaattaagggttcagctaagcttattatgtacactttctgttttactagccgtttttatgtttttataaaagtgttttgaatcagagaagtgtataagtttcattaaaacatacgaggtgactaaaaatgaaagcaaagttatttattccggttgtagcgggtatgttattatttgcaggttgcagcaacaaagaagaagctgcatctcctaagaaagcatctgaacaatcagaagttaaaacagaacttacagcggtttcacttaaaaacttcggcaataaacgtttagaggtaacaacaaaagctaagggaacggatgtaaaatatgcttattatattcataaagataataaggcatttaaaaagatttcctattctaaggacagttcattgaagtttcctttaaaagagtctggtcgttacaaggtacgtgtctttgcaaaagggtctgacgataaaaaagtagttaaaagtacgaacgctgttaatgtagtaatagatgataaagataaaaaagataagtaaataaaaaaagtgtagcttctgctacactttttttatttactttaaatttaaactttcttttaattcagtagacagctgattgcgagtgtcatcagatacggcatagtaatagataccgttaatcttttcgccttttccatctatttgaagctgttctgaatttttacgtgcgtctttataatttgattgaatttgcttcatgtcatcaaacgtaaggtttgtttttacattttgcccaattgcatctaaaattgtaccgtagtttgttaaagactgaacgctagctccttcgtcaataacgccttcaatgacttgacgctgacgttgttgacgtccaaagtcaccgcgagggtcttgtttacgcatacgggtgaaagccaatgcttctttaccatctaatttcaaaggccctttttggaagctgtagccgtcgtaatcaaatgcaagagtattatttacagtgacgccgccaacagcgtctacaatgtctttaaagctttccatattcacttgaacgtagtagtctacaggaacatctaagaatttttctaccgtattcacagccatatctacgccaccaaaagcgtaagcgtggttgattttatcttgtgttccttttcctacaatttcagttcgcgtatcacgtggaatacttaccatcttcatagactgtgtctttgggtttaccgtcattaaaatagtagaatctgaacgtcctcggtcaccggcacgctgatctactcccagtagtaaaatagaaatagggtcgccattttccaaactcactttatttgaacgtttttcagatacatcacgttttaacggttcgtgagtttgtgtgaatgtcttttcaacggaatgccatatgctatatgcatagcctgctacacctagaattaatactaaaataataccaagaataattttgaacgcgcgtttctttttcggtttttttcgtttgcgtctgcgcgcatttgaaggttgtacttgttcttccatgtggaacctctcttccttttccttatgtattgataaaataaatgtcttctatgtaagccattattcttatctttttcatcagaaaacacgtcaaaatgattaaaaaaatgacaaatttaatcaaatttcttcatgtactttaaaattatattataataaaagaaaaaaagaaagatatagtaagggagacattttatgaaaattttaattaacgtatttgctattctcatctttatctcatctttagtggcaggaaagatgtactggaatcatcaattagacaaacagttcgaaacaaagcctacaagagtaagcgcagcagaaacggaaaaggatatgcaaaccgagactaagaatctgccggaatcaattgtaaagaaattagagaatgcaaagaaaacaggaaatcctgtaaaacttgtaatcgtggggtccgctccggagaaagacgtaaagacatggggagctttattaaaagaaaaagtacaagatacatatggaaaagatttgataaatgtagagttgtatgaatacaaacaaatgaatacattacaatttgtgaaaacaaaaacatatgaagaaattacgaaagcaaagcctgatatcttgctttttgaaccatttttattaaatgataatggggtagtaggaatcgacaacacgcttgagaatttagatgttgtcatgaagcatatcgaagctgaaaacaaaaacttagtgacgatttttcagccttcagcaccagtttatgaggcaaaaaattacccaaatgatgtaaaagctctagaggatttttcaaaagaaaacgggtacgaatttattaaccattggaaatcttggccggattataattcaaaggaaattacagaatacttaaccgatgtaccaggtcagcctaatgaaaaaggtgaacaagtatgggcaggctttttaatccattactttactaataattaaatacagttaatgaaaaaacaagatcttttatgaaaagatcttgtttttttgagtaagattatttagttcgtgaagaaacttttggtagtaggaagattcatagtgtctaggagataaaccccacttgtgattttcatccgccaacacttcaccttcaatttctaaataacaagcattatgaatgttatcagctaaataagaatacatgtattcaagcttctcattattagaatgaatttcttcaatattatcaaaagattgaatgatgccgtctttatccacatatttttcttgccatagagctttatgtataataacttgttcaatgctactgttgttaatttcttttataaacttgtcagcagagcttttccaaagctcatctgtcttgtctacaaattgttttccttttaaatctgtcactaaatttgaacgagtgaattcatcagaataagtaaaataactttctccacgtttcataattcttaaacgttcagataacaagtcgatgattaagacttgcgcttcggtttctcttacgtttttaaaaaacaatttatttaaatcgttatacacacatcttttttgaaagtttgactctaaagaaattcgatgtatggacatattcatggaattcgatgctagcgatataatgttagttctagcaaaataactatttatttcataatcatgatcaaacatagcaaacggatctctagaaacgcagcttcctagaatatctatctttttattcaaatcaattaacaactcctattcagtgtaaacctgtcctatttttaaacacatataaaaaatatatacgaataaggataatgatgtcaatgtaaaataggtatattttcattcatctatttcctttttactagaataaaagcttaggaaattattgttatttattcctttaatcaagaagaaaaaactgtctgagacatttcattacaaaacaaaggtctatcactacgtaaatagagcataaaggaagatttatacttatattggaagaaagaaaaaaagtagtgtgctataatataactcatggaatactatccatgatctgaggcatagaaagaggagaaaaaaatgatagatatatataccaatatcttgccaaatgtgagcagtggtcccaaaagtgtagaagaatttttagaaatggcaaatgtattagtgaaacaaggagtaacagaagtcgtagcagcacctctttatgacggaaaagattccagctatagagaaggtgtcgatcttgcgaatgaatggttaagaaaatcttctatttcgttaaaagttttaccaggtcaaaaagtaattgcctctacccagatgattttatcaaacgaagagtattatatgatgacaataaatgaaaatgaaaaatatatgtttctagagattccgcaagatgtggaaattgaagtgttagaaagtattgcatacgagcttcagttaaaaggaatcgtgcctgttttaaatgagcctgagtgccattcattatttgtggagaatcctgcgcatttgtacaagctcgtaaaaaatggagcagtcgttcagctgtctgcacaaagtgtgctgggcggcaacggcagtaaagctaaaaaagcagcttatcagttcattaatcacggattagcacacgttattgcatcaggtgtgaatcgtgaaaattaccagcagtacggcctgcaaaaagcttattcagcaatttctaaaaaatacggcaacagcaagctctatcattttatggaaaatgcagaggctattgcgagcgggaaggctgtctataaacaagagcctgaacgcatcaaaaaaacaaaatttctaggaatcttttaacttttccctttgtaccctgattaacttctgtttaatcagggtatttgcatacaaagacctatttcagtccctgcttttatcatcattatttggagttattttacaaattttgtttgcgttttcacaaagattaatagtaaaatattgttagttaagtgggtaacaggaaagtacgcggttttccggggttcgtggtggtaaatgtcgagaagaatacatagtgtataatgccgaatcgtcgtagaatatatttatatcgatgtagaagatttgccaggactaaagaacgtagtcctggcaaatcttctagacctaagcgtctgccgctccccttgcggggttagcgtcattcgcataggtgaacctttgagtgagtattcggtgaagagaaaatcacgttctctgatgaaagatgattgtgattagacgaagtaagatgtagatagaatgcagggagggaaataaagtgattgatattcatacgtacatattgcctaatatcgatagcggacctgaggaagtagacggctttttgaagatggcacgttcgttagcagatcaaggcgttcagtccgtggtcgccactccgctttatgatagcgatcaagagtttatgaaacaccatttatttctctacgtaaatgcagccaatgaattgctcacgaattcatatattcctcttcaagtattaccaggtcagcttgtccctttatcgcctcagcttctgcgaaactatgagcgaaatcagcttcttacgcttaatcacaccgataaatatttgtttctttcactgcctgaatctgatgtctcaccttattttgaaaagatactgtatgatcttcttacaaaaggcgttgtgcctattctgcgttcaccagaatgtcatccaatgttccgagatcaccctgagcgtttgtatgagcttgttaaaaaaggcgtgctcgtccagctaagcgccgctagtattctcggtttaaacggaaaaaaagaaagaaaagcagcgtttacgttgattaaataccgcttagcccacgtgattgcctctggcgttcatgcccgcaattaccacgactattcactttcaaaagcgtatgattacatttccgatatgtacggtgcgtcagaactttatttttttattgaaaatgcagaagccattatcgacggtcgtccggtccaccagttagagcctgagccgatgaaaaagtttagtttatttaaattatttagctaaaaacaagggacttttccataaaaacgggaaagtcccttgttttatctttctctcattgtggtatggaatagaaacaaagttaaagaaaggaaggctgaatatgataaaaactacagctggaaaagcagctatgtccgtgttaaaagaatggaatatcgatcacattttcggtatgccgggagattcaatcaatcattttatggacaacttgcgcagtgaaaaagacgaaattgaatttattcaagtccgtcacgaggaagtaggtgcacttgcggcatcttcttacgctaaaattacaggcaaaatcggcgtatgtctgtcaattggggggccgggtgcgattcatttgttaaatggtttgtatgatgccaaagcagacggagcaccggtgttagtactagccggacaggtgcctcgtgcaaagcttggcaacgaatcgtttcaagaagtgaacttagaacgtgtttttgacgatgtatcggtatttaatcaccgagtggactcgcctgaatcgtttccgcatctgctgcagcaagcgattcgaacggcttacgcggaaaaaggcgtcgccgtattagtcattcccgatgatattccgtcttcaacgattaaaattgatgaaaaaacgccaattgccaatgtatcaaaatcgatttctcacagcgacccagaagatgtagctaaagcgcttctagcgattaaatatgctaaaaaaccggttattttagcaggaacgggtgcaaagcacgcgaagcttgagttagcccagtttgcggagaaaattgcggctccggttatttttacgcttcccgctaaaggaatactgcctgatcatcatccttataacctagggcagctcgggcagcttgggacgaagcctgcgtatgaagcaatggaagaaaccgatttgttaattatgattgggacttcgtatccataccgtgagtttttaccagatggagtcgaagcaatacagctggactcggatgccacacaaatcggcaggcgctatcctgtatcaatcggcttagtcggagactctaaaacgacgctgtcacagcttacgcataatttagattatcaagaaaaccgccgttttttagaagagtgtcaagttaatatggaaaactggtggaaacacgtagaaaaagaagaaaatgaagtgagcacgccaatcaagcctcagcaagtcattcctaagcttcaaaaaatcgttgatgatgacgcgattgtatctgttgatgtagggaacgtgacggtatggatggcgagacatttccgcatgacgaatcaaaaatttgtagtttccagctggctggcaacaatgggctgcggacttccggctgcgattgcaggaaagcttgcccatcctgaaaaacaatcggtagccgtatgcggtgacggaggctttacgatggtgatgcaagattttgtaacggctgtgaagtataagctgccgatcgttgtagtggtgctgaacaacagtgaaatcgggatgattaaatatgaacaagcgcttcaaggtcacttagattatcaaacgcagcttggcgaaatgaactttgcgaagttcgctgaatcgtgcggaggaattggttaccgagttgaaaaatacgaagagctggaaacagcttttgaaaaagcagcgcttgcgaatgtccctgttgtgattgatgtggtcgtagcagatgaaccgccgcttccaggcaaaatttcatttggacaagcggccaattattcgaagcatatgatgaaaaagttcttcaaagaacatgaggttgaaatgccgccgcttcgcaaaggactaagcagaatgctttaatcagtgactctccttacaggagagtctttttaggagggatattatgggagtgtttgaaatcattttacttatttttggcgctgtaataatgcttgtgattgtagtgcctgttattattgctgttattctttggatgaaagatgaaaaacaagaagagcattcggttttgagaaattacccgctgctcgggaaaatgcgctatatttttgagaaaatggggcctgaactgcgtcagtatttattttcaaataataacgaaggcaagccattttctagaaatcaatatgaacaaaccatcaagtcaggcaagtacctcaaccgaatgatggggtttggctcagagcgtgattttaacgaacctggctattatattcgaaacgcggtgtttccaaagcagcgcgatgaaatgaaagtggataataaacaaaaaattaaaacaaaagtatataaaatggacgcggataacttattcagccgaagagagcatcgagaagaaaaagaagcggatccgttttatttgcgggatgaagatgcggttgttatagggccttcatgcaaaaagccttttgttgcaaaaggattaatcggtcaatccggcatgagctttggagcgcttggtgaccatgcgattaccgctttatcactaggattaggacgagcaggcggcacgtggatgaacacgggagaaggcggattgtcaccgtatcatttaaaaggaaacgtcgatatcatttttcaaattggtcccgggctttttggcgtgcggacaaaagaaggcgaattttcatgggaagaatttaaaaagaaaagtgaaatgaagcaaatcaaagcgtttgaaattaagctggcgcaaggagccaaaacgcgaggcggtcacgtagatggttcaaaagtaacggaagaaatcgccaagatccgcaacttgaagccaggagaatcggtagacagtccaaaccgttttaaagagtttgcgtcatatcctgaaatgtttaagtttatcgaaaagcttcgagatataggcggcaagccagtaggcattaaaatggtcgtcggaaacacaaatgatcttgaagaaatggcagcgtatatgaaagagacgggaagcggtcctgactttattacgatcgacggagcagaaggcggaacgggcgcatcgtttcaagaattagcggacggagccggcgtacctttgttttcaggactgccttttgtggatgaactgcttagaaaatatggcgttcgtgatgaagtgaagctgtttgcatcgggcaagctgttaacggctgacaaagttgcaacggctttatcgctgggtgctgactgcgtcaatattgccagaggctttatgttttctgttggctgtattcaagcggaggtttgccacaacaataggtgcccagtcggtgtagccacaacagatccaaagctgcaaaaagcgcttattattgaagaaaaatcgtaccgcgtgtgcaactacgtgctttcgcttcgtgaaggattgtttaatttagcagcggcagccggtattgattccccgacgaagttttcaaaaaaacacgtggtgttcaaaaacagcagcggacaattagctgatatttctgtaaaagaaaagatgtacgtataaaaaaagctgccggttggcagcttttttattttcttcgctgaagcaaatgcaggcaaaactctaagtctttttgaagatgttcttgcattaacgcttcagctttttcagcattgcgttctttaatggcattataaatgtcttcatgttcgtccattaaaaacggacggttgtaaaatacgactgtatgacggaataagtaaatgatggactgcatgcggtcgatgatattaatcattacgtcattgttgctcgcgttcacaatgatagcgtgaaaatgttcattcgcgctcataatttcttcaaaggagccgtttcttccggtgtctacgcattcctttaattcttctaattctttgtcagataaaaaagttgcggcagctttagaagctgagccttctagcagcattcgcactttaaacaagttgcgcagatctttttctgtcggcgacaccactttttttcgaacgatcagtccttcatattctaagcgtctgatggaatcacgaatcggcgttcggctgaatccaagctcgctcgctaatttttcttcaacgatttttgtaccgccttcaagttcaccgtttaaaattttatctcgaatcatctcataagaagggtgatgagacgaacgagacccttgatttcttaacataatctgcttcacctctagcattcgacacgaggaaatctcgtctctttctctctttatttttgatcattttgtacgcatatacccaaatcatactataacttatgagttcttgggacgtaaagtttcgtttttagaaataaatagctgtatttaatgatcgtgttagcgtttgtgattgcaggctgaatccgtgcagcactgggttcagtaacagtggcgatgacaacagcagtaagtattgcagcgcctatcgcagcaacgatgccaaacgggagcccggagctattagtactagcaacaggcccaggttccgttatgttatcgcacgtaaatgattcttgcatttgcagcgtttgcgatggtcttattctaaaaatttttcattgaacacaagataaattcgaaatatttaaaatatttagaaaaaaggactagattttccttgttttgatagtatagaatagttataaagtagcagaagggggcagatgtatgacaagtgataaaaattatcgaattggtttgacgacaaaagcattgattccggtgaatgatcctattcatcgcacgaaggtgctggatgaaacaggagaatacatgtcggaaaaaacatgcaagcaattattagaagaggcatgtattcaagaattaagtacatttaacggctccatcgccgcagttcgaaaaatgtttccgtacaaacagcttacaccgcttgtaataaaccgctcaaaagccgttattgcatttcctacaatgtcaccaaatgactatcattgcacatggatttttgcttctcatgtgcatacttcgcaaacgcttgcttcaattgattcatcctctacacttatttatttcaaagacggaacctccatcccggtgaaactctcttattatagtttagaaaaaaagttagcgagagcggctgtggttcgaaactattgtttggaaaatccgattttctctgcgtaatttgtttgttttaccaaacagacttgccgtacatacgtgtattattttgcaaaaagtatgttaaagaggaagctattcacatgcttccccctttctcctactcttgcagaagtgataattttagcttcttacgagctgcttttccccaattcttaacagctcctgtagatacttggtacttatatgcaatgtctttgtaggagtaaccttcaagtaaatgttcaagtacatagattttttctcgcctagttagatgttcgatatgctgcccaatgatttcagcttctagcgggactggaagagcgggatcttcgcttaacgaaagcaggttctgctcagcgggtgtttcgcgttcttcgtataaaatggtgccttttaaatgagaaaggatggtaccgcgcacggttgtgtaggcataagcggaaaaagatcctttgctttcatcaaatttttggtacgctcgccataaaccaatcaaagcaatttgataatattcgtcatagtctttgtaaatatgaaattttttaatcatcgacacaattaatggatgaaaagatgaagcgatttgatcaaacgagcttttttgcatctagcattccttttcaaaaacgcgcttttgctgtattccgccggtatctctactgtacaagggggaggtaacatgtgcgaatgaacgtacattatgttttcttttcaagaaacgtgacgtaatttccccggaaacttcacgtttcgctagaaaatatgcgaagtatacgtgtatttgtagagattttacgtacgaaaggccccccattccaaattctactaatctataattatgtttatatcgatcgatgtagcaactctagcataaccgctctttggttatgctagagttgctagacctaagcggcagtcagcctcccttgcgggtttgcgcctgccgcataggtgaacctttttgggcaaattcagtaaagtatttttgtgtttgtttagttgttttattgaatgtaagtttgatagatggaatatatttggtttttaaaaaatgggtaaaggggagattgaatgaaggcgatggttggggtaaatgtggcggcggctgttttatgcggggcggtgatgtatgcggggacgcagcactggcaggagcaaacggaagcgcaggcaagtgaagtaaaaactgctgttgtacataaagaaaaacagttttctgatgtatctgcttatacaaaaaatcttccagactttatcacaaagcaaatcgagtcatctatcgaaaataaaaaacctttgactcttttgcttgctacatcagcaaacgaatcaggatggcctgcccacttaaaaaaggagctagaaaaaacatatggaagcgatgtgtttacggtcaaaacgctctcatacggtaatcagacaacagatgagcttttatcttcacatattgccggtcaaattgatgaacttcagccaaatattattctatttgaggcacctcttaaaaatgattatcagcagctcacgctagatgaaactcttaaaaataccaacgaactcattcatcagcttaaagacttgaaaaaaactcttataatccagccgtcacagccttacatttcacaaactgagtcttatgaagaaggcgtagaagccattcgaggagtctcggaagaaaattgggtgcattatcttaatcactcgcttatttggccatttcatataggagagtatattcataaaaacgacgggcgtttaacaaagaagggaggtgaagtgtggggaagttatttggtaaactggtttactggtaaataaaaaaattgatgtatttcaaggctcctttggttggtgaatcagtatggagctgtggagtaagtaaagttcaataaagtcccctactgattgagtagagaacttaattagattgacttcttatttaactttttttaaatgccggcttgctctgcttttataataataagagccggtacttgggcatttatagagtgtaataccgaaaaattgtaagggtgttttaattcgttttaaagaataagataatggcattttaatcctccgtgacaataaaatgtttaatattactaattttgagttaattatacaaaaaaatagtctgttggtaaaccttaataaagaacaattaagaaaaaatgttctttattagaaacttaaagaggaggattttatctagaacaaaagctattttaataccctactagtttactatctctttattaaattaacgtaaaaaaaagataagggttatattatgcgggaatttcctttataatagaacaagttgaaagaagggataatatggatataaatgaaaaatatgatggattacttcctccagaatggatggcccttgttaaagaagcaatggattcaactgtaacgaaggatcaatttaaagagtttcttaaacaaaaatctcaagaaaacataaagatatccaacagcaaaaaaaacattagaatgtaaattctaatgtttttttattattgcattttatttttttttaaaaattctttgatttcttcgctagatacgcctaactgttttgcttcgtacataagttgtagccattctttatctagttctttaccaaatttttttgatacagtattcagcttatccataaaacatgctccttcgttaaaggaaactcagccatcatagtatacaaaccgtagacctgtagttttgcgtcctaacttttcaattagtttgcctttatctttagttaatataagttaaattatattttactacattgaatctgtaaaaacatgtaaaatagagagcttttgagactagaattcagttattctaagtttcctaataaacattacaatccctatgagcaacttttcgtccaaatattttttattgctattaaagcaatggaatcgcatacataccacattcatgttagataacctgacacataagttgaacgattcagaaaattcatatatcttaagtatatctttaaagatgcatagaaaatatatctttgaaacaagcaggtatagacgccaggggaggaatggaagatgcaaaaaaagaaactcgtattgattggaaatggaatggctggagttcgagcgattgaagaagtattgaaggtttcaaacgaagcgtttgaaattacgattttcggaagcgagccgcatccaaactataatcgtattttactatcaaaagtactgcaaggagatacgaatgttgaagacattacgctaaacgattggaactggtatcaagaaaacaatattacattatatacgggcgaaacggttactagtattgattcgataaaaaaagaagtagcgacaaacagcggcagagtagaatcgtatgatgaattaattttagcaacgggctctcttccttttatccttccgattccagggtctgataaaaaaggagttacggcttttcgagatataaaagacacggacgaaatgctgcaggcttctcagcagtataaaaaagcagcggttattggaggcggactgcttggattagaagcagcgcgcggactgttaaatctggggatggacgtatctgtgattcatttagctccgtatttaatggaacgccagcttgatccaacagccggcaaattgcttcaaaacgaattagaaaaacaaggcatgaagtttttgcttgaaaaacaaacggcggaaatcgtcggcgatgaacgagttgaaggattgtcttttaaagacgggacgtttttagaagctgatttagtcgtgatggccgttggaattaaaccaaatgtccagcttgcaaaagaagcgggacttgacgtaaaccgaggaattgttgtgaatgactatatgcaaacggatattccaaacatctacgcggttggagaatgtgcagagcatagaggaatggtatacggactggtggcacctctgtatgaacaaggaaaagcattagcaaaagcgatttgcggggcagaaaaagtgccttatgaaggatcggttctatcaacacagctaaaagtatcaggtgttgaagtgttctccgcaggagacttcacggaagatgaagagaaaaaagcgatcaaagtgttcgatgaacaagacggcatttataaaaagcttgttctgcgaggcaatcaaatcgtaggagccgttctttttggagacagcagcgacggaaatcgactgttttcaatgattcaaaagcaagaagatgtatcggatgtcgcaaaagtttcaattttacagccatctggcggtaacacgggtgaaagcctagtagcaagcatgagcgccgatgatattatttgcggctgtaacggcgtaacaaaaggtacgattgtggaagctatccaaaaacaaggatgctcatcggttgatgaaatcaaagcatgtacaagtgcctctcgctcctgcggaggatgtaagccgcttgtagcggaagtgcttcagcatactcttggcgctgactttgacgcggcggctcaaaaagaggcgatttgcggctgtacgactctgtcacgagatgaagttgtcgaagagattaaagcaaaaggcctttcacatacgcgtgaagttatgaatgtactcgggtggaataatgaagaaggctgttcaaaatgccgtccggcgctgaattattatttgggcatggtgaatccgaccggatacgttgatgaacgcgaatcgagatttgtgaatgagcgcatgcacgcaaatattcaaaaagacggcacctattctgttgttcctcgcatgtacggaggcgtcacaaatgcagaagatttacgaaaaattgcagatgttgttgataaatatgaaattccgctcgtaaaagtgacgggtgggcagcgtcttgatttgtttggtgttaaaaaagaagatttgcctagcgtatgggaagagttagatatgccttctggctacgcgtacggtaagtcgctgcggacggtgaaaacatgcgtcggcgaacagttttgccgttttggcacgcaggattcaatgggcgttggaattgcgcttgagaaaaaatttgaaggattatggacgcctcataaagtaaaaatggctgtatctgcttgtccgagaagctgtgctgagtcaggtattaaagatattggctttattggaattgacggcggctgggaaatttacgtgggcggaaatggaggtacgcatcttcgcggcggagatttgttgtataaagtaaaaacagacgaagaattgatggacatcacaggagcttatttacagtattaccgagaaacggctaattacttagaacgtacgtctgcatggattgagcgcatgggactttcgcacattcagtcagtgcttgatgacgccgagacgagaagagagctgaatatgcgtatggacgaagcgttatctacgtatcgtgatccttggaaagaaatcgtcgaaagtaaaaagaccaaaaaagagctttttgaaacagttgtcacatcataaaactggggggaaataaagatggtgaataaaaacattacaaaagtatgcgtagggtctattcatgattttccggtaagcctaggtaaaacagtgaaagtaaacggaaaagaaattgcggtgtttaagctatcaagcggaaaaatacgggcaattgaaaatcgctgtccgcataaaggcggggtgctaagtgaaggaatcgtgagcggcgactcggtgttctgtccgatgcacgactggaaaatttgcttgcatgacggcaacgtacaagagcctgacagcggctgtgtagacacgtacgaagcgtctgttgaaggagatttactgtatcttttaattgaagaataagtaccgtggcgcgttgactttcaacgcgccacaaaaattccaggggacacactaaaaggagcgaagcaaaaatgagaacaggaaaagtgtacattgtaggagcgggaccaggagatccagatttactaacaataaaagcagccaaatgtttagaaaaagcagatgttattttatatgaccgattagtgaatcctgttcttcttcagtatgcaaaagaaggagccgaactcgtctactgcgggaaaaagcctggtgatcactgcgtttctcaagaggatattcatgatttgcttgtattctacgcaagaaaaggaaacaccgtcgtccggttaaaaggcggagatccgtttattttcggaagaggcggtgaagaagcagaagtgctcgctcagcatagaattccatttgaaatcgttccgggtattacagcgggcatcgcggcacctgcttatgctggaattcctgtgacgcatcgtgagctgagccgttcgtttgccgttgtgacgggacactgtttgagcggcaagccggaaagtattcgctgggagcatttagccaaaggcgttgatacgcttgcgatttatatgggcgttaaaaacttgccttatatttgccgtcagcttttagacgccggaaaaagcgcgaatacgccggtcgctcttattgaacaaggtacgtcggtttatcagcgcacggttacaggcacgcttggcactatcgtagacacggctgctgaacagcaagtgagtaatcccgcgatgattgtgattggtgaagtggtgaagcaagcttctgctctttcttggtttttggaaaaaacagaagaaaaagtatgcgtctaagctgaataaaaggaggaaacactttgtttaagaattcactgcagtcaatgaatgagttagcccgtgaaaagacgaagcttgttaatgatcatttgccgagttatttactgctagcagtgctagcgggtgcttacgtggggcttggcgttatattagctctatcggtaggagcgcctttagcttctgcttctttaccggtcgtttctcttgtgatggggttatcttttgctgttgctcttctgcttgtcgtatttgcaggagccgaattgtttacggggaatcatatggtttatacggtcagtacgctatcgggagtcaccacatggaaagatacgtttaaaaactggacgtggtgttttatcggaaatgcgataggtgcatttgggctttgtttgttaattaccggcaccggtttgtttaaaggaattgaaccgaaccatttacttatggtgctggcagctaaaaaaatgaatttgccggtcagtgaattgttttttcgcggcattctttgcaactggcttgtttgcctggcaatttggacggctgcacgcactaaaagcgatgcggcaaagatcatgcttattttttggatgctgtttgcatttgttgcttcaggatacgagcacagcgtggcaaatatgacgtttcttggtctagctttattgcttccgcatcctgatgcgatttcggctgctggactatttcataatttaattcccgttacgctcggaaacatcgtagggggaggattgtttgtgggaagcatttactggttcgtgaacgctaggcagctaaaagaagctaaaaaacagccggctgctctctcagctgacttggattctgctaaactgtctaaatagcaaaaaaaccgctctttgtaccatatagtctgctttttaaagctatcatcacggtattttagagcggtttcttctatataatataaactgcttaaagcgtattcacatctatacgtatcaaacaagcagtatcgttcttcattttatagaaacaggaagtctgtaagaattgaatcggacagattctgttgaaatgaatgtgtgagggtgtaggtatcatcgaagaggcagagggcatcttagaattttaatgttgtttggcattttatgctctttttgagcgtccttaaagcagttgtacattgctttgctgcctgaatgattagcggagtgaatcgtaattcgatcggcatataaatgatgctttaccataaaatgcacgagcattaatccattccgtgtcttgctcagtaaatcgtgatcgagtgataaatgttcaacatcgaatgatcttagcagatcaatacattcatcaatcgtttcggctaaaacatgaccgtcagggcatttgcgatagtcgtctagaaaaacattgattttcatgactgattctcccttccttgccttgtatttagtgtaacatacataatgtcatatacctacctaagtctattcgacacattttactgcattccttcttaaataggggtaaaaacacgaatttttatcattatttgcatatttacggcgaataaacagggaataaggaaagagatgtcgaacgaaaagtgaatagataaacagtttaaactggaaattaactttttttatttcgcgacctttgtgtaagaaggtcatttcaatcccaggtttgataagggatggaacggaattaaccaataaaagattgtgagaaaaaactataatttgcgattttttaaaaataaattggaaatttctctttacgaaaaagatgtttgggacgtataatttgatttaaggattttttggaacatagtatgacaatatgacaaaaaagaaaagtaaggtgaatagaatgggtaagttatttagtatcggtgaagtattaattgatatgattccagctcaaaaaggtcttcaattaaaagaagtggaatcgtttacgcgtgtgccaggcggagcgccggcaaacgttgcagcagttgttgctacatacggtaatgagtcagcgcttattacaaaagttggagaagatgcgtttggagactttctagtagatacgattcgtgaagtaggagtaggtactgatatggtctatcgtacagaagaagcaaacacagctttagctttcgtttccctgcgtgaagacggagaaagagatttcagcttttatcgtaatccttcagcagatttattgctaactgaagacgaaattaaccctgattggtttgcaagcaacgatgttcttcacttctgttcggttgatttagttgaaagccctatgaaatacgctcatatgaaagcgattaaaagcatgaaagaaaaaggcggagttatcagctttgatccaaatgtacgtcttccgctgtggaaagaccatgagctatgccgtcaaacgattttagaatttattccacaagcgcacattgtcaaaatttcagacgacgagctatcgtttatcacaggcattgaagatgaacagcaagcgattcagtctctatttacaggcgacgttcaagtagttgtgttcacaaaaggtgcagaaggcgcaacgctttatacaaaacaagctgtctatgaatcaaacggttacaaagtagcagttgttgatacaacaggtgcaggagatgcatttattggcggattcctttatcagctattaagccgcgaagtgtcacaagaaaacttaacggctattcttgactctgaccacgacgctattttgcgctttgcaaatgcaagcggtgccttaacgacaactggaaaaggtgcgatcagttcaattccagccaaagaagtagtagagcaattttgcaagcctgtagctaactaaaatgaaaaggctttatctcttcttattttcaatcagcagaggcgctagtttctgctgattgcagatcagataagagggagaaacaggctgcggagcaataagaaaaaaaatttttctgcttttaaaaaataatcaaaaaaatttctagctaaataataaatgttcgtgttagtataatacgagcagcaagaaatagcagttttaccaccatttatgaaaacgttatatatttttatcgatgtagaaaatttggtaggactaaagagcagtcctatcaaattttctagacctaagcggatgctgccccccttgcggggtaggcatcatccgcttaggtgaacctttgggggaatattcagggggaataagcgcgtaacccttggtgaaagaaaggcagtaagttattacgtactacgtacatagattagaaataggaaagtaggttaagagaaagatggatattttgctaggtgttcttccttccgttgcgtggggaagcatgattttagttagtatgaagatgggcggtggaccttacagtcaaacgctgggaacaattattggagctttgattctttcatttgttcagtttatgattgtgcagccggtgttaacgccaacgctcgttattgtcggaattgtttcaggtttgttctggtcagtaggtcaaagcaatcagtttaaaagtgttccataccttggggtttcaaagtcaatgccgatttcaacgggtatgcaattagtatcaacagctctttttggtgttattgtatttaaagaatggtcaacgcttcaaacgattgtacttggatctattgcgattcttttaatactagcaggcgttgtgctttcttcattagatggtaaaaaagaaggggcacaaggggctccgggacaaacgaaaaaaggagttatcactcttatcatttcaagtcttggattcttagtttacgtagttatcgcacgtatcttcaacgtagacgcatgggcagctttattcccgcaagcaatcggtatgttaattggcggtttaatcattacatacaaacataagccatttaacaaatatacgattcgtaatatcttaccaggtctaatctgggcatctggaaacatgttcttattcttatctcaatcaagactaggcgtagcaacaagcttttcattatcgcaaatgggtattgttatttctatctttggcggtattgtcttcttgggagaaaagaaaacaaagcgtcaattattttatgtatctcttgcgagtgtactgattatttcaggcggtatctgtatcggcctcgcaaaagcacacgcttaatgtatcgatgtagaaaaacccccatggctcgagtgcagccatgggggtttttctagacctaagggtttgaggcaccccttgcgggggagcctcaaacccttagtcaaagtcaagatcaaaaccttagtgctcttctaaatttcaaagctgtatgttcctgttgagggtttctcgttcttaaggctgaatgtttttcattctttgttaggaagctgtttggtgtgaaatggcttatagtaggagaaaaggatggagggaaggctatgattaagagtatttatgagacgcatgtgcaggtgcggagtttggaggattcgattgagttttatagacgtcttgggctgacgtttgttcataaaattgaagagaggcgctgtgcttttttctttgtaggagaacaaaagcagatgcttgggctttgggaaacagatgaaaaagagctgaaaagaagtcattttgcttttggaattgaagcagcagatattcatgaagcgttaacgtggctgcgttcaaaaggtattgaaccggaagagacttcgtttggaaagccgcaaacagagccgattgttcatacgtggatgccggcagcatgcgtgtattttaatgaccctgaccgcaaccgcttggaattaattacgcttttggatgataagcccgttgtatctaagggttttccatatttaagtgaatggaacaagaaacagcagtgaaaactgctgttttttttgtgtgtatcataaacgtatgattgacataataataaacatataatatatttgtttataaattaataaacaaaatagaaaggtgtctatttaaatggtaaacgatttgttttgggaatcatcttttgaagatatgaagaaagggtacggggaaagcgaagatcactaccactgcttactgtgcggtgaaagcattgaaaaaggcattatttatccggtggaaggtgttttttatgaagccaaacgttatatgaagcttcatgtggaacagcagcacgggtctgtgttccaacatttaatcgagctagataaagatgtaacgggtctgtctgatcatcaaaaaaatttagtgaagttttttaaggaaggaaaaagcgacagtgatattcaaaaagaaatgggaattggcagttcatcgaccattcggaaccaccgctttacgttaaagaaaaaagagcgtcaggcaaaagtgtttttaacgctgatggaactgttaaacgacggggaagaagagaaggcggtacccgtaacaaatacggcgcctagaagaagtcagcgctacagcgtcagcgatgaagaacgtgaaaaaattttagcgaagaattttccgcaaggtttaaacggacctcttcgtacttttcacttgcaagaaaaacaccgtcttgttgttcttgaagaattaagcgggcattttgattttggaacaacgtatacggaaaaagaagtgaacgataggttaacacctttttatgatgactacgccgtgctgcgacgctatttaattgagtacggttttttagagcgcagcgcagacggaagcagctactggagaaaaggagagacagagatgagtatggactcaaaagactataaaaaacaaatgaagcagctagcgaaagaagtaaaaacagaaggcggcgtgtatcaaattaaaaaccttcacaacgataagatttacattggctctacgcctaacatcaaaacgttaaacggcgtaaagttcacgttaaagacgaacactcatcaaaataaagagcttcaaaacgagtggaatacgtacggggcggatgctttttcaattgagatgctggaaacgattaaaagagaagaagaaaaagcactttcaaaaaaggatttgctgaaactggaagcgaaatggttagagaagctgcagccttacggcgaaaaaggctatcattcgccgaaagctgatacaaaggagaaataggtgtgaagaatcaagatgtgaaaagtgaagtagtggaatcagaaaaatccgtcagtaagctgatgcttgtgtttttgattccgctcatgttaagtaatgctatgcagtcagttgggcagctggcggggagtattattgtcggaagagcgcttggagttgacgcgttagccgctatttccgctttttttcctctgttttttctgctcgtgtcgttttcgattggaattggttcaggaagttccattttaattgggcaagcgtacggggcacaaaatgaaaagcgagtcaaagaaattatcggtaccacgctcacgtttacgtttttagtcgggattgtgcttgctgttttgggaagcatatttgctccggatattcttcggatcatgggaacgccggctaatattattgacgtaacggttcactatgcgcgcattttgtttgtggcgattcctgttttgtttttatactttgtttatacgacgtttatgcgcggaaccggagactctaaaacgcctttttactttttagttgtgagtacggtcttaaacatcattttccttccgattttaatttttggatggatcggagtgccaaagcttggcgtgtacggcgctgcgtacgcaacagtgttttcaaccgtattaacgttcattattatgattgtttatttgcgcaagaaaaatcatccgttaaagtttgactcatctatttcattaaaaatggacggaacgcttttaaagctgcttatgcgtttagggattccagctagtatcaatatgattttagtttctctttctgaaattgcggttattacgtttgtaaacggatttggctcagacgctacagcagcgtacggagcggtgaaccaagtggcaagctatgtacaaatgccggcaatcagcttaggaattgcggtttctatttttgcggcgcagtcgattggcgccaataaatttgagcgtttaaaagaagttattcgctctggaattatgctgaattacgttattggcagcgtattgattttacttatttatctcttttctaatcaaattttagcgctgtttttaacaagtcagcacacgctccatattgccgaagagctgttagtgataacactttggagctatttgattttcggtcatgcgcaaattattaccgccacgatgcgagcaagcggtacggtgctttggcctacggtatttagcattatggctatttggtgtgtggaagtgcccatagcctacgtgttatcgcagtttacatctcttgcgattaaagggatttggattggatatccagcggcatttgtggtcagcttaatcctgcagtacagctattatcaatttgtatggaagaaaaagaaaattgaacgtcttgtcggataaaaaacgagcggaaacgctcgttttttatttttcctaattaaaacacccttagctaagagttttaataggatagtgcatataactttttgatgaaaagagggtatgacactatgagtaaatctggatttgtgccggataattcaaatattaaaaaaagctcaggaacgcctaatctgtcagtgaattataagcaaaatgtcctgttcaaacgaaacgaccaaaatatagcgtatcaactaacctcaactcagctgcctgctatgctcggaggtgcttttgttgatttatatatgacgaaagggcatatgagagaaccgcactggcatccaaacgcgtgggaattagatgttgtcgtttcaggtgaagtgcaggtgtctgtcttggaccctgatacaagcagcatgcacaattaccggataaaagaaggcgaagttgtttttataccgatgggctggtggcattggattgagcccctatcggaagaagcgcatcttcatctcttttttaacaatgatcaatttgagtctacagaaggatccgacgtgctgcgcttaacgcctccgatcgtgtttcaaaaagcatacggcgtaagtgcaagtgaagtagcagaagctattgctccgattacggatacggttgtgattgggccgcctaatgatcattcttcttataagaagggctatgaacgtgatgaaaaagttgttattaaaataaatgagaaagttgtgcgtgctgaagataagtagcataaaaaaccattgagcctgcggtcaatggtttttttcgtgaggcgttttttataaaaacagctcgttgcgttctaagtgcttgtacagccgcgttgtgacttgtctttggttccattcgttttggggaaactgctgcttgtatacgtgagaaacggccggtttgtaggttttttgaatccgtttgatatcattaaaggttgcgttggtttcaatgtggtcagcgagcgtaaatacaagagaatgcagctttgcaacattgggaatcgtagctgcttggctgaaaatagctttcgcgacggatagctgtctttcatgcgcagtaaagatgtcttgctcattacgctcctttaaaaaaacaagcgcttcttttccgttcaggcgaatcgatccttttggaaaaacaatgttgctatgttcaaaagcacgtttgtttgtgacgataatgccgcctaatttatttacagcatcgacgactgactgctgatccattttgacataataatcaacaggaagctttgcatacgtttcgacgttctttacgacagcattcatatttccttggtgataaatcgttcgcagtgtttcattgccgagctgagttgaccctggcaagtgggtcatttttattgattcatgctgtttattaacagtcatatatacaaatgacgtattttgagggttctcttgaattaaaagcagggaaaacggttgccctttttttaaattgacgtgtgttttgttaccatgctcaagcggtacatacgtttgatcaacggcagctttcaccgtatgatagcctgcaaatgtgatgctgacaaaactgacgagtaaaaatagtacgagaccgccaatccactctttttttgctttgctgctcatcgtctcacctttttctatcgaagtcgttcgtagtattgccatcttaaaaggggagtaaaacaaatgagcgctatttttattgcttatcttgctttttcttggcataggttttgagttctgtaattaagatcgcttgttcttccacatcgttaaacgcttcaatgccataaagatattcggtgtgctgtttttctttccatacgcaaagtccggtaatatggatgggtttttcatttaaataaaagctgatttttagctgaatttgatggttgaaaacaggtaaatcaagcggcgtgattattttgattccttttggtgaaaggtcgataacggacaaaggacctggcttagaatcgatttctttgttgtcgtatttagcaatggaaaacgttccaacaatgggggtctcaaataaaaagcgaaacggttcttcacgtttgaaatgcatgtatcatcagtccttttcgtaatctaagtttgttaagtaagtattcgatgaaagtccaaaaattcctacacgtttttccccatcgaccatataatgtttatcgatgtagaatatctatcatgaccaaagaccggccatggtagatattctagacctaatcgtaggcgatcccccttgcggggttgatcgcctacgattaggtgaacctttgtgggaggattcaagcggtcttagttatcgattgccgattataactgcttttatagtattggaagttttgtttaaaactttaaatggtgagggaaaggttttgaaaaaagcgctacgctagagttggattgtatgttaaaattaaactttgtgaagtagctgtattacaagtcagcgttccttcaactaattaggaggtgagatgaatgggcactgatgaccccatttcgatgaaggttactgcaaaacaagataggggcaacaaaggtgtatatgttcctctcatttcaacgaaggaaaatactccttaatgcctcaatgatgtgaggtgaaaaatcaatgattaaaacatacttatatgatgatgaaacaaaagaaatggtaacgaatcttgatttaggagacgtgcatgaaaaattgcgcaatcctgataatttgctgtggattgatttgtatgatgtccacggacaagagcttgctcaaattgctaaattattcgattttcacccattggcgattgaagactgcttacacgacagtcctcgcgctaaaatggatgattacgaagactataaatttttcgtttttcacgcgcttcgctataacgaagaaagtgatgacgagattacgacgcttgagttaaatgcctttgtcggatcaaattacgtagtgacgattcataaacataaaatgggctggcttcgcaaaatggatgctgtgtgctcacgctatccaaagtttatgaaccgcggcgccgactttttactgtacgctttgattgatggcatcacggacgaatattttccgattttagaccgaattgacatgcgtattgatgaattagaagatgaaatctacaacaaagaagtgcgcggagtgacggaagagttcttggcgttaaaaagaacgattatcttaatccggcgcgttattctgcctcagcgccgaattttcttaacggtgaatggaaagtggaaattcgacatacgagaagaaaatgttcctttctacattgacttgcttgaccacttagagcgtattgtagactctgctgaaacatttagagacctcgtaaacagtgcacttgatacgtattattctattaccaatgcaacttcatctgaaaagctgaacgtcttaacgctgatttcaacgattatgcttccgctgacgttcgtaaccggattttttgggatgaacgtaccgattccatatcaaaattcccactgggctactgctgttattattgttatgttaattgtgttaacgtggggaatgtggaaatactttaaaaacaaacagcttttataacaaaaaggcacttggccataagccaagcgccctttttctttattttgtcactgtttttgctgttgctttactcgtattgttcgctttgtcttttgcggttacgcttaagactgttttttctttttgctttttaatttttacggagtattgccctttgctgttagcagcagcagagccaatgctttttttgtttactgttaccgttacggtagcatttgattctgctttacccgttacagccgtgctttttgttgtgacagcatttacgcttggtgcagcagggggagttttatcgctcacttttacagtcgtagctttacttgtgttgttggctgcgtctgctgctgttacgctgattgctgtacctgctttttgttttttaattgttatgctgtactgaccttttgcattggcttttgctttgccgatttctttgttgttcactttcgctgcaacagatgcatttgcttctgttgttcctttaatagccgtatccgcgtcgctgactggatttactttaggtgcatttggagcaataacgtcacgaaccgttacttttgcttcttcactttcttgttgttggctgtttgtagccgtgatatacaagatcgtgttttctttttgtttaggaatttttactttgaacgcgccttttgcatcagccttcgccgaagcaatcactttcttagcgctgtttttaacatttaccgtaaaattcgctttagacgttcctgttacatactcatctttattcgttacggcttttaccgctggtttggcaggtgctttttgaacaactgcacgaatgcttgtacttgcttttccgtttgttacaaccacttgtaaaacggtatcagctttttgagctggaatgttcacagagaacgtattttttgcatctgctttagctgtgccaagtgtttttgagccgttcattactttaacagttgaaccgctttgagctttacctgtaacaattttttgcgtgctgacaaatgtatttacctgcgcttgcagctgctgtgcacttaccgcgctgtacgcatttaaacgtccccatcctgatacgtaatcgtagcctggagcagggggttctgctggcctttcttcatcatcgtatacaggagcatctttttcatcaaatttaatatctttagctgtatccgttaggcgtttttcaacgtcttttggctttaagcctgggttttgtgatagcaataatcccgcaacggctgccacgtgaggtgttgccattgatgttccgcttaaataagtgacgttcccgtctggaacaagacttggaatatcagagccaggagctgtaatatctaatccttttccatagtttgagtagtcagatacgatatctaaacggtttgatgcgcctactgatatcgcataggcagatgaagcagggtaagagagctcttccataccgtcatttccacttgcagctacaaccgttacgttatgatcgtatgcgtattttaacgaatattcaagcacgcggctgtaagatccgccaaggcttaagttaatgacttttgcaccatgatcaaccgcgtatttaataccgtacgcaatttgttctgtatctccgcttccagatgcgtctagaattttaaccggtaaaattttagcgtgagaattgatgccggccattgaatagttattgtttgcagaggctgcgataatacctgctacgtgagttccgtgtccgttgtcatcagttgcatttgacgaacgatcaacgtaattatagcctgtttttgtatccacgacgccttttaaatcagctagtgatgaatcgacgcccgtatcggcaacggcaataaccgtatcttttaatttttgaccgtttagtaatttttcaagcgattcatattgaatatcggcatgttgagtaccatcatttttacctgtattgtttaatgaccattgatacggatattgtgaatccatcgaaagggcgtggtactcttgaaccggctcgataaagtcagtttcaggaagtgcttcaatttgttttgccgtcattttaccttgagcagatgacgtgctgaagctttttgcattgctgtcatctaattgaataacaaacatattatcaaaagaagcagctgattgttttaatggattaatagattcaatgcttgctgattttgactgtgcttttgttttgaatgatttagcatttgcaccatcttttaatttaacgatatagcgagtttcagcttttgttgaaacgctgtttgcgctgactaatttagctcttactaatacagacgatacgtttaagtccgttacgtcttttaattttgtctgcgctgctactttttctaagtctttctttaaagcagctggaacggatttataagcgatgctgtataaatcattgattgctttttggtcagcacttgtaatcatatatgtgcttgatgcaccgtttttcgccacatctgtaaatagaccctttagctgaactaaatctttgtatacttgttcgcgcatcgatttatcgataatcattttagagctgataaacggagcggctttgtagtaaagagaagaaaggtcttttccgcttgctgtttttgaaagcacagcgtcgcgaatcgtacgcaaatcttttaaaataccttttccgttttctttttggcttgtacttaattcagccgggcattcttctgcctccatttgagaagggggaagtgaagcgccttcatagctgattgtgtaaggaacttctgttttttcttccggctgtggttctggagaagtcgaaccatcttccgcatcttcttcaatcatgtcgtcttcgcttccataatactcaactttcacataataagggccagtccaagcgattggaaaatcaagctgagcaggctcatctttgtaagagtatcccatataacggtcaaatgccacgttgtttttggcattttcaagactagagtaaaccgtgatgtttacttcatcatcactttgaagcttaattcggtagtgtgaaaactttgctacttcttgcttagaaggattaattttgtaccactgtgcttgttctggttctgtaaatgttccttttgctgctttaccaatgcttaatgttttttcattagcaggaggattgcctgccgcttgtgttttcaataagcctaattggctaaaacacaaggtgaacattaaagcaaaagcaataaaacgataaattgacccttttttcatgttaaacctccaaaaaaatatagtaaaaaacaggaattacatacctattaaaccataaagtttaaaaaattgtaaataattactgttgcttattttagtattttgtcaagttattaatctcgcataagaaatagtgagataagtcctagttgcaaaaagtagaaaaaattggaataataaagattgagcctgtttataagaggcgagagtacgctgaatagggaagaagggaatgagaattatttttcaaagcagaattcactggagaaaatctgatcggtttctttttacctgtgtttataaagagaaaatcgggctatataaataaagattggaaaaattttcagtctaattaagttcatttgtagcatataatacgagctggatttcttttataataaacaaaagcaaagaaagagcaaatggtgaaaaggagtgaaagaagttgtcaaatgtgatgcaacgacaagaaaaacgaatgaagtttgatgccgaacagcttgcaccccttgatattgataaagagacaaagaagttgctaacagaaaaaggattgcccaaagaagcttcaccatttctagagttcgtttcatccaaaggaaagctaacaacgctatgcgaaacatttgagttatcatctcgctaccagcactattggtttttaggaacaacaggcgctggagatccaatttgtcttcatcaaaaaaacggttcagttgtgctgctcgatacgtccaacgatgactgcgagcgcttcgtgaatacaacttttccgcagtttttagcatgcttagatgtgtttgaagagctagtagaagaaacgattcaagctaacggagaatctgcatacttagaaagacacattcctgctgaggtgctgcagcgatgcagaaaacgtatgaatgaaattgatgaagcttgcttagcaccttattctttttggttcaaagaactttctttttaatatagtagaaaaatagacatggccattttggtcatgtctatttagttgtggctgaagggctagatagaataaataaaaatgatagtatataatggatataaattcctttttttgaagagggaggagggtataaatgatttctctatttggattaatgggtgctttctttgttttgctttttagtgcgtcttatgtcttctatagaaagaactcgcctgttcagtatgtgatttcattggtaggtatgttagcaagcatctttttatttttatatagtatattcagaataggaggctttgaaggaatgggagttggagccgtagcagctgctttgtttgtggcgtcgattctgagcttgttcgtcagcgtcctttttaacattataaatagaagagggaaaggtgctgtgtgaaatgggagaaataacctttagagaagcagtgcgggaagatttagatcaaattgttggaatgctcgctgatgatatgctcggaagcaaacgagagcgctacgaattaccgcttccagacttttatgttcaagcatttcaggcaattgatggggatccaaacaatgaactgattgtcgcatgtaaagatagtaaagtaataggtgttcaacaaataacatttacgccccacattgtacgacaaggcggatggagagcaacgattgaaggagttcgaaccgcttcgtcagagcgcgggaaaggggttggatatcagctgattacatgggcgattgaacgagcgaaagaacgtaattgtcagttggtacaattaacaacggacaaggaacggtcagaggctttgcgtttttatcaaaagcttgggttcacagcttctcatgaaggattaaagctccatttgtaattcgctgttaatggttgtatccctgtggtaagaattttttgattaaaatgaattttttcgtttagttcaattgaaacgtggtatataaatagtacagagccgatagaaatttttctaaggctactgtgaaaggtaaatacttagctttatgaagggactggtttagttttggaatacttaacagcaacttcagcaaacgtattacctcacatgaaaagcagatattctgatctgacaattggcactctcgttatgaaccgatatacgtagcgaaagggcctcacaagggcaaatgaacatgaaataattagcatgatatgaaggaaagaacctgtatcagttttgatgcaggttcttttttgtgagatgcggcaggaaatcttatacaaaactttggcaggaatttatagataagatttatagatatggtaaactatttgaaattgtatcggcatgaaaaaggaaggaggagttctatggatacacgcgagctcttttattacatttatcaaaagagtgtcacagcggaaaaacattatttaccatgggcactttctatgctggaacatgaacagaattctttatctctttcgattttagcttctctccgcccatcttataatctctttgaagtagaagattattttcagcgtactttaaaagagctttccttattgaaaccgagtgaacaggaatgtacagattacctgatctatacgcggcttcaaacaattgtgcagcatgaagagagggcgctaacagaagccaatcacttatacaccatgttcattgaactcgactgtccgacgaagttagtaggttggcttgaaattagtgatatgatagatgactatcagtacggagacaattattttaacatcacggatgaaatcatacatacaacaattatgaaaaaagctaaaagtcagctggaacattaccgtaaaaaaatcttcaaatgaatgcactacgaaatttcttataacttatttgacacctaaagtataaaagagtatactaatgttaaacatagtaattatgtcggataagtaggttatggtgctgtgaacaagacttctactaataaagaggagatctagtccaaatcgtacagtccgactttgatgagatgctttcaagcatctttttttttacgcaaaaaaacagccgcagggggctgttatagggcagtaattcttcccttgtaagcatcaatcaaccgctggttatgttcatctgaaccttccatgtttccgcttaaaaagacaggaggcgtgatgccgcggctgagcagtttttggatggctttagataggacatcatttaggatagcgcctccaattacagtagaaccagaagcgaaagaaatgtcttgctgatgaagaagaacgtctccttttggaatatgattattgataacaagatccacgacatcatgaaggtattttccgcttttatgtcgcgaagcccggctcgtggcataagaaggagaggtaagcccgataacaaaggcgcctttttcttttgcaattaaggccacatcaatcggaacgggatttacgcccgacgtagaaatgacaatcatgatatcgcctggtacgatatcttctttttccataaaggtagaggcatagtcgtttttacgctccagctgtgaagagcgcgaagctcctttatgaagcatcagttcttctacaaaaataggatgaatcggcgcaagccctccggaacggtaaaacacttcttccgttaaaatatgagaatgaccgcacccaaataaatgaatgaggtgatgagaagctaattgctgtgagattttctcggctgcggattccattgtctgctgttcatgcgcctccactttagcaagcagttttgttagttcctgtagatataaactagacataaaaaaactccttagttaagatcgtgtcatgttaatcgtaaacttatagcggtctgctcgatacgaagacttcaccacttcaagcggcgtgccgtcttgcaaatacgtatttctttgaatcaatagaacgggtgaatatgaactgattccaagatgcttcacttcggtttcagaagctaaaatggattctaacgtttgattggcttcaccaattttcagcccgagctcttcttcaatatagcgatagagagagttgttaacaatagattctgttaatcctttgactaagttagcggatacatagacgctttcaagcgccattggcacgtcgtcagctaaacgaatacgtttgatttcataaacaggtgcatgaagagaaatgtgcagctgctcggcaattttttctgaagccgcaataatttcaaagctcagcagcttactgcttggcaccattccgcgcgctttcatatcttctgtaaaactcgttaatccaacgagctgctgctccagtttcttttcagatacaaaggtgccgcggcctttttgacggtataaataaccgtcgtttactaaattgttaatcgcttggcgaacggtcattctgctgatttcaaatcgttctgcaaactctcgttcagaaggaagcgaatcctttggttttaactctccgttttcaatttgttttttcaactgttcttcaatttgataataaatcggaagaggtgagcttttatcaatcacttaagttctctcctttatgtaaacctcctcatctaaaaaagacgaggaggtatgttatctatatatgctctaactaataatcagatatctttctttcataaagacggattgattatagccggggcaagctacttggctattctttcaaaggttcactttagctaaagcttcttggtccgcaataattgtaacacagtgatgcttctttaaaatagaagcaggaaagttctctgtgatttctccgttaagcagctgatacatcgcttctgctttggcttccccggagataagcagtaaaatttctttacttttcataatcgattcaattcccattgtaatagcctgagtaggcacttcgtcaagagaattaaagtagcgcgcattcgcttttcgcgttgactcttctaacgtcacaatatgagtaggagaattgaatgacgtaccaggttcgttaaagccaatatgtccgttttggccgattccaagaatctgaaggtcaatgcctccgtgattttgaatcatttcatcgtagcggcggcattcttcttcaggcgtatcagctaggccattaggaacgtgcgtgctgcttacgtcaatatcaatgtgattaaataacgcatctgccatatagtagtgatagctgtttggatcttgcatcttcattccgacatattcatctaagttaaaggaagtaacgtgtttataagacgtgccgtgctccttatgatcttgaattaaacgatcatacaatcctttcggcgtgcctcccgttgcaagtcccagattcatatttggcttttcatgaagtttgctaatcagcatatcagctgcttttgcgctcatttcactgtaatttttcacttggatgatattcattgttagtcctcctttttaaagctcaatgcgcctcggcaaaatgtcatttcaacatctaagttttcatttaacaccacgatatccgcatcttttccaattttgatgcttccttttgtatcgaacagattaagctgttttgctgggttttcggcggtcatttttacgatgtcttctaatgaacagttcgtaaagctcatcgtgtttttaatcgcatcgttcatctttaagatgcttcctgctaacgttccgtctgcaagggtagccgttgtgtcgtttacgtgaacaggctgtcctcctaaatcatacgtaccgttttttagccatttggcacgaagagaatccgtgataagaatcatgcgttcacttgtgatttgatcgtacgcaagcttgaccatttcaggtcggcagtggatgccgtctgtaatcagctctacaaataattcatctctcaaataagcggcgcctaatacacccggctctctatggtgaagaccgcgcatgccgttatataaatgcgtaatatgagaagctcctgcttcgatggcttcaccaacttgatcatatgtgctgtcagaatggccaatagaagcgacgacgtttgtttcttttaaataagaagtaagcgctaagccgtttggctgctccggagctaatgtaacaagtttaatatgtcctccggctgctttttgccattcttgaaacagtgccacattcggatcttgaatgtgagtagggggctgtgcacccgcacgttttggtgaaataaaaggaccttctaagtgaatacctactacttcagcatccgcatttgtttgctcttcgatataagcgcccgcgttgcgaagcgctttttcaaccgcttcattcgactgcgtcatagtggttgccaaaaagcttgttgtaccttcttttgggagcgtgcgtgccattgtttttaatgcttctgccgtaccgtccattgcatccgcattgtaaacgccatgaatatgcacatcaatggcacccggaataactttataggaaggagaaagctcaatgacatggtcttttggctgacgtacgtattgatttatatctccaatttcagtgatttttttatccgttagtttaatatacccattttttaatgtctgattttcactataaacggttacattataaataatgatggatgaatgtgtatccatacatacactcctttgctcgttgtagtaatataagtgtaacgctttttggaatagttgtctagaccagtttagtgattttataaaaatagaaaagtttgtaagggcttttaacattgatatagaaaggtttgtaaaaataaaattggtatagacaactatatattttatgtgctagtatgagtccatgcagtgaaaccgccgtcatttcagctgatgatgtaatcataggccgggatgaatgcggtaacttgtcatccgataaatattgttacgaaaatccttgctcgtaacatcgggttaaatacgttatacaaaggggatagaaacatgctgaattttttacaacgtattggtaaatcgcttatgctgccaatcgcagtattacctgctgcggcattgcttcttcgtttgggccaaaaagacttattggatattccatttatggctcaggcaggagatgcgatttttgcgaatttagcactactgtttgcactcggaattgctgtaggactttcaaaagatggaagcggcgcagcagcacttgccggagtggttggttattttgttctaacaaaaggaactgtagctattgataaagatattaacatgggtgtactcggcggaatcgtctcaggggtaacggctggtctattatacaatcgtttctcagcgattaagctgccagagtggctcggcttctttgcaggaaagcggtttgtaccgattattacttcagtcgttatgcttgcgcttgcaggaatctttggagttatctggccgccgattcaagatcaaattaacaacttaggaacgtggattacaggagcaggagcgcttggcgcaggtatatacggatttttaaaccgtctattgattccaattggcctgcatcacgtgttaaacagcttagtatggtttgtattcggagactatcacggcgtaacgggagacttgaaccgcttctttaaaggcgatccaacggcaggaacattcatgtctggattcttcccggttatgatgtttggtctaccggcagctgcgcttgcgatggttgcagcagctaaaaaagaaaaacgcaaacaagtcagcggtatgttaatcggacttgctgttacctcttttttaacgggaattacagaaccaattgaatttctatttatgttcgtagcaccgttattatacgttattcatgccgttttaacgggaatttcgatggctttagccgttgctctgggtattcacgctggatttggattttcagcaggggccattgatttcttcttaaactatggaatttcacaaaaaccgctgctgttagcgggaattggaattgtgtacgcagtcatttactttgtcgttttctacacgctgatcaaagctttaaatttaaaaacaccgggacgtgaagatgatgaagaagtagatacgtcaaacgaaacggttgtggcaacaggcgataaatatgttgatatggcatcttattttattgaagatttaggcggaaaagaaaatttaaccgtaattgataactgtgcgactcgtcttcgtttacaagtagctgacgctagcaacattaacgaagctgccttaaagcgtcacggagcgagaggaatcatgaagctcagcaaaacaaatgttcaagtaattgttggaacagaagtagagtttgttgcagacgcaatgaatcagttagttaaatacggcacagcatcaacagctgcacctggtgaacaacaacaggctgttcaagcagatgcacacacggagtttgtgttaccgtttgaaggcgtggtaaagccgcttagtgaagtggaagatcaagtattttcacaaaaaatgatgggtgacggctttgcgattgaaccgattgaaggaacgctcgtatcaccgattaacggtgaagtcatgaccgtattcccaacaaaacatgcaattggcttaaaaacagtagaaggaattgaaatcttgattcacgttgggttagatacggtgaatttaaaaggagaaggattcgaagcgcttgttcaagaaggtgacagtgttcaacaaggaacacctcttttacaagtggatatagagtatgttaaaaagcatgcaccgtctattgtgacgccagttgtatttaccaacttgcctggagataaagaagtgaagcttttaaaaacaggctatcaaaagcaaggcacaaaagacgttattacattttaatcaaaagaggctggaacaaacgtgttttagttaaagatccgaatgattcatcgttcggatcttttttcttttcttcataattgaaagaattttgtgttaaaatttagtgtgtttgatacagctagtgcggagcagagagggagtagaacaaatgaaaacagaaacggcattattcatggtaaaggtgacagcatgtttattataggagcattagtcaatggattagcgattgttgtaggaacattaatgggcaagcttgctcaccgcattcctgaaaaagtaagcgtgacggtgatgcaagtgatggggttatccgttatcacgcttggtttgcaaatgggctttaaaagtcatcagtttttaattgtgattttgagcttagccattggagcggttattggtgagttcattgatttagatgaaaagctaaaccttttaggcaatatgattgaacgaaaatttcaatctcagcaaaatgacaagcaaacattcagtatttcacagggctttgtaacaggaacgttaatctttgtcattggagcgatggcgattgtcggggcattagacagcggaatacgcggcgatcacagcatattgtttacaaaagcggtgatggatgggtttatctcattattattaaccactacgcttggaataggcgtcattttctcagcagtgcccgtgtttctatacgaaggcatcattgcgttatttgccacgcaaattaatgcggtcgtgccgcaagatttaatgaatagtatcattgccgaagtcacaggagtaggcggggtgttaattttagcaatagggattaatttattagaaattattaaaattaaagtagctaatttattgccttcaattttaattgcggttgtgattgtagttgtgcagcatacatattttttatgaggaaaaagcttgtgagcatgactcacaagctttttgtgttacagttattagcttatacgttttgatttgcaaatcgttttgaaagttcggcaagcagagcaggtttatcgtctcggtgcatcataacttcaataaatacgagatgttgataattctgttcggccaatattaaagcttcctccagctctatttctgtacgaactttaaaagttatactccggtctttagggcctaacacagcgggaagctcttgataattccacatttgaatatcattatatacttgattttcgccgtgaatcgcacgttctaccgtatagccgtcattattaattagaaaaattaccggtttaatatgttgacgcagcatagttgacagctcttgtgctgtcaattgaaatgaaccgtcgccgataagcaatacgttgcgtcggtttttgtcggcaagctgtgatcctaaaagagcagggagtgtgtagccgatagatccccaaagcggctggccgataaatgttgtgtcttttggcagcggcatggttgctgctccgaaaaaagatgttccttgttccgccaacagtacatcattttcatgaaggaaagcagcaattcgttcaaagaacctttcttgcgttatctcggtttcagctgcagtatatgatttagcagccatctgtgaagtgagagaaagaatatctaaatcttccgcttttctttttgcaattgcactgcttaatgcgtgtaaagaatcaatcattgtagcgggtgcatattttgtgctgttaaactgaacggaaaatgggtgaatatgaataacattgtcctttgaaaattggtgagaaaacccgcctgttattgaatccgttaattttactccaacgctgatgatgcaatctgattgatctatacgtttttgtacataagaagaacttaaatctccgttgtaaacaccgataaactgagggtgtgcttcattaaaagcactctttcccatacttaatgttgcaacaggaaagccggttttctcagcgaattgcagcaaagctttctgtgctccgtatcgaattacttcaaagtctgccagtataacaggccttttggctgaattgattctttcggggacgtctactatcatttgtttcaatgtttcttcgttacttaaaatggcactgtctaataatgagttgtagggtttgctaataggcttatcatatacgtcggttgctaaattaatgtgaacaggccttttgtcagtccagcatgtaagaagtacgcggtcaatttcttgagccgcattttcctgtgtaaggaacgtttgagctacagttacttctttatacatagttgaaaaatgatcgaactttccgtttccaagcgtatggtgaacgtacaaaccattatccattacatttgttgtaggagttcccgtaattttaacgacgggtacacgttcagcgtaagatcctgcaataccgttaacagcacttaattcaccaacgccaaatgttgtaatgagcgcggccattccattaactcttgcatagccatcagcagcataagctgcatttaactcattacaatttccaatccattctatttctttatgatcaatgacttcatctaaaaaagataaattataatcgccaggtacaccaaacatatggtgaacacctaattcggctaaacgatctaataaataatgtccgatcgtatagttgctactcatacttcatcacctcaaaataatatgtcaacgtggttgacttaaatacagtgtagaagaataagtgtttttagtcaagtgtattgacctttagtgctataagtccagaatatagtatactgataagaagatactcagagcgtagagaaagcaggtgacataaatggacgaaaataagaagcagcaaatgaatgatgtgctggctttattttattttgcctataaaacgtttacggaggagccgaatcaaattattcaaaagtatggaattcagcgcgttcatcatcgtattttatttttcattgcgaggtttccgggccttagtgtaaacgagctgttggcattgctagaagtcacaaaacaagcgctgcacggtccaatgaaaaaattggttgaaaaagaattaatgattagtgaagaagcagcgcatgatcgtcgagtaaagcagctgtttttgacggatgaaggacgggaattagaaaaagaattaagtaatcgacagcgtgagcagttatcggctattttttctgaagctggtgaaggtcatgaacaagcgtggttcgatattatggaaaaactatcaaaaactcgttccggctatgaagcatggaatataaaaaaagaaaataagtaaggagaaactagagatatgaaagacaatcaacagattacagctcttattaccgcacaagtggagaagttagcacgtcaattcggctatgactttttatctgaaaaacaagggaatcaaacgctttgtcaaattcttcagcgagatgaagacggatctattttggcaacgccccttagttttcatttacatatgaatgaagacaaaggaacgggagatattatttactaccatgaacaaggagaatttaagcgtcagcaagtgaatgtatatgaagaaaatagccttgtgaacgtgttgttatttatccaagagcggttaaaggtcaatcgatagaagcgattttcctaacatatgcaaggaaaaaagcagggagttccctgctttttttctatgaattgatatagcgcaatcctacgcggttattaaaaatttggttatgatttttgaagacaaaagcgcctgctgcgtgatcaatcaccagctcattgtcgtacacttcttccatttcatcatcaacaataaattctaagccttcaaccgttacaattttttcatagggctgaaggctgcactttgagatgatcttcatttcataaattgtattaacaatatcgcagcttcctcgatcaaaagaaagctgaatcatttgattttgttctacgttccgcaaagcttcttttgcagaaggagtgacgcgtatattcataatgatatcctcctttttctatcctcaaattaaattgtgtaaaatgtatttagaaatactttactcgatttttatatcatcggcaagaaaaaagctttcttatattatttccctttcgaaccggaacaaaacgctgcttttttatcatcttttcataaaggcgtacatagatatcacctgtatatgattaaaggaaaaagagatcaactataaaaaacgccgcttcgtaattcttaggtgtaaatgcttaaaaataggaacatattgtaaaaaaataagaagttaagtcatttacctattttaatagttattgagatagttttgaataattggttttattttcaatatattgggtacttaagtagagtactttgcacacggtattgcaccgaaagacatcggtttatcggactaattattgtcttattttgtcgaagtagtagaatttatggaaacctttccttatcatgtacgaagtgactaacaaaatacataggaggttctggtgtagatgagtgagaaagatcaaaacagaacaacagacgaaacagcggcttcgctagaaacagcgcccgctcccaaaaaagcgccggctaaatggattatcattttagcagctttaattgtaattattggaggagcaattacatttgctacggtatttaaaaaatctcctaagcaattatacttaatttctgaagtgaatacgtatcaaaaaacagctgatgaattagaaacgaagtacagtgaaacgatggcttatcaggaaaaagcaatgaagcagccttctaccacaaatgctactatcaaaggcggctttaacatggattcactttcatatgatccaagctttaaaatgattcaagatcttatcagtaaagctgaaattaaaattaaagcggaacaagatccgaaaaaaagtgaaggatacggttcactggctcttaatatcggcggttcaaaagcgcttgacctagaaggttttcaaacgaaagaaagaataggctttaaagctccgattctagcaaatgaatatttctatttaaacttagacgaatacggacaggtagcgcgtaagttcgatccttcttattctggtcctgaaacgcttgatattaacacaagcaacgtgagtttagaagacttaaagttaacggaaaaagaaaagacctacattgcaaaagagtacggaacgttcatttatgatgagttagacagcgattactttacaaaagaaaaaaatgtggattataaaacaaatggcaaaacgcttcagttaacaagcgtgacgctcaacatgtctgataaagaaacaaaacaatttatggataagcttattgcgaaggtagcaaaagatgacaagcttcataccatctatgcaaatcacgtatctaagctgtttaaatcttcggcagcaacaaatccagaattaaaagatatggcagatccaaaagaattgaaaaaatcagtaaaagaaagccttcaagacttccaaaaagaagcaaaagatacgacttaccctggcggtgttaaatcaactgtgtacgttcaaaatgatgttgtggtagctcgcgatatgaacatgggcgtaaaaaatgcttctaacgataaagggaaacttaacgtagtgactaaaaatattccgtatgaagacaacaaaacggctaagcagtttaaagcagttctagcggatagcactaccgatgatgcgtttacgtttgatatgaaaaataacgtaacaacggaaagtgaaaaacgaaaagaaaatatgtctattcatttgttaacaaaaggttcgaaagatgaagatacgaatatgacgtttaaaatggattccgtgatcaacggtaaaaccgatgcgaagcaaacggctgaccgtacgttctctttagacttaggcaatcaagaagatttagtatttaaaggagaagtaaagcaaaatcaagcaataagtgcttcaaaaggaaaagcagattattcgtttgatattcgtacaaagataggaccaaaagcagatccggcaaacgttacgttaaaaattgactctgcttctcaattaaaaaaatcagcagctattccagagcttgacgcatctaatgcaacaaacgtaaaagatgtaacgcctgaagacatgctgtcgattcaagaaaattttgctaaaaatgttcaaggtctcatgatgaatatgggaaccgctggttactaaaaggtgcaaagcagatgaagatatatttctctttgactctttttacatgtaaagctctattgaaaaatataaaatctctcatactgctaataatgatccctgctctgtttttactcggagcagggatcattattagtcaggccatgcaagatgaggagaaagtcaatcgttttcccgtggcaattgtggataaagatgatactgcacaaacgaagtatgtcatcgaacagctcactgaaggcaagctccgtaagatcatgaaacctctttacacgaatgaacagaaagcaaaacagctgctgcagcaaaataaagtggcagccattgtgacgctcccaaaaggttttagtcatgatattgctcatggggaaaatcagcctttaagcgtcattggaaatagcaacaagccgcttcagtcacagctgtttcgctacgtgatggaaagtgcagcggactatacgtcagccgctcaaagcggtattaatacgattgacgcctttttagaaaaaggaaacgtttctgatgaaaaccggcggacagagtttaaaaagagcttagtgacgtttggtcttcatgtattagatcgaggaagtttatttaatgaacaaatagaaacgagtttctttcagcaggatatgaagcaatattatgtcctgtcttttgctgctttgctgcttatgatttggagctacgggggatggctgcttgctagcgaaacgcagactcctcccgtgctcgcaagaatgaaaacaagaggtgtatcgtttgtccacatttatttagcgcagctgaccgctctgtatgttcttttgctaccggtatccgtcgttttatatggcggtctcattaagggattaaaactgcctgtaacgggtacgtacggagaactttttttggcgataagtggaagtttgtttgcttttttatgcttgtttttactgctgcgcgttctctttttatcacaaaaagcttatcaaataactggcttgctgtttattttgctgagtgcgattttaagtggacatgtcgtgccagtcgtctatttaccagactgggcgagtggttttcagaaagggtcactcaatacccacgttttagagctgttattttatgaatttgatggttataacacaaacgaggcttttctttaccttaagcctattctcattacggcagcaggaagttttgttcttgctgttggctacgtgatgactttgcaaaggcggtggagaaaataatcagtgaaaaaataaagcagctgctgaagcgccctatgcttgttatcatgattttctttttacctttaataggaacgattattagcagctcgtttttagcaaaagtacaaagtgattcaaaaatacctgttgctcttgtcgatcaagatcatagcaaaatgtctaaacaagtgatcaatcgactaaagaaaacaacagaaattcagtttctttttctgaacgaagaacaagcgagaaagcagctggccaaaaataaaattgacagcatttttatgttccctaagggatttcaacaagaagtagaagcggggaattatcaaggagtcattgatttgctcacgctgccttattcagttgccacagaagcggttcgagaagtcgtggcgagtgaagtgacaaggttaacgacaaatgttaaagcggcaaatgaagtgcgttttttatataaagtctataacattcatgcaggaccggatttatggaaagaagcgtatcgttataccgataaccagtggaagccaaagccgctgatgacaattgattacgaggcgcaaggaacgaagcatacgaagcaagggaacgttcaaatgaccggatacgtgccgctatggggattctttacgcttttactttgctgcctcacatcagattggatgattaaagagcggaggcaccttttcaaacgaatgaaaacgatgcaaaaaggactttacggttatattcgaagcgtcagcgctgcttatgctgtgctatacgtttttcaagctctcataagctttgctctatttaaatggctttatagaatagagtcttacggtgtgctgctgtatatgtgtatctatgtgattgtgtgcgttgcttttagcacgtggcttgcaagtgaaagtcagcgagttggatcttattatatgatcagcgttgtcatggtcacaggactcagtataataggagggagctttttcccggtaggagagctttctgcaacgattgaaagaataagtcagtggcttccgcagcatctgcttctgtatcagcatgcactgccgcttacgttcatttggaaagagatagctgtttccattgcatgtatatgtttgtgcgcgtttaaaatagtgtggaatgtgaggagcatcaaatgattgaaattaacaatgttagcaaaacatacggaaaaaaacggtcgttagcaaatgttacgctgaccgtagaaagtggagaagtcattggtcttttaggaccaaacggcgctggtaagtcgacgcttctgtctattttgtctaccattacggctccttcaagcgggaatgtcacgattggaggcttatcgcttaagaaaaatcaaaaagcgattcgagaagtcattggctacgttccacaggacatagcgctgtgggaagagcttagcataaaagaaaacatgaaaatgtggagcaaaatgacttcacgctctctgtcgaatgaacagcttcagtctctttgctcagctgtacggctcgaaggaagatggaaggaaaaagtgaaaaatttatcaggaggcatgaagcgaaagctcaacatagccgtttcacttattcatgaaccgtccgtattgttaatggacgagccgacagtcggaatcgatttgcagtccaagcttgaaatcattcgttatattaaacagctggcggcaaaaggaaagacgattatttatattacccacgatttgaatgaaatcttagacgtgtgtcatcggtttgcggtcttaaaggaaggaaagctggaatttgtcggcacgatggaccaagcgaagaaaaagactggggaagaggcagaagagaacgttgtgtataagctgctgcataattaaagtaaagcaataatgaaaaaagagccgcttcatgaagaagcggctctttctattatgcttgtgtaacttcttgttctggtgaatgactttcaggctgcacgcgttcttcttcaggaagggcacgtacttctacttctttcatttggtgaccgtccatttcttttgcaataaactcgtatccaaaaagtttgaacgattcgctttcctggatatcgatattttgcattagcatccagccgccaattgtatcgatatcgtcgttttcaatttcgatatgaagcacttcgttgacttcttcaagcagtacttttgagttaaagacaaaatgctgatcgctgattttttgaacaagcggcttttcatctgtatcaaactcatctcgaatttctccaacgatttcttctaaaatatcttcaacggtaacgataccagccgtaccgccgtattcgtcaatcaacacagccatatgcgtacgtttcttttgcatcgagcgcaataggtcttgaatcgctacggtttcaattacttgaataataggattcatataaagcttcacactttgcttttttaacgcatcgttaattacgacatcgtttagaatctctttgacgttgactaagccgataatgttatctttgtctccgtcaacggtaacagggtaacgagtgtagcgatcttctacagcaagctttaagaaatcttcaatgctgtcgtcttcagaaacagctgaaatctctgttcttggtaccatgatttcgcgagcaacacggttatcgaattcgaaaatgttgttcacgtacttatattcagactggttaatttccccgcctttaaaactttctgataaaataatgcgcagctcttcttcactgtgcgcaagttcatgctctgaagctggctttaatccaaacattccagttaataaacgggcagaaccatttagcagccaaatgaaggggaacataattttatagaataaaattaacggacgagcaaacaataacgtaactgtttcagctttttgaatcgcaaatgtttttggcgctaattcaccaacgactacgtgaacaaacgttacaagcgcaaatgcgataatgaatgaaagaatatgtgttaaagatgcagcaacacccattttttcaaacaggggttctaaaatcttcgcaacagtcggttctcctaaccaaccgagtcctaaagcagtaatcgtaataccaagctgacacgcagataaatactcatctaagtgtgtcgtcacggttttaaccgcattcgctcctttttttccttcagcaacaagttgatctacccgtgaactacgaagcttcacaattgcaaactctgaagcaacgaaaaaagcagtgagtacaattaaaatcgcaaaaataattaagttaatggttatcaatgaatatacttactttataatgctataaagtaagtaaacacctcctgtaaataataaatttacgacagcagcagcagtaaagagtgcaaaagagtgacgctttctggtgaaagccgattcatcattacttttcgatcctcttcattaagcttttccataagcggtgcaacttcttttaaactgtcgtttagtacgtaaaatttggatgctaattcgtctttggagtggctattctcggattgctctatagaaaatagagaagaaatctcttcaagagaacggccttcgctttttaatttttcaattaagtaaagacgttttagcgcttcttcgttataaaagcgatagttagaagcagagcgttctgcttttaacaacccaatgttggtataatagtcaaccgtgcgtttcgttacatgtgccatctctgcaagttcgccaattttgtatgtcgcaaccccatcagaataccacctcctttaactatgtcaaccatcacgtgatggtttttatctacgtaactatttatcttttatcctatcgtaattaagtatacgcgcgtaagatcaaaaagtttcatttttttattagcattcagtatatctcaaaataaggtagtttgacaaagattttataaaaaaactcgcttatattaagcgagttttttagtaggatgacgtacgataatgtgcatgcgttcatacacatattgaatacgttcagtatattctatgaactcagggctcattggagatagctgatcagcaatacggtgcataatagcagcttcttcttttaacgaatctaaattttgagttcggtcaattcttgctttaaatgttaacgaaatcatgttattcacctcgttgttatgttacttgttatgaggcgctatgtccgtgacttttatcactctagtcaaaggtgataacgtaattatttgatgtttgccggcattttgtgtaggatgattagaaaagggtttttatgggagaatgaaatgaatttaaaacgaatgcaccacgtagccattataggaagtaattatgaacgttcaaaaactttttatgtaaatgtgttaggatgcaagattatagaagaaacatatagaaaagaaagagattcatataagctagatttagaagtagctcctggctttcaaattgagttgttctcgtttcccaatccgccacaacgtccttcaagacctgaagcgtgcggcttacgccatttagcttttgcggttgaaagcgtagaggattccaagcgtgaactagagcagcaagggattgatgtggaacctattagggtagatgaactaacgggaaaaaaattcactttttttgctgatccggacgggttaccgctagagctttatgaagagaaagagggggaataaggagtatgtgcaattatttatttgtatacggaacgcttcttgaaggagaaggtaatcacggattgctgcatcatgcgcgccctattgctaagcaggcaaaaacgaaagggaaattatatgacacaaagcaaggctatcctatgcttgatatcgacagtgaacacattgtgtacggagaagtatatgaagtgaccgatcagcttatgtggaaggctcttgatgaattagaaggatacattcatgaaggtcataaagacaatgaatatgataaagttgtgcaaacggttgaaacggaccaaggtgaatttgaagcggttgtttatgtggcaagcgatcgttcgctgctgcacgaatttatcccgagcggaaactggcgcgtgtggaaagaagatttattagaaggtatgctgtattttgcttatggttcatgtatggataacgatcgttttattaagcacggggtggatcagcatttccaagactgtctcggcagagctgtttttaaaggctatacgcttcgatataaccacgttattcatgacggaggacgtgcagacatggttgaagaaggcggagtcgttgaaggcaaactataccgcgtgccgcctgaagcaattacgtacctgtatggcagagaaggagtagataataacggctatcgtcctgctattatttctgtcgagcatgaaggtaagatggtagatcatgttcttactttttttgtgttaaataaagaaagagaagtcgcacctccggatcactattcgactgaaattattcgaggagcaacaggtgtactcagcgaagaatacgttcagaagctaatagagcaagtccatgcgctaaaaaatagcgatgttgtaaataactaatataaaaagaagcagggacaaaagcagtttagttgaagaaagctccgaacgattactcgttcggagcttttcattgttatggtgaacgcaggcttaatctatttaactgcttctagctgttgattggagggcaaggcgaagactcctgcgggaaaagcggaataggtgagaccccgcaggagcgtaagcgacgaggaggctcaccagccgcccgcggaaagcgaagtcttgcatgaaaatcaacagcggtgtaacaagcagtccagatcattgaccccatttgttcgtctcaagattggatcgattttgttatgtgttgaattagttaaaggaaacagagaattctgtttgaaatacaccgtcttttgataaacggttgatgcctaatttttctttgaaatttccgttgtgatcatgcatatctgcaattccaaaccaaggttcgatgcaaagaaaaggagcgattgtatgattttctgcatcatactttgaccaaataccgacatacgggaaatcattaaactgaacgttaatttgattttcattaaccgccgatttaatcgtaattccgtcaatatgactaaaaattaacgcatcatttgcaaataaatctgcgcttagcggcagctggtgcaaattttctgcagcccctttttcatgaataagagcgtcttttaatacaaattccttcggcgtagtttcagaaggctctatttctaaaaagtaatcagaaatctgctcgttttcacgtaacggaatacgaaaagcagggtgggctccaattgaaaaatacatatcgtctttatcttcatttactaccttccactgaaacgttaatcgattgttttccagacgatagctgatttcaactgcacattcaaacggatatacgtctttaaagcggccgtttgtagcaaattgcagccgtgctgtttcgtttgtttgttcgatcacgctgaaagcagaatcacgtaaaaaaccgtgctgaggcaaagagtatacgcgctgatcaacggtatactgatcattttttaatcggcctacaatcggaaataatacgggcgatactcttccccaataagcggggtcgccgctccacataaactgcaggtctttttctttatgaaatacttctacaacttccgctcctttttcttgaatgctgactttcatttcgctattttctagtacaatcattacaacatctcccaaatcattcttgtacgctagagcagtctcaaacgtactggctttgcttatattatacccttcttggcaaaaaaggtattaatttccctatttttgttcaaattaaatagaaaaaggagggttcaaatatgaatcatgcaacattattgctcattaaatttgcagcggcacttattgcgtttggtataggccttgatttgttttttgatgcaaccatcggagacattatctcctttagcttgctaacgacagttgtgacatatttagtagtggatcgaattgtactgcctcgagtgggcaaccgtgatgccattattgttgaatttgttctaacctatatgagcgtatggatttttggaacattgttattagacagctacgttcaaattgcttggggaagtattatttctgcagctattattacatttgccgaggtttttgttcaccgctacttattcaaccatgttgaaaccagacatacagcgagaacgcgtccggcttttaagcgaaaactagcgtatgacacagaatttgcagaagaacagcatgtagaaaacaaggaaaatccaaaataaaaagaaagctcacttttgagctttcttttttatgtgttaatgcataaaagtcatttcctttaaaggccagtatttcatattgacttctcccgtgattgaagaaatcggtgtgaggccaaaatgtctgccgtctcggctaatgcgtctgttgtcacccagcactaatacgtatccatcgggtatcgtgccgtctggagacagttcggacgtggaaaaattttcagtaaatcgctcgtaagcgggcactttggataaatatttatgaagatgcggttcttttttgactttgttatttatatacagaacatcatctttgtattcaaccgtttctcctggtaagcccacaatacgctttactagaaaatcactgctgtagggagcttgcaaaacaacaatgtcaaagcgctctagcttgctgtgtttgttaataataattcgattgccttcgtgcaaaataggcttcatagaatcgccttttacagtgtagggctgaaaccaatagtgctgaacgacaacagaaagcaaaacggtgccgaggatgacgcttgtgtatgtaagaatttcacgctttatttttttattgaccataatggatgaacaccttcttaacggtaagactgtcaatttaagtttttcatagagatataacagtgttgattgtaccattcagaactaaagttttccatatctatctgtttatgcgtgtatgccaaaaatatgcttggcggaacaaaaaatgaaaagagccgttattcgagagaataacggctcttctttattataactgagcgcgctcagttcgagtagctggttgatttggttcttcttccacaacaggctcaacaggcttatgctgcttgatttcttcttcaagttcagcaattcgcttgtttttctgcttcacttgtcctcttaattgaacaatttttacaaaacttaatgaagcagcaacaactcctccaaacacggccgttgttaagataattaaaataagaggccatttttgtgaaccaaatacatagttaaattgtacaggatcgttgttaattacagctaaaacagcaatgataagagcaaatataagtcctaaaataaaaaagctctgtcctttcataagctgcacttcctttctttacatggtcattacaacttttacagcgtaaccactcattttaagtgtttgctatcttgcttataggtatacgtatccacatttaaacaaaatcaaacattttcttgattatatatatctttcttttaaaacagaatatatcgattggtgtagaaactttgacatgtccaaagacctggtatatcgaatttttggaataaagagctcgcgtatccttttttacttaagcagattaagcagggggagagactttcatttaaatcatatatgtacaaagagacctttatctattaaaggtctcacttttaataaaggggtatataaacgcaagatataaatcagtacagaagctgagactttggcttaattgcattaaattatttcattatctatcgcccggagcagggtggtctacacctttgacatgatgccgatgctggttgtcttcactggtataaaaatcataatagtgaacatgcataccgttgccaatgggaatagcgggaccagagtaggctttgtaatgatgtgtatgtccatcttcaaaaacaacatagccttctgtatagtgaatatggcttccatcctcgctttgaattggaggagacgttacatcgaggcactgatggacatgtcctgacgcaacagaagtgtagtccactgagccatgattatgatgaggaacaaaccctgaaataaaatcatctttgcctatttttttcattttacttccccctacaaattcaatttaaaaaaacggtttaaatcaattttttaaatgagcatctgaatttctctttttagttaaattcaaaaatacatgctattgatatgaataaagaaaaataaatatgacttttgataatcaggatttataaaatgggtagttttcctgtgtgtttgccgtttctacttgataactttcacatacatttattaaggaaggacaagttattataagagaggaagtcagcataatgagttgggaaaataaaaagagtctatgtcaggagtttgcgagaattctaggtggacaaggcagtttagatgaaaatggcgtttgtttggtacaaaagtttcggacgattcgttttaaaattttagggcgtccaacacgctctccattagttactcctcaatttttcacttttgaagatttagatagcaaaggaagagcgctaaatctaggtgaaaccgtgcttttgcaagaagaggtaaatccattattaacggagcttagaaaaagagatattaaggttacggccgttcacaaccattggctatttgaagagccgagagcaatgtatatgcattttgaatccgtagagccaccgttagattttgcacgaaaagtaagagaagcgtttagagtattaaaaggatagaaagcagttttttatagaatcagtttattcttacttactgcttttaaaattagattaataaaactttaaacatatatattatatattggtttataaactgcacttgaatgaacctatcaggttaactgatttttgagcagtgagattattcgagtacttctatccaaataaaaaaagcacgcgttcgccgcgtgctttttttatgtataaatttaaaatgcgtttagggtgttatcgcttaaccactgttttcgttcagctgcatcttcgaataactcatctgcatttgtaaattgagaagcaatgacatattcaattgttgcaagaggagctgttagcaaacgccagtttaatacgattgtattatcttgagtcgtagcgtattcttcacctaactcgccccacttaacagattcaggagcattgtctgctgcttttttaacagattttaaagcttcttggaatttttcacctgcgcggccttggtaccattctgttaatagttgtccaataccttcatttgtttgctgctcgttccagctttcaggtactgtagcaatgaattttgcacggaatgtcatttcagcctttgctacatctccacgaacgatgtttaagcggtattgacgtcctaggtaagggaatttgtctccctcttcaaaagaaccagttttagctgcagaagctgctgctttaggggcctcttttttagctgtttctttttttactgcttctttctttggagcagctggcttttcctcagctggttgtgaaccgtttagttgttttaaaatccatgttgctttgcgtgcgatgattgaacgcacattgttttcattaagacctcttgggataataacttttaccccttctttgtcacaaatttgcaccgtgatatcggttctatttggaacgacttcaattttgtagtcaattgtttgattgcctgtttgatacgtatacataaaatttttcgtactcctttctacaaatcttcattttataagcaaaggtagagtttggtcaaatgaaagaataatcagacagttatcaactgctgttgcagcgccttgcagaatgatatgtattccaatatttagtgggaaagcgccaataataattgcttcaattcttctttagtttttacaaaaacatataaaaatatgccgatactactaatatagattagacattctatgtctttagatggtatagggaatgaaaaataaaaaaagcgtttcaaagtttacatgtgaaatgctatatatgatggttataacacttactgtaattgaagtgacaaattattatcttattatgaaacaagagcaagcagcctcgattatgctagtgattacatttctgtttgcttttctcaccactaccgtgttctattttatcatacgtcgctctataattgcggttgaaaatttaacgaaagtaatgaaaggggtttcgtaagggggatttattgatatttgttcagtataataaactgtaagtattggtttttatgatagctttcatagaaagagataatgaaaattgacacgttataaaagcagttgtatagtgagtacgcaaggcggcagtctgtcttttttaattcttagtaaacttataagttaaataaaatatttaagcactgcataaggagacgaagagatgaaaaatgaattccgtttggcaacaaatgacgatgcagataacttattgaacttaactctacaagcatataagcctattcgagagctaggcattcctttcttagcagctactgctgatcttgcccttgtcaagaaaaatatttctcaaaacctttgctatgtatatgaagaagataaaaaaatcgctgcaactgtctctatacgaatgccttggggagaacatccaggtccgtttgctgttccgcatctttggtggtttgcagtagacccgtcgtttgccaggaaaggcgttggatctaagctgctgcatctagtagaggaagaggtaataaaaaatacgtttaaatcaccaggtgtgtctttaggaacagcaaaagaacatccttggttagttgagatgtatgaacgaaaaggatatgttcaagctaaagaaaagcaccttgcagaaggttatacgaccgtatttctttataaaaaactcaatgagatacactctttgtcgtaaaagatagagaagtgctccaaattaagaaatgtgaaagagtgataaatatgacagatcaattactactaaacaagctaatagacatacgccgtgagctgcaccggtttccagagctttcaatgaaagaatatgaaacaactaaacgtattaaaaagtggttaaagcactatgatatttctatagcggatacattccatttagacgtaggagcagtagcagaaattgtgggaggaaagccgggacctactatcgctattcgagctgatattgatgcactgccaattgaagaaaaaacaaatctgccatttgcttctgaagtgaacggtgttatgcacgcatgcggccatgattttcatacggcttctataatcggagcagccattcttcttaaagagcgtcagcaggagctttgcggcacggttcgatttatctttcagccagccgaagaaacggcttctggggcaaaaatgctagttgaaaaaggtgtgcttgaaggagtggaagcgatatttgggatgcataacaaaccggatcttcctgtaggaaccattggtatcaaaccgggacctttaatggcaagtgttgatcgttttgaaattgaggtcaaaggagtaggaggtcacgcgggtattcctgaaaaaacaatagatccgattactgctgctggtcaaattgtcactagtttacaaaccattgtcagccgtaatctcagcccatttcaaaatgttgttgtcagcataactcaaatccacgggggaagctcgtggaacgtcattcctgacaaagtaacgcttgaaggaacggtgcgtacttttcaagaagaagcaagagaaaaaataccggctcttatgaaacgaactgctgaagggattggtgcagctttcggggcttcagtagacgttaaatggtacccatatcttcctgtagtagacaatgatgatacgctggaaaaactggctattaaagcggcagagggtcttagttatcaagtcgtagaagctgaacaatcgcctggaggagaagattttgccgtatatcagaagcatgtaccaggattttttgtatggatgggtacagctggagaatatgaatggcaccatccttctttttcattaaatgaagaggcattacttgtagcagcttcttattttgctaatctaagctttcattttttgaattcattccattacccgaaaaattaaaatatttttatttttctatttacgcggatgaaattgtttgatagaataaattttaaattaaaaaagttatcacgagtggacgagagatctggctctttgactccacagcaacctacgaatgtaaggtgctcctaccagcaaagcatgtgctttgggtgataaaacgggtgaaaaactcattttgcatcaaagcaaaatgagtttttttatttttctaaaaggagagggttttatgagtcatacagcagttgcagcacatacaggagagaaagcattaaaggaagcagtgaaattattaggaaagcattatcaagtagcttatcgtgaattagaaacattttatgaaattgtggtcgaaaaccatgttcgtacatatgctgtaggcatagatattaaagatgtacaaaaagcaaatgaactagaaatttattcatcatgctgttccaagcttgagcgagtaggctgtcttttatagaagaagtctgctcgcgcctctattttttaagtgtttttaaatagaaagcatggtttttgacaagcaaagaatctggtgggtataatcaatactcactagcttttaaaattaatcataaattgtcgaaatttttacacaaattaaaggttacattcgaaatgaattgtggtatgttataaaacaagaatattttatgaaaggagcattgaaatggaaatgtctcttgaacatggaaacgatgcaggaagcgaacagcttattgatcgtatcctagattttttagaagatgacgaaaagtaaaaaaagagtgtgcggtgctatccctagccgcgcactctttttttatcatgtgcgtaaaggcagcgccatactatgatacatagggatagaatgaaagggtctctgtcaaagggattgacgaatggttttgtttgatagaaaatttagaaaaaggaaagagatgaagggtatgtcgaacaaaacatctttgtatcaaacaaaagaacaattaaaaaagcttgtaagcgaattggtttctatacctagcgtgacaggaacgatggcagaagtggaaatggctgaatcgatagcgtcttatttattgaagctgccttactttcaaagaaacgagcaagtcgagcttcattcaacaggagacgggcgatcgattgtcacagcttttgttcaagggaaaaatacgaataaaacagttgtactagtaagtcattacgatgtagtggatgtacaagattatggacagtggaaaaaggatgcttttcacgctgatacattaacgagtactttttataaccatatggaacaagttccggcgcacgtacaaaaagatatgataaaaggagactggctttttggccgaggaacgatggacatgaaagcaggcattgccctgcatatcagtatggttgaacgagcatgcaacggagagtttgacggaaacatcctgctgctgtcggtaccggatgaagaagtaaattcgcttgggatgagaaaagcagtgcctgttcttttagaacttgcccgcaaacatcagctggatttttctctcatgctaaatgcagaaccagtgttcagccgctatcctggagatcaaacgaactatgtgtactcaggatcgattgggaaaatcatgccaagctttttgtgttatggaaaagaaactcatgtaggggaaccgctagctggtttaaatgctaatttactagcttcttatttaacaaaagaaatagaattaaacgttgatttttgcgaaaaagtaagagaagaaacgagtccacctcctacggtgctgatacaaaaagatttaaaagaagagtattcagttcaagttccgcacgctgctgttgtattatttaatttatttatgttaaaccgctctcttaaagaagtaacagatctgctgttgaaatcggctgacaaatcggctttgaatgtgaaaaaacactataataaagccgctaggcagtacgctgcgggaatggagggttcatctcttgacgtgaacgtatggacgtatgaagaactttatactcatgcagtcaaacagcacggtgaaaaatatgtgaaagaaatggaagcagcacttttggcacaagaggatgatgacagaaataaaaccattaaattagtaaactctttagctggtttatgtaaagaagcagctccgatggtggtcttattttttacgccgcctttttatccggccgtttgttcacatgatgatccgtttgtacaagagattttgtcaaacgtacaggcaattgccaaaaagcaattccaagtggagctagttgaacaaagttattttggcggaatttcggatttaagctatgccagcctgcagcatccgcttcatacatttaacacgttagtagcaaatatgccgctatggaataaagggtatcatatcccgctagaagagctagaggagctgaagatgccggtgctgaacattggaccgctgggaagagatgcacatcaatggacagaaagattagacgttcagtattcctttgagattttgcctcacttcatttatcaagccataaaagaagcacagaaataaacatccgcctgcggatgtttattcgttaaatttaaaaaaggctccttgtatggtaaattgttgtggtgttagagcgtgatccaattcaactaaaaatggacgctctccaactttttttaatgtatcatggacaattccttgagttccgctgcaaaagataaggtttcccccattgatatgtagcttttgacaacatgcattaagggaagagtctctatagctttctctaggctgagcgtctagtagtttcgtccacctgttgatggattcttcgaggttatgtacagcacagtaaatgttttttagctgcagctgaccggcttggtgggaagaaagagccgctagatttggcttgcgcttttcttctggttcaccccattcaataaaaaaaggaagaggcagggaatcgtggtcagcttcaataaaacacattttccattgaagtctttctccatcattggtttgacgagaacccgctacaggaccttttacagtgacattcttgctttccagctcttctactagcaaatccatatcatctgtacgaagtgcaaatcgaccaaaatgaccaaacggtgtatgctcgttaacaagctgctgaataaggtcattatctgtaactctttgagctaacgcgatatctctaagcccgagccattcaatatagctgaggttaaaataagccaatgtgttaaaagtgccccatttttcatggatgccgcctttaatgacttttattccgtattcgtttagttctttctgagctttaataggatcaggtgaaaaatgaacaagatgatcaaaagataagtgcatggataggcctccttttaagagagattctttcccattattatacgttgttttctttttcaagaagagtaaaacgaatgattatgtaaaataaaaatcttaaaaaaagcaagccgcgtatgttttaaactcgacttgcttttgagttatttagcggcggcaaccatgtcctttaaagcagcagcccaatgatttattaaaccatggatatgagcagcaaggcgaaccgcattgacagtggtgatgacggctagagcgacgagtagaacggcgagtagagcgataagtagaacgacggttagaacggcgagtagagcggtaagtagaacgacggctagaacggcgagtagagcggtaagtagaacgacggctagaacggcgagtagagcgataagtagaacgacggttagaacgacggttagaacggcgagtagagcgataagtagaacgtcgggtagagcgtcttctagaacttttacgtcgagaagttggctcttgatacataaatgtttcaagctccgtacaagagagagattctgctgcttctctaattttttgagcagtaatatgcatacaaacacctccttaagatctaatcaggtagtacataatacaatatgtacaaggaaggcgtttggatatagtgaaaacatggaatttgtctaaatttacgaatgaaatggagtgggtttcatgcttcaaatcctagaacataaaagagtggacatcgctcttcaaatagtagctgtgcaagtagaagcttatcaagaagaagcaaggctcattggtttttcagatattcctcagcttacagaaagcaaagaagatattatgaaaagcaaggaagtgtttatcggagaaatgattgaaggtaagctagcaggagtgctgtcgtttgaaaaagaaaatgagcgtttaacgatttgccgccttgttgtgcgtcctcggtactttcgaaagggaatcggaagccgtcttttaacacatgtacttcaaagatattctgaatgtgaatgtatggtgtctacagccgaaaaaaatacacctgcgattaagctgtataaagcgcatcagttttcaattataaaacacactgcagctgctgataatcttgtgttagtaacgatgaaaagagattgagacatagctaaattaatccaaagaccaacaaattaatgacataagctaggaggaattggctggtgatttctgtgcaagacttcgctttccgcgggcgctgagcctcctcgtcgcttccgcttataccgcaggagtctccgccttgctctccaatcaacagctagaagtgcctacgtacatgaaacccacgtttaccataccaacaaaaaaatccgaacgcgttggattctccatcaagaatctcaattctccgttcggatttcctctttcttcaacgacaatacgtttgccccagcctctacgatgagagtgtttgctcagaataatctagagctgtatgacgctgaatcagcagtaaagcagctaaagtgacaaccgctccgataataaaaggcagcgtcatattgagtttaaaggcaaatgcaccaagcagagggccaaaaatacgccctaagctatccattgaggcggttagccccgaagcagagccatatcctactttggttctcatcgtaattaatgagaggacacaaggacggataagggcatttcctgctgtaaatatgcacaaaaataaggtagcattagctgcactagaagataacaaaatagacgtaaatcctattgctgaaaccaataagccaatggccatcagctttttttcatttccttttttaaatcgctgcagcacaccgccttgaatcagcgcttgagttaaaccgctcgccataaacatccatccgattgtcgtaggagtagcattaattttcgctatttgaaaaaattgaaaagtcgcttctaatccagcgagcgtaaaagtagctaaaaaagaaagaacatataaatacttcatagctccttgaaaatctgatgtgaagtcgttccatctggatgtttgtactttatcagctgattcttttcgcagagattcttttaacgtaaagaatgagaacgctgtcataatcagtgacaagataccggagataacgaagggaacaaacaacccgaaagatgaaagaacaccgcctaaagccggtccgaaaataaagcctaagccaatcgacattcctaacagtcccattgctttcgtgcggttttcttcatttgtactatcagaagcatatgcaaaagcacaaggaataaccgctcctgcgaacaaacctccgatgatgcgcgacgtatacattaaagtcagagagttttctgccaccgaaaaaagaaaaaagcttgcgctaaatccaagtaagccgaaaagtaagatgggacgccggccttttacatctgaaagctttccccaaaaaggtgccgtaataaaagatgcgatcgaatagctagccatgagtattcctaaattgactgtgcttgcaccggtggcacgaatcacttcaggtacgatggggatgatcactccaaagccgacaaataccataaagataacaaacattaacgttccaagctgtttgttcatatgcaattaagcccctttctctgtagaacatgccataagtttagtatatcaaatacagcagaattttttacgtatattgggtaaaaaacgttttatttacaaacggatgaatatgttaatatttacctgttgtgctgctgctgatataattaaaagaaaagggacgtgaagtgattgccaatatggattgtatttgcagggattatcggcggtcttttaggatttggggcgctagtggattatatagctaaaaagagaagtatcgagctagatccagaagaagggataaagaacgcttctgatgcagaacaaatctatgtggaaaattatctttatcaaacaaaagaaaataacaatcactttcaataaaaaaagcttggagacgaatctccaagcttttttaatgcggtaaaaagatgagctgatagagaaataaaacagcaaagacatacacaagcggatggacttgtttgccttttccttttaccagcttcattaacggataagaaatgaagccaagcgcaattcctgttgcaatacttgatgtaagaggcatcgctagaacaactaaaaaggcagggaacgcttcatcaaagtcattccaattaattttagctacagcacccatcatcaagcttccgacaataattaatgcaggtgaagtaatagctgctacgccagaaacagagcttacaaccgggctaaagaatgctgcaacaataaataaaatggctaccgtcacactcgttagacctgtacgtccgcctgctgctacaccagatgaagattcaacgtaagccgttgttgggcttgtaccaaataaagctccgattgttgtaccaaatgagtcagcaagcaatgcttgacggacgcgaggcatcttattatctttcataagaccggcctgttgagccactcctaccattgtacctgttgtatcaaaaattgtaacaagtaagaaagaaaaaacaactgtgtacaaatcatgatgaataacatctccaaaagcagcaaaaggatttgaaatcattaagccgtctggaaggtgaggagaagcaaacagacctttatcaaatgaaagctgtcctctaaagaaagcgattaatccagtaataatcataccgaagaataaagcgccatttacatttagcgtatataaaatgattgtaatcgcaagtccaatcagtgttaacactactttttcagactgcaaatcaccaagtccaattaaatttgatttatttgcaacaataataccggctgaacgaagcccgataaaagcaataaataaaccgataccagcactgattgcgtgctttaaattgcttggaatagcttcaattaatttttcacgaaacgatgttaacgataggatgataaagataatacctgctacgaatacagctgaaaaagcagtagcatagtcgatgcttccatttgaaccaacaactaaagcagcaaagtatgcgttcattcccataccgggagcaatagcgattggatagttagctgcaagagccatccatagcgtagctacgaccgctgaaataatagtagctgtaaaaacttgatcaaaaggaacgccggcgctggacaaaataactgggttcacaataacgatataaatcatggttaaaaacgttgtaataccagctaaaatctccgttttagcatccgtgttatattcttttaacttaaacataagtaacctccaaaaataacgaacattaaaagcaacatgatatataatattcgttttttacttgaaatgcaatagatttgcatataaaaaaacaaaaactaaaaagtgacgataaaagagctaaaacaagtgtaaaatatttctttttttcggtgctttttatagtgtgtgcgtatagaagaggctcatacgaaaaaagccgcttgggctgcagcggctatgttgcttgttttgaggcaacgactattggaaattttattttaatggaaagagttaaatcgtgatacgtatattccaagcgtccgtggtagttggaaacaagttcagaaatgatccacgtgccaagtccttcgtggcgttctttcttttctgtaacatgaaaagaagtaaacaagtgatcttgacgctctcgtgataaaggagcggtagaattgctgacttctaaaatgtaaatgccacttcgaatcatactcgaaacggttatctcttttttctcagaagaatgagcggcttctaaagcattatgcagtaaattcatgatgagattcatttggtcaaggtgctttaaaggcagctgtgataacggtgaatctaattgaacattcatatgtattccccacgtatgtgcttgattcttgctttgatgtacaacagaagcaacgtgcgaatgttcaccttgaatatatgaatgggtatcattcaaagcttcaacgtaattttgaatatactcttgtgcctgctgtctttgatttgtttctagaagataggatacggcactgacatgtttaataaaatcatgtctttcagcccttaacgcttgaaaaagctcattgtttttttgaatttcacgtgaagcactgctttcccggttggttacaaatatgtattgttgataagacgaaaacatgtcggtcatgtaaccaatcattgcgataacggttaggccaatactaaaaggtgaagatagactaaataaaagcaggaaaaaagacgtcattacgattgctttttttatatttattaaaggagctgtttgatatttctttctccatataaaaaatgaaccaattataaaagaactaagtaggagatgtaaactaacaggcaggtctttaaaaaagaggagcacgaaaacagttagtaaaactagtgtgtaagatagtttcattttagatagtccctcctttaaaagtattctttttgcaagatgtctaaatttgttttcgtgattaaagctgttttttcggtgctttgaaacatcactgagtaggagtgcttagtatacagggagaaattttgaatataggaaatgttgataataaaagctcgatgagaccttagaaaatgactcgctgttaattctttttcaatttcgtttaatgattgataggtactaaattctccatgtttcgttatgattgtggtagagcgacccgttcgttctgcaaatataatatcttgtttgttcagcacttgcatttcggttttttgttttaaaataagcttatctcttgtgtcagttgattgttttttttgatgaaaacgctgaatgccttttaacagacgctctttagaataaggcttcataatgtagtctaaaacgttgagttcaaatgcatgaacggcaaagccgctgtgcccagtgacaaagatgacttgaatatcaagtgcgtaagcattgataaagtctgcaagctcataacctgatagctttggcatttcaatatctgtaattaataaatcaatttcattttttttaatttcgttataagcttcctccgcgctgctagtcgaaaaaagtatgtctatatcatcttctctttctaaagaaatcctcaatttctctaaatcatatgaatgatcgtccactaatcctaccttcataaataaaaaccctctttgtttcattctattggatattaccacactattttaccatgatttacaagatggaaaggacgtttcgcgacataaaaaaccctctttatgacaagatggaagatgctgtatgaaaaataagctaagatatagtcaatcacagtaaaaggggagagcggacatgattgaaatcaaaggtgttacgaaatattttaaagagaaaaagcaaacaattgcagctgttcaagatattcatgtaaccatcgcacaaggagaaattgtagggctattaggtgaaaatggagcggggaaaacaactcttttacgtatgctgtcgactgtacttgaaccatcggaaggtaatatgttcattcacggaattaacattcataaacagcccgataaaataaaacaaagaattggcgtgctttttggtggtgaaacaggcttatacgaccgtttgaccgctcgcgaaaacttagcttattttgctaagttttatggcatgagcaaacatgaaacaaagataaggattgaggaactggccaaacgttttggaatgaaagactacttggatcgccgcgtcggaggcttttcaaaaggaatgcgtcaaaaagtagccattgcacgcactattcttcataacccagacgttatcctatttgatgagccgactacaggattagatattacatcggcaaacatgtttcgtgagcttattaaaagtctgcaaagagaaggaaaaacgattattttttccagtcacattatggaagaagtggagatgttgtgtcagtccatcatcatgattcataaaggaaaaatgatttatcaaggaacaaatgaacagctttataaagaagaggaaagcacagatttaaactatatctttatgtcgcgcatcgtgaggggggcttaacatgatttggcatatttataaaaaagagttaattgattgtttgcgagatcgcaaaacgattatctttagcgtattgattccaattttgttaaatatagggattatcttttttgcagacaaaatgatggctagtgatcaaacagactccatgtctgtagctgttacaaaagattctgatgccagtgtaatcgactggttaaaaaacgatgacaatattaaagtaattgaaagcagaaatccactcagtgctgtagaacaagggaaagcgttagcggcgttaaaggtaccagacgatttttcttcagaagtgcgtaagatgaaatcgccagaagttactgtttatacggattcagcgagcctgaactcaggtgctaccgcggagtatatacaaaatatactgaataaacatcgagaagctatagttagtgaacgcttagaccaactaaatgtgaatagtcaaacgatggctccgtttaatgtgattgaaaaaggagtgtctaaggaagatgacggctctttaacaatgattgcgatgtttgcgccaatgattatcattatgggcgttttaggtggtattcttccttctgccaatgatatttttgcaggtgagaaagaacgaaagacaatggaagctttattgatggcccctgtcaaacgaacgcaattactggttggaaaatggcttactatctctacattcggtataataagcggccttttgtctacattggcatttgttttctctgtacgttatttaacaactgtattaaatgatgcactgcagcttaacggtcattttacaacctttattttatcttttttagtcacccttaccctgctagcgctgctaggagctatggtattatgtatccttagccttttagcaagttcggttaaagaagcacagagctatacatcccaaattatgatggtagcgatacttccatactttttactaatggggaaatcggttcacgaattggactcaagcgtatttttaattcctatttataacgtatttgcacttatgaaacagcttctctacggtgtctatgacatgcagagtctcgtctatacaataggaagcttgtcgatttgtacggttgttttatttgcggttggttatacgatgtttaccaaaagccgctgggtgcttggtaaagggtaaaagtaagccactagcacaaaactatgttagttgaaggaagatccgaacgataagtcgaggttcttgataaagaatccaactcgttcggattttttcattgttatgattatcatgtgtgtagttgcttctagctgttgattggaggaaaagacggagactcctgcgggaaaagcggaacaggtgagaccccgcaggaacggaagcgacgaggaggctcaccggccgcccgcggaaagcgaagtcttgcccagaaatcaacagcggcgtaacaagcgattcataatatcccatttatcggtctctagattgaattgatttaattatgtctcagcctttttgtagggaaatagagcttaaaagagaatgtagaaagaaaggagagtgaaacagttgcatcctattatagtagaagaaattcctaattcgataaaaaagtatgtaaagcaaatcgaaaaagtgacgtttccaaagcaagggtgtacatcggatgttggtattcttcataccgctaaaaggagatatgttttaaagcgggctaaaagggaaaagtacagaaaatggttatataaggaatattatgtattaaaagatatacaggcactggcggactttcaaagccctagcgcttacaaattcgttcacacagcagaacaaagctggctgctgctagaattttttgaaggaaagacggtaagagagtatttagagaaagaagataatgaaaaaaagcgcgagcatgttgtctatgaaatggggcgtctgctggctcgtattcacgaggcgaaatgtccaaaacgattagtgagtaagcagccgtggatccaccgaatgctgcaagaagcagagtacaatttaacccactatcaggtagacggaaatcaacagctgctaaaacaactacagaagcaaaacatgatatgcagaaaagacgtgcttattcacggagactacacgattgataatgtacttgtacacgacggtcggataacagctgttattgactggagcggaggaacttgcggagatgctcgttatgatatggctcttgctgtgcgctttgaagacggaatctttacaggtaaagagcgcgcgtctttttttaagggatatggcaagcagatttcacagaacgaattttgttattttgcagaaggtttatacgagtttttttaaggaatagtgacatcattttcttcatttgttgaacgtccactttctttgacgaattcatactagttttgtcacgtatgaagggatttaaaaatttctctcgaaatggctagtaaatgaaaaaaatggagggatggaacatgacgatgaaaacggtagatgtggcaaaggcgctgggaatacatccaagtacggtattaaagtgggtcaaaatggcggatatcgagctagagagaaatgaatcgggacactgtgagtttacagaagaaaatattgaagcacttagaaactttcaaaaaaaccgcaatcgtcaagccgtcgtcaaagtggtagaaaaagtagtagaaaaagaggaagtcgttatatctgatgaacgtgcgcaagacatgcaaaagcagcttgatcagctttttttaaggctgattgaaaatgaaaagcgtacagaagaaaaagcgggagaagtagtgacctttcaaattttagagcatcgttcagaaatcgatcgattaaataaagttattacgaaattagaaaatcgagtagtggaacttgaaagtcagttaaaaagtgaagatagcttaaaagccaaaaagcctgttccgagatggagaagctttttaaccggtatttttagctactagcggcgatttaccataacggtaaatcgctttttttatggaattttatgaaaaatacatcaatttgtacagatttgtggaaaaaaatctcaataatagttgacgaaacgcttagtaatttgataaaactaattaagttaagaaagtgaaatactttcgtaaatacatattcgttatcatgtgatagcgataaggagagtgacaagtgaaaaaaagagaagagctcgttcaagaaatggagacgctgtttcgctttgtgttcagacagcttcgccaagaaattaatgaagtatacaattcagagctatcaacaaatgaatttatggtgcttcgtatgctggttgattccggcaggcagcgatcaactgatttatcaaagtatcttcaagtgtcagcaagccacattacggcggtaaccgacttgcttttatcaaaaggctacattgcacgcaaacggtctgaaaacgatcggcgtattattgatatcgaactgaccaaggaaggacaggatatttttaatgctattcaagagaagaaacgagcctatttccttgagcgttttgagcactttacagataaagaaattgaaacggtgaataaactgtttcacaaaattaaaggcgatcaaaaataaagcgctttaaatacggaaggataatcagtgagtatgaacttcactgattatttttttgttttaaaacgcaaagagtataaaaggcaagttagttggtgagaacataaaatcagcgtataataatagaaagaacacatgaaggaggtcatctttttgacagaacaatatgaagtagcaacttttgccggaggctgtttttggtgtatggtgaagccatttgacgaacagccaggcattataaaagttgtatctggctatacaggcggtcacaaagagaacccgacgtacaaagaagtatgctcagaaacaacgggccactatgaagcggtccaaattacatttgacccagaagtttttccatatgaaaagcttttggaactatactggcctcaaattgatccaacggatgcaggcggacaatttgccgatcgaggcgactcttatcgaacagctatcttttatcacaatgaacagcaaaaggagctagctgaagaatccaaacgccaattagaagtaagcggtcgtttttctgagccgattgctacacaaattctaccggcaaaaccgttttatgaagcggaagaataccatcaaggttactataagaaaaataacttccgctatgctatgtatcgacgcgggtctggacgtgatcgttttattaaagaaaactggaaagactttggacacgacgagcagctgaaaacgaccttaacgcctattcagtatgaagtgactcaaaatgacgcaacggaacctccgtttcgcaatgaattttgggatcatacagaagatggtatttatgtagatatcgtatcaggagagccgttgtttagttcaactgataaatatgatgccggatgcggatggccttcttttacaaaagcgattaataaagatgaagtaaaagaaaacatggacgttagtcataatatggttcgtacagaagtacgaagcaaaacggctaactctcatttaggtcatttatttgatgatggtccgcaagatgcaggcggcttgcgttactgcatcaactcagcagctcttcgctttgttccgaaggaagatttagaaaaagaaggatacggggaatacgctgttttatttaacaaataaaataatatgagaaaaagagcgtgattcaacttaaagttggctcacgctcttctttttgtgctttcttttgttttattttggctcgaatgaggccatagagaaaaaggaaagggatgtagccataaataaaataaaagccggtcatggataaacgtgtattaagctgatcgatggtttcccgatcatcaaagaaaatagaaaaaccaagaagggcaataagaactaatataagaaaaattgtaggcggcttattaaatgttttactaaatccacgaattgtacaccatacgctgacagcaatagtaggtagaacaactaaaagccacagagcaattaaaatatattcaaaacgctgtaaaaatggaatttcaataattttggccattgttaaagtcggccagatcgtatgcattaactgtccctggctaaagtaggcaaaggatactaatgctgtgcacaaatataaaaaagtgctaaacaaaacgccaagctgcccccatttttggctagtagcgccattctttataaaaggatagaaaaaaagcacggattcaaaccccaaattctcaaaggtcatcactttagccgaaattaaaaattcccatatcgtgtgatcaaacaagggaaataaattgttaatttgtccatactttaacgggtaaatcaaggcaagtacgagcggcaggggaagcataaccccaaaaaaagcaattccagtaattacacgaaatccaccggaaactgtatagtatataataggtaagtaaacaagtgatacaacccatgtttccagctgtggaaacatccatatttgtaaaatttctacgtacgttcggtaaattgttaacgcaaagataaaataataaatggaagcagcaagagttaaagctcctccaagatatttaccaaaatacagccggtgaatatcgataatatcgctgttttcacgagttaatatattaaaaaccatcgctaataaaatacagatgctaattgcagcaaggatgatggatatccaagcttcataaccagctcctttaataataagacgctgaaatcctagtatcccaacgccaatttgcgtagaatgcactagaaaaaaaagaaaagaaggggaaacttgattttcttctttaattgtattatgcatcttttcttcctcctagttgctaatcccggtttgaataagatgaacacgagcttttacttcaatattcatatccggatattgcgctttgaattcttcactgttaaacccgcgtgttttacttcgaacataatctgtaaaacaaataggatcaactttatgcttttgaagtttcttaataaatgcatccccatctttttcaatgtctttttggagcgttttttccaccattttaatactagagggatctgttaaatccacccatccaggaaactctcttacaaggccatcgatagttaagtgcgcgacgatacttggattttgatgatttcctttaatctcatactttgttttagtgcgcaagttttgaagaataatttcgctttcacggtcattttctttaatttttacagagtagcggccgtgctttgttccgcttgttagcagcttaaataaaaacgtttctttcattccaatcgttgtcacgactttttgttttttaaacagcgccaggccctttagtttgatggcatctttttgctgcgttaaaacaggcagatacgggtcgcggtcgtcactaaaaaaactgaataaaaaaatttgtaaattggtgttaggcaaattttctgttcggatattttgttcaatcaaattagagataaactgatagtctttaattttcttttttgtaacggagctcaataattcatgtgcgttgccatctacaatacttaatttaatattacgtccaaggtctggatttctagcaattgtattcactaattcatccacgccatgtgttgcaaatgcttttcccatgacgatgctccttagctgcccaaaagcgacagggagagatgatttattgtttaaaagaagtggaatatcaaatgatgaattagcagtagccgcaataatacttggttcttccgttgggccgtatttataaatagggtataaaatggttcctttgactttattgctttgaggaatataatcatatcctatggagttgactacttgaatttcgtcaattgtttcacggtctgcacagctcgctaagaaagtaaggcaagtgcataaaataagcattctcttcatgaagtttccccgctttactcattatctaaattactttttcttttagtcttatttgctttattagggttatagcggaagcgctctaaaggacgcaagtagcttgggcgcttagctgtgtgactatacggcaatctcaaaaaagtatcacggtattctctcgggcgaaatggaaagataggaacaagataaggcatgcccaaagattttaaacgaagcaggtgaaccagcaagaaacaaaagccaaacgtgatgccgactaaaccgaacgcagtggcaaacaaaataaacggaaaacgtagcagtcggatcgtgttagacattttaaaaataggcgttgtaaaagaagctaaagctgtcagtgaaacaataataagcaaaatattgcttgttagcgcagcttctactgttgcttgcccaataacaatcccgcctacgattcctagtgtttgccctacttttgttggaagtctggctccggcttctcgaagcagttcaatagtaacttctaaaaaaagtacttcgataacaggtggaaaaggaacgtttgtccttgaaaagataataggcccaagcagatcttttggaagcatctcataatgataagtaacaatagctacataaagaggcgtagcaaaaatagagaaaaagacgcccaaaatacgaataattcgaaaaaatgaacctaaaacccacggtaaatagtagtcttcaggtgaaacaaagaagtcaagcaacgttgacggtcccgtaactgcgtaaggagaaccgctcgaaaagaaggcagcttgcccgtttaacaggctaaacaagacacgatcaatgcgttctgttgttaaaaagagcggaaacgccgtagaagaattatcagaaattaattgatcaagcatcgtactatcgaaaatgacgtcaaaatctatatcttcaaggcgctgcgtcatagtgtctacgtgctgaggattcgttacgccttctaagtaaacaagcaccacgcgcgttttcgatttatttcctacggtaagttctttaaaaataaggttttcggaaataactgtttttctcattaagtagaggttgacatctaaatcctctacaaaaccaattttaggaccgacgacgctgaactcgttttccgtttcattttctttccgaaatcctgtatcaaagctttgaactttaataagagctactagcttatcgtctttatgcaattggaacatcacgtagccgcgcagcatcttttctaaaatttcttttgtatctcttgtaattgaaatatcttcaataggcagaacattttcgacgtcatgtacactgcttaacgtgaagtctagtttttgaaaaggctcgagtattttatcttcaacactttgcatgtttacgagctgcttaaaataagtaatgatgtatttccgatgctgtgagccaatggctaatgtcataaagtcacttgatttcttaaactgtttaatcagttcatccaatgattttttgggctgatcatctgcattttttcttttaaacaaatgtttaaacataaccgtgcccctcacttgactttctattactggtagtttgttcatgtacttcctttttattcgactattttttcttaagaagaaaggaagaatataaagacaaactttacactcttttacagtgggtaaacagtggatttacgtttgaatgataactttagatgggtcaaagaaaattacataaaggagcggttacatttatatgaagaaaaaattagcaggtattacaatggcagtagcattggcctcgtttggtgtaggaaactcacttattcaaacggaagcaaaagtggagcataagtcagctaagaaacctcaaaatgtcattatgatggtaatggacgggacgagttcaaatgctactacactcgcaagatggtacaagggaaaaccgttacatatggatcagctgatggccgggggagtacgtgcgtattcggcagaatctgctattacagattccgctccagcagctactgctttagcaacaggaaataaatcaaattcaggttatgtaggtgtactcccttcagtagtgaatacacctggggttaaatccgtagaaaaagaagatcaatttcgtcctgtagcaaacgttctagaaggagcaaagctttcagggcgcgcgacaggaattgtggctacttctgaaatccagcacgccacaccagctggtttttcagcccacaactatagccgtgatgattttcaaacgctagccgaacagcaagtgtatcaaaacattgatgtagtgcttggaggaggtaagcaatctcttcttccgggaaaagaagaaaaaagccggaaagacggtgaaaacttagtcaatgtattgaataaaagaggatatgactttgtagaaaataaaaaggaattagagcagtcacgcgccaaaaaaatctgggggagcttcgccgaccgagacttagcgtatgatatggaccgaccgcagacaaaagcagaacagccaaagttgtcccagatgacaaataaagcaataacaacactatctaaagataaagacggttttttcttatttgttgaaggaagcaaaacggattgggcagctcatgcgaatgatccagtaggaatgattagcgatgtattagcgtttgatgaggcagtgggcaaagcagtagagttcgctaaaaaagatggaaatacgatggttattgcgattgccgatcacggaaacagcggtctttcaatcggtaatgcaaatacaacaaaaggatacgataccacacctgtttctgcttatattgatccattaaaaaaagcaaaaatgacgttagaaggtgctgcgtctaaattaaaagaagatttatcaaataaagaagaagtagctgctttgtatggtttgtcaaatctaacttcagaggaaaaagcgcagctgactaaagcaagagataaaaaagaaatcagtgctacactatcgaagttattagccaaccgagcaaaacttggattcacaacgggcggtcatacgggtgaggatgtatttctgtattcgtacggcttaaatcgaccaacggggcactttgataatacggagattgccaaacatatggctaaatcaatgaatattaacttaaataagttaacaaacgaattatttattgaagcaaataaagcttttaaaggctcaaaggtagcggttgactcaaaagacaaaaacaaccctgtgctggttgttacaaacaataagcgaacggtacgtttcccagtaaataaaaatattgctattgtaaatggaagagaaattcaaatggacagcgtggtggtacaggataaaaagaatcgcttctttgtaccggaacaagcacagcaaattgtaacaaatgaaaaataagaaatgaatgcaaaacaggcctggttataacttaaggcctgtttttttacaaataatagccggttaattaggtgtatgtagcttttatagagggatgaattgatttattttacaaataaatagttttgagcacttaaaggaatggaaagttttcacgtttaactatatgtgatttatactatgaaatggtataataatcatagttttaaaaggaactagttcggaatacatatgtaagttcataactttgtatgctagaatttttataataaaatgaataaaaaacacataaattcttttggatgaaatcacaaattcatgattattaaggacaatatgtaagtaattaccttgaataaaaagtaaaaaaattaataaaagtatgggtgaaagagcatagaacatgttttaatagtaagagaaaataatatgattgaaaggagcgtgccacctttattgaaaatgttaaataaagattttggcatgctgatttacagattataaaaagggtattaaatcattgttaggaaaataaatgataatagataaacggtttttaagtcttcttctagaaaacctacaattattgcaatattccccatgaacaatcgttgtgcgttcaattaacgattagcgtccgtgtagatcattcatctcaacataaaaacactataacgatgtgtagacatgcataaaacagaatgggcaatagttcgtactatactttaacattgtatcctagggggagtcagggtgaacaaaattaacttaattattgccgatgataacgaagattcggttgaaattttagattattttatagaacagcttccggaatttgaagtgattagcatctgcaaagacggagagcagcttgtacaggaagtgatggctaagagtccagaccttttgctcgtagacattaatatgcctacgattaacggtgtagatgcaataaaaaagtgcctgcgcattaagccgaatttaaacttcatttttatcaccggttatgatgaatttgctgtgaaggcatttgagttgtcagcactggattacattgtaaaaccgattgagaaaaccagactttatatggcgttagagcgggcaaaaaactccatcggaatggataaagatcagtcaaaaaagccaagtaatcaattaaagagactgcctgtaaaatttaatgggtctacttattacattccaatagatcaaattatttttatcgaaaaatcggggaaaaaatgcttaatctacactcaatcacgtgtctatgagacatatgaaaatattagtgatatctatatgtatttgaatccttctgtatttagtcaaacacaccggtcttatatcgtaaatttacagaaagtttcgcacatcacaccaaaaaacgaaacatatcttgtttatttcttagaaattgatgaatatgctcatatctcaaaattaaaaatccaagacgttcaaaaacagctgcatcagttaatgacgaattaagaaatgctgctgcttctaaaatagttatgttgatgaaaggacgaagcttatgtaagtttcgtctatttcatgtgtctgctttcggaacaaatgatagtaatatagttcttatgaggagagttagatagaagaagtaacgttgaattgaaaggaaagaaaatgatttcaattactggtcactataatgaatttaccgtatttattgctgtcattgtagggattcttgcctcttatacagcacttgatattatgagcaaaatgatgaaaaaacaccggaacaattatttgtggcttacactgtcagccgcttcaatggggcttggagtgggggcgatgcattatattgctatgcttgcttattacgttcctgttagctttcattttgatgttgtactttctgtccttgctttaataatagcgattagcgggtcactaggtgcgttttggacattctggaaatggcgcacgtcggtatggtcagggcttattttaggaagcagtattctgggtacgcattatactgcaatggcagcaatcgaaacagaagcacgcattcattatgccgtgctatctgttttcctttccatcatcatcgccctgatcgttgcattttatgcgatgcacttgttttttcgttcgaaaagtgtgaaagctaatccgtttcttaaacttgttagctctattttattaggcattggaatttcagttatgcatttcatcagtatgtatggaatgaagctgcatattgcacactccgttgctagaaaatggggccagtggctgccatatcaagcgccattttccaatattattgcaagtatcacaattacgctgctcattgtcttcctgctcgttgctgcttttaagcgtcaggaagaagtgagagaaagtcaattaaaagaagagtattatcaatctctttttaactacaatcccaatattgtgtgtgcggttgatttgtacggcaatattcaaacgattaatccaaaaggaacagaactaacaggatacacgttgcatcaaatggagaaaattccgtttccttatatgtttagagaagctgagaaagctgaagaatatatgtggaaatccctgagcggagactctgtttattatgaggcaacgctcattcgcaaagatgatcagcctgtatatgttgaagtaacgcaaatgcctattattgttcatggtcaaattaaaggcagttacgttattgccaaagatgtgacagaccgaaaaaaggctcaacagcagcttctggatttacaagaagatttaaaacgcacgctatcacagcaggatggcgctatttttaaatttgtgaaaagcagtaacgggtatattcatacgatgtgtgaaggtaacatggttagtcaaatgggatataaagaaatggacgtggtcggcaaaacccttgatgagtttttacctgaattccatgcggaaaaaagtaaagtttattatgataaagcatgggcaggagagaaagtatcatatgaaggaattttgaataattttgcttactatacaaagttaacgcctcatatttgcgatggcaaagtaaaagaagttattggttctatggtagatattacagatcttcacgaagcgcgagaaaagctggccaaaagtgaaagcatgtaccgctccgttctttctacgatgtcagaaggagttgtatttcatgaccttgaaggaaatttaattgcggctaatgcgtacgcagctaaaatcctaaatgtgccttatgatgagattctgttggttaatccgtttggtttagactgggagattatacatcctgacggcacgccttttgcattggaagacattccgtcggtccggtgccttcatacaaaagagcctgtgcgaaatacagtcatgggcatttatttaaatgagaaaaaactgacttggctttcggtgaacgctgaacctcttgaagaaagcaaatattataaaggcgtagttgtcacattttatgatattacgaagcaacaggaacaagaacaggatttgcttcattccaatcagcaaatgattatagcaaaagaagaagccgaaaaggcaaatcaagctaagtctgaatttttatccaaagtaagccatgaacttcgtactcctttaaacagtattttaggttacgcgcaaattttggaagagcaaggagaaaaagatttaacggaaaaacaattaaatcgtatacgaaaaattttaaaagcaggtaatcatcttctttatttaataaacgaaacgcttgatttatcaaaaattgaatcgggtcatttagcgattaatcttgaaccggtgtcggtaaaagaagcgattgaagacgcgcttaaaattatgaaacctttagcaaaagataagcatagtatactttatacccactttcacgcttcccaggaagtctttgttgaagtagatgaacttcggtttcagcaaattttattaaatctgcttaccaatgctattaaatattcacctgcttatcgcgatataacaatttatactgacatcaatcaacatcacataaccatttccattgaagatagaggctttggaattccagcttcggaattaaatcggatttttgagcctttctaccgtgtgaatagactagaaaaagacggaacaggtattgggttagcgcttgtaaagcagcttgttgtcttaatgaatggaacgtgcggagtgcgaagtgaagaaggaaaaggcagtacattttgggttcgttttcccttagtgcattcacctgttcctgaactcttggctaatgtaggtgcagctgaggcgtttttaggtttttccatgccgatatcgattgtgtatattgaggataacgacactaatattgagcttatgcaatcgattctttcttcatacaagaacgttaagctcttagttgccaaaacaggagaaactggcatcgggctgatcgagtccatttcaccggatataattttaattgatattgacttacctgatatgaatggttttgaggtatgtaaacagcttcagctggaaaaagagttgaagcatattccacgaattgctctcagtgcaagcgcgatgcaaagcgatattgatcaggcgtttttagttggctttagtgaatatgtaacaaagcctattcatatttcaacgtttttaaacgtattaaaacgcttaacaaaagcttaacaaaagtttagagggcttttaattgacttatcattggaccttttgtaaaataaaaacaacttaatacatttacttcttacggagtaaaggggagtagcgtcagggaaacctgaaacaaagtcgtcattacatggaatattccatcggctttgttggcataatgattatgcttagcaagacctttgccatatttggcaaaggtctttttgtgttttattccggtaatgaggataaatgaacttatacaaagaaacgagaggggatttttatggatgcatcgcttttgttagagtatggatgggtactgctagtgctggttgcattagaagggattttggcggcggataatgctctcgtgatggctattatggtcaaacatttacccgaggaaaaacgcaagaaagcattattttacggattagccggtgcctttatttttcgatttggttcgctgtttttgatttcatttttagtggacgtatggcagcttcaagctataggagccatttacttattgttcatttccattaatcatattgtgaagagatacgtgaaaaaaggcgaccatgaaaaagtgaaagaaacggatgagaaaaagggctcaggtttctgggtgacggttttaaaagtagaagtagcggacattgcttttgccgttgattcgattttggctgccgtcgctcttgccgttacattgccaacaacaaatcttcctaaaattggcggactcgatggcggacaattcttggtgatctttgccggaggaattatgggattgattattatgcgttttgcggcaacttggtttgtcaagctattaaatacacgcccaggcttagaaacggctgcttttgctattgtaggctgggtaggggttaagttagcggtctatacccttgctcatccggagttaggtattattaatgaacatttccctgaatcaaaagtgtggaaaattacgttctggattgtgttacttggcatagctgcttcaggctggtttctatctaaaaataaagaacaaactgattttgaaggctcagagaaagaaaaagaatcgttaaaaaaaattgaaaatcaataatacaaaaaaacacgtcttcaatgttaattgaagacgcgttttttatatgggggataaaatacctagtttagattgtttaaataaagggtaaaagaactaattgctgtttaattactgtatatccgaatgttttgcttttttgttcatattctgtagagaacagagccgtgagtaattcagttcaatgaagtttatttcagtttataaacatatatttcaaatgtattgttaattggtaaaattgagctattatgggttataataaagggaaattaaaaggagcagagcgcttctcaaccctgttcgtcatcaaaagaatggatattaacatggtataaagcaactgagtatagtaaaagaggtgaagccaatgctcacaaaagttcaaacgcctccatcgcttgaaacgcttgtactgacgattcagcaaggggataaacaattacataatgaaatgattcaacaatataaaccgtttattgctaaagttgtttcagctgtatgtaaacgttatataagtgaagctgacgatgaatttagcattggtctgattgcatttaatgaagccattgaaaattacacaatccaaaaaggacgatctcttcttgcatttgcggaacttattattaaaagaagagtaatcgactatattcgaaaagaaaagagaaatcaaacgctgctctataaccgaattgaaaatgaaggttttattcaaggtaaggtagaaagggatatatcgctttctaactataaaaggcaaagtgaaacttcatatattcaagaggaaatgacttatttttgtcagacgttaaaattgtttaaattaactcttgaagatattattaacacgtctcctaaacataaggatgcaaggggaaatgcagtggaagttgcatcttttatcgtcaatgaaaaagaactaaaagataagctgttcttaaagcggcagcttcctattcgcttgattgaaaaacatgtcaaagtgagccggaaaacaattgaaagaaaccgtaaatatattatcgcgatggttattatattagcgggggactacgtgtatttaaaagactatattatgtaagaaaaaggcacacgcaggtgcctttttttagccatgttatgaagttatgttttatttttgtgtgctgccgcttaagtgagcttgagcttgttgcaccaagcgttttgtgatttctccgcctactgaaccgttgctgcgtgcagcagtgtcagaacctagagttaccccaaattcttgagcgatttcatatttatattgatctaaaaattgttctactcctggtgttaatagtttatttgttctagccatgattagtcatctccttttttagtggtacagcagttcactgctgtacctgtattatttgttgtttcctattttgcatactggtaatggtttgcaagaaagtataaaaaagcccagctttcaaagaagctgggcttttttatatattattttacaactgcatattgctcaagagactgagcaaatgacttttgaagagattttacttgttctacgtatgcatcagatacgtgttggaattcttggcgcgttttcttttgctcttctactaattgtgttactacttgatgatattgttcttgagcttgctttactaaagaatagcttgatttgctttggttaagagaaagctcttgtaatttatttaatgcttcatgcgtgcggtttgtccattcttcataagaatcggcaacagcgtttccagctgttttacgtaagttttcaactgttttttgttgaagatcttctaattcagctttccattgtttgtctgttgcttgaagttgttcaactgcttttgttacaaattcttgctgttgctcaagtgcttttaacgtccattgctcaatttgtttgtttccgtctgcaatgttttgtaacccctttgtccattgttcccacattgcatcaattactgtatcatactttactgttgacataatcaaattcctccttgaataatttggtctggcgaacagttatcgtaatgaacaaaacgttaaagaagaaattcgtagttgtgtaataaacctaacattccgcgctcgctggctgaccgtgaaatttaacattatattaggaaacgcagatgtactgcgtgaatccctttaatcgttttcttcctcttttgattcttttgactttttagaagaagaagagctaaaagggaacaacatgtcggtatacatgtgaaaaaatgaatctaacatgttttgatactgttcaagtgaattagcccacatgcttaaatattgttcaccggcatctgttaatgaataaatccggcgtgcaggtccttcagctgacgtatcccattgcgatgtaatcaagttgtctttttcaagctgtctcagcgtgcggtagacgtttccttgatcaactgatgtgaatccaaagctcattagttgctgaatgagcttgtaaccatgtagattccaacctcttaaacttaaaagaagaaaaggaaccatcaagttttttggtgcaccgctaatcgatttttctaagttgtttgaattagaggtgttatctttttcacttgatcccaaggtaatcaccccttcgaaaaaagagaatttgttttctatatgtgtaatttacacctagatgaaaaaattgtcaacactttaaaacaggtctttcaaatacaggaaaaaagaacgattttttggatttcgacaaaaagcgtcaaaaaaattcaaaaataaacaaagatttagaattgtttattttggaaaacgaatttataatagtacatgtaggtaatttttataacatttataatttgttggtaagtgaattgtgaaaagatttacattatccaataaataaacgcaaaattggttgcgtttacttagagcttctaatatgtcgcttgtcacattaagtgtccatattgaaagccatcacttttaacgtacacaagaaaggagatggagttttggaacagcaaaaagtatttgatccgtttcaagcatggaaagacgtatatgacaaaaccgaatcttactggggtaaagttattggggacaatatgaatcgtgaagaattttcccagctcatgggaaatgtgctaaatatgaaccttcaatatcaacaagcagtaaatgaagtaacggggcgctatctgcaccaagtaaatgtaccaacaaaagaagatgtagcaaacgttgcgtcattagtcatcaatgtggaagaaaaagtagaattattagaagaacaatttgacgatcgttttgatgaattagaagcacagcaagaaagtgcatctgctttgaaaaaagatgtaactaagctgaaatctgatgtcaaatcgttagacaaaaaactcgacaaagttttgtctcttcttgaagggcagcaaaaaacacaagacgagttaaaagaaacgattcaacaacaaattaaaactcaaggtgagcagcttcaggctcagctgttagaaaaacaagaaaaattagctgaaaagccaaaggcagaagctaaatctgaagcaaaaccatcaaacgctcaaaaaactgagcagccggctcgcaagtaaggtatcggggattttataacaacattaactgctgtatttacagtaaaaatcatagctgaagaagcaagggggaaatttttcatgacaacattacaaggtaaagtagcaatcgtaacaggcggatctaaaggtatcggggcagcaattacacgtgagcttgcttctaatggagtaaaagtagcagtaaactataacagcagtaaagaatctgcagaagcaattgtaaaagaaattaaagacaacggcggagaagctattgcggttcaagctgacgtgtcttatgtagatcaagcaaaacacctaatcgaagaaacaaaagctgcgtttggtcaattagacattctagtaaacaatgctggaattacgcgcgaccgttcattcaagaagttaggtgaagaagattggaaaaaagtaattgatgtaaacttacatagcgtatacaacacaacatcagctgcgctaacgcaccttttagaatctgaaggtggtcgtgttatcaatatttcatcaattattggtcaagcgggcggatttggtcaaacaaactactcagctgctaaagcaggtatgctaggattcactaaatcattagctcttgaactagctaagacaggcgtaacggttaatgcaatttgcccaggatttattgaaacggaaatggtgatggcaattcctgaagatgttcgtgcaaaaattgttgcgaaaattccaactcgtcgcttaggccacgctgaagaaattgcacgtggagttgtttacttagcaaaagacggcgcgtacattacaggacaacagttaaacattaacggcggcttatacatgtaataaatgctggccctgacttttgtcggggctgtgcttgttaactaactactaatggaatgaaagggtgtgtatattcgtggcaattccttacgtgcaagagtgggaaaaattaatcaaatcaatgccaagtgaatataaaagttctgcaagacgttttaagcgtgcatatgaaattatgacaacagaagcggaaccggaagttggattaacaccaaaagaggttatttggaaaaagaacaaagcgaaattatatcgctatacgccagtaaaagataacctgcataaaacaccaatcttactcgtatatgcattgatcaataaaccgtatattttggatttaacacctggaaacagccttgttgaatacttattaaaccgcggttttgacgtgtatttgcttgactggggaactcctgggcttgaagacagcaatatgaagctagatgattatattgtagattatattccaaaagcggcgaaaaaggtgctgcgcacttctaaatcttctgatttgtctgttcttggttactgcatgggcggaactatgacatctatttttgctgcattaaatgaagacttgccgattaaaaacttaatttttatgacaagtccatttgatttttcggatacaggtttatacggagcattcctagatgatcgctactttaatttagataaagcagtagatacattcggaaacatccctccagagatgattgactttggaaacaagatgttaaagccaatcacgaatttctacggcccgtatgtaacgttggtggaccgttcggaaaatcagcggtttgttgaaagctggaagctaatgcaaaagtgggttgctgacggaatcccatttgctggcgaagcttatcgtcagtggattcgtgacttctatcaacaaaacaaactaatcaatggtgaacttgaagttcgcggacgcaaagtagatttaaaaaatattaaagctaatattttaaacattgctgctagccgtgatcatattgcgatgccgcatcaagtggcagctttaatggacgctgtttcaagtgaagataaagagtataaattgttgcaaacaggtcacgtatctgttgtatttggtccaaaagcagtgaaggaaacatatccttcaatcggcgattggctagaaaaacgctctaaataaaataaagacgaggctgagacaaaagtattttagccgaagtgaaaaacgaaccactgatatcagtggttcgtttttttgttatggtgaacgtaggtttcaagtatgtagttgcttctagctgttgattggagggcaaggcgaagactcctgggggaaaagcggaacaggtgagacccgcaggcacgtaagcgatgaggaggctcaccggccgcccgcggaaagcaaaggcttgcacagaaatcaacagcggtgtcactagcggttcagctcatgtatcccatttgtttgtctttagattggattcatttaattatgtctcaaccttgtttttttgtgtaaacagacaatagcgagtgatgattctttatctggactgatgggatttatgatatctaatgacaagtgaggtgacttcttttatactaatgtagtcaccttcttaaacatgggattttttacatggatatagctattcacgtaacaatgagtatgctttgagaagaaagaagaaaactattagtattataatgaaaaaggaatgtcagattatgccacaaccatggaaacgacgagtgaggcagatgtcttcagctcaaattattgttacattttacatagtggctgttacgcttggttttctattacttagtattccagaagctttaaggccaggagcaaagttagcatttattgatcgcttatttattgccgttagtgcggtaagtgtaacagggctgacacctgtctctactccggatacatttagtacgacgggctattttttgctcgcttttatctttcaaatcggtggtattggtgtaatgacactcagtacatttatttggatgattttgggtaaaaaaataggtttaaaggaacgtcagctcattatgacagaccataaccaatcccgcttatcaggattagttgacttgatgagaaatattttatttattatttttgccattgaactagttggtgccattattttaggattacattttctccgttattattcgagctggaccgatgcgtttctgcatggtttctttgcttctgtcagcgctacaacaaatgctggcttcgatattacaggatcttcatttattccgtatgcccatgattatttcgtacaagtggtaaccgttattttaattacgcttggagcgattggattccctgtattaattgaaatcaagcactattttttaacatttaaagataagcgtaaatttcaattttcgctatttacgaagctaacgaccattatgttttttctgctgttagcagggggaacaatcttgattcttgtgctagagcattcaggatttctagcagagaagtcttgggatgaatcgtttttttatgcgtttttccaatccgctgccacaaggagcggaggagtggcgaccatgaatattaatgagttttcacttcctacattaattatgatgagcgcgatgatgtttatcggtgcttcaccgagttcagtagggggaggaattcgtacgacgacgtttgcattaaatattcttttcctgttttattacgtaagaggaaataagacaattaaaatctttcgccgcgaaattcatgaagatgacattattaagtcagtagctgtatcgatgttagctgtaatcatttgctcgatttcgcttcttattttaagtgttacagaacatttttctctcattgagcttatttttgaagtgtgttcagcttttggaacaacaggtttatcaatgggaattacaggagggctttctgatatcggtaaatgcgttattatgattttaatgttcattggccgaatcggcatgttttcatttattttaatgcttcgccgtccaacgtctggaccagattatcactatccgaaagaacgtattattattggataaaagaaactggacaaaaatatgttagttgaaggaagatccgaacgagtttgtttcttgattaagaatcaaactcgttcggattttttattattatagtgaacacaggtttcatgcagctgcttccagctgttgattggagggcaaggcgaagactcctgcggggaaagcagaacagatgagaccccggcgtaagcggcgaggaggctcatcgaccgcccgcggaaagcgaagctttgcacggaaatcaaccgcggtgtcacaagcggttcaacttatttatctcatttgttcgtattttgggtaaagtgatttcgttatgtttcaaccgcttttttacagctttttctgcttatattgcttagcaaaaagtgcattctaagaaaaggaagttcaatggacttccaagcataggagggatatatgatggcaaagcgtaaagtagggtataaatcagcactgactaacaataatacaccaaaagagagcctttcagatgcagaattttctgctgaatatgctggcggcgaagagccggctaaaggcgcgaatcgcaattcaaaaaaaggaaagcaaggtaagtaacgatgagcaaacataaacaacaaaataagcacatcgcaagcaccgaagcaaagcaaaagcaattactgcaagaagagttcggagcggaaatgggcgatcccaacgcagctaaaatatatgaatccctaggaaagacaaagtctgataaagaacatgaaaagaaaaaagaatgttaaagaaaaaaacctcggatatccgaggttttagcttacaactggaaggccaaatgcttctacaggtgctgaataaagttttgtgtcatttgctttttgatcataataagcaagaagaacagatgggtgttcatttatttttcccgtttgtttataatacatatagtcaaatggaagaatctctaaaacagtgtgcttgtataattctttttcagcaagctgttcagcttcaaaagcctgtcccatgatagaaggattagcaagcatttgctgatagtaatgagagcggacttgtttttctactttatcgtcccaccaaggtttacgaggcttatgcttttggttttgtaaataatcaactttcataaacccttcaatcatttcttcatttgaaaaactctctgtttcaatatactgtttaaggcgtctgaataaatcttcaagctgatggccgattcgaacccagcccatttcatcccaatacgtaccgaagttttggaagaaatcaaaaggtgtatcatagcagtgctctactaaaaattctattgtttcatccattcgatggtcattccaaaacttttctaaaatatcttctacatgtttgatacgtacgacatctgaaaacggcaagacgttattgcttaaaatttcataaggcgattgatccatgtattgataattatagcgaggcgcacttaagcgtaagccggtgccgcgaagcatttttaaaaagcctagctgaagctcttcagggcgaagtgcaaatacatcattaaacgtatttttaaatgagttataatcttcgtctggcagtcccgcgattaaatctaaatgctggtctatctttccgccttcttttaccattgttacggtacgcgttaattttttaaagttttgtttgcgtttgactagttcattgacagcatcatttgtggattgaacaccaatttcaaagcggaataatccttttggagcattgtcatttaagaactgaataacttctggacgcataatatcggcagtaatttcaaattgaaatacggtaccttcacgatgttcatcaattaaaaattggaacatttccatggcgtagctgcggctgatgttgaacgtgcggtctacgaacttaatcgtgcgcgctccgttatccatcaaatagcgaatatcttcttttaccttttctctatcgaaataacgaacgcctacttcaatagaagagagacagaactgacagctaaacggacagccgcggcttgtttcaatatacacaacgcgttttgaaagttcttggcggtcttcttcaaaacggaaaggagaaggcatttcgcgcagatcaattttattgcgctgtggattaacaactggctttccttcttttcggaaagccacgccgcttacgttttcaaactgacgctctccgtgaagttcgtccaacagctgcttaaatgtttcttctccttcaccaatagcgataaagtcagcttcaggaatacgctctagccagtgagttacatcataggttacttctggtccaccgaatataatgatgagctcgggattgatctttttaagcatttgtgcgactttaatcgtttcttcaatattccaaatgtaacagctgaaaccaataatatctgggttgcgtttatataaatcagtgacaatgttcatagcaggatctttaatcgtatattcggccatatccactttatagtcaggctcggcataggcttttaaacatcgaagggctaaagaagtgtgaatatacttcgcattcaatgtactgacaacaatgttcattcaaaaagctccttttaactcgtaatatgaaatcaatttactattttagcacatttgagaaataaagtataaatacctttgcacttttgttgtggaggggaaaagatttcggtaaaatgtaacagaaacgtaaaagaagaaagagtctctgttaatgtgaaccttggtgaacgaaaaaatgaggtggaaaacgtggaatataagcgaattaagccaaaaaaaatatacgaagaagtagccgaaacgcttcttgagaatataaaagaaggcagcttgaagcctggagaccgtttggattcagtgcagcagctggcggaaaactttcaggtagggcgctcagctattcgtgaagctcttagtgctttacgagcgatggggctgctggagatgaagcaaggagaaggcacatttgtacggcaattcaactcagatatgctgtctttgcctgtaactagcgctgtattaatgaataaaaatgatattgaacatttgcttgaagtgagaaaagtattagaaattggagctgttcgagcggcagctcaaaagagaacagctgcggatcttgaacagctgtccgatagtttggaacaaatgaaaggagcgtttggcaatgaggaactgggagagaaagcagattttgcttttcatttaaccattgccaaagcctcgcaaaaccctcttttagtgaagctgatgaataacgtatcagaaatgatgattgaaacgatgaaagagacaagacgcatctggctttatgcagaagaaaaaacggctgaacggatttataaagagcatcagcaaatttatgaggctattctctctcagcatgcagaagatgctcagcattttatgatgagtcatcttgacaatgttgaacacgtattaatgaaatacataccggaagaaaaataacgccatttcaggtagaaaagtgcgccctaaacaacagaaaaactaaaattcaagcaccttctgataatttatgcttgctctattgtgaaaagatttacataatagaaattaggattgtcaaatggagggttacaaagtatgaaaaagcaatataaagatgatagtttggctttgcatacagatctatacgaactgaatatggcgcatacgtattttaaagaccacattcataaccgtcgttctgtatttgaagcttactttcgtcggatgccgtttgaaagcggttatgcggtgtttgccgggctggaaagagtaattgattttattgctaattttaggtttagcgaaacagatttagattatttatatgaagaactgcattatgaagcagagtttatcgactatttaaaacaagttcgatttagcggtaatattcgttcggtcgtagaaggcgaaatgatttttgctaacgaaccaattctgcaaattgacgctcctttagcagaagcgcagcttattgaaacgccgcttttaaatattttaaatttccatccgctgattgcgacaaaagcctcgcgtattcgcttggcggcgggagaagataatttatacgagcatacgggtacaaatcagcttatggaatttggctcaagaagagcacatgagctggacgctgctttctacggggcaagagctgcttatatcggaggctttgacgcgaccagtaatgtaagagcgggaaaagtatttggaattcccgtgtctggtactcacgctcatgcgcttgttcaagtctatcgtgacgaatatagtgcgtttaaaaagtatgcggaatcacaccgtaactgtatctttttagtagacacatataatacgttaaaatcaggtattccaaatgctattaaagtagcaaaagaaatgggagaacgcattaattttatcggtattcgattagacagcggaagacttccatatctttctcaagaagcaagaaagatgcttgatgaagctggctatcatgatgtgaaaattttcgcttcgaatgaccttgatgagtacagcattctagatttgaaagcgcaaggtgccaaaattgatggatggggagttggaacaaagctcatgacctcttttgatcagcctgcgctaggagctgtgtacaagctggtttctattgaagatgatcatggaaacatggtggatacgattaagctgtcagaaaatccagagaaaatttcaactcctggtctaaaagaagtatatcgaattgtaaatcaagtgaaccacaaatgggaaggcgattatattacaatgcaagacgaagtgccgaacgaagagcagcatttaaaaatgtttcatcctattcatacgcacgtcagcaagtttgtaacgaactttaacgcacgtaaaattcaccagccaatctttgcacagggaaagcttgtgtatgagcagcctacaattgaagaaatgagagcctactgcttacaaaacttaaagcatctatgggatgactacaaagtcattacaaaatcgaatgaagatgtattccgtcctacagagtatcctgtagacttgagcacaaactgctgggataacaaaatgcaaaatatcgaagagactagaagcaagctactatctgatacggtgcttgtgtagatcccatcagctagcaatgagaggagatttttttatgaaagagctacaaaagcaaattattgaagaaatgaacgtacaaaaagaaattaatcccgtggaagaaattcgccgcagcgttgattttctgaaatcctacatgaacaaatatccttttttacgttcgtttgtactaggtatttccggcggacaagattcaactttaactggaaagctggcacagctggcggttaatgagttaaatgaagaggctggagaagaacgctatcaatttattgctgttcgtcttccatacggtgtacaggcagatgaagcagactgtcaagatgcacttgcttttattcaaccaacaaaatctatttctattaacgtaaaaccagcagtagatgcgatgctttctgctgttgaagaagcggcagatgataaagtttccgacttcaacaaaggaaatgtaaaagcacgtgaacgaatgattgcgcaatatacggtagcgggcatgtacagtggagtcgtactcggaacggatcactctgctgaagctgttacaggattttatacaaaattcggtgacggaggagctgacttagtacctatcttccgtctgaacaagcgacaaggaaaacaaatgctaaaagaattaggctgtcccgagcatttatatatgaaaaaaccaacggctgatttggaagaagatcgtccacagcttccggatgaagaagcgctcggcgtaacgtatgagcaaatcgacgattatttagaaggcaaagatgtaggtgaatatgcaagtaacgtcattgaaggtcacttcttaaaaacgcagcataaacgccaattgccaatcacagtatttgatgatttttggaaataaataagtaagaagctaagacaaaagtagtttagttaaaggaagatccgaacggtgaagattcttgatagagaatcttcaccgttcggatttttttaatgttatggcaaacgtaggtttcacatgtttcgtttcttctagcggttgattggagggcaaggcgaagactcctgcgggaaaagcggaaagcgaagtcttgcacggaaatcaaccccggtgtaacaagtaatccacattaagtcatttatccaatttgttcgtctttagattaaaacgatttagttatgtctcaatttcctattttttatgaaaaaaagatagcaaacaaagaaaggtatttttgaaaaactagtgaaattagaaaaacataggagtataatagcattaagtcatctgatgacctgttaactaaaagaagtaaaatgatcagcttggagggagcaaatgatgaaagtatctttatttgccacatgtttgattgatatgtttcaaacaaatgtaggaaaagcgacggtagaattgttagaacgattaggatgcgaagtggattttccaaagagtcaagtttgctgcgggcagcctgcgtataacagcggttacgtaaaagaatcaaaagaagcgatgaaaaacatgataaaagcgtttgagcatgcagagtacgttgtatctccatctggctcatgtgtaacaatgttcaaagagtatccccatctttttaaagatgatgctgcatggtatgaacctgccgcgaagcttgctaataaaacgtatgagctaacggactttattgtaaacgttttaaaagttgaagatgtaggagccagcttaaatggaaaagccacttatcactcttcctgtcatatgacgcgtttgctaaatgtaaagcaagaaccttttacactattaaacaacgtcaagggtcttgaaatggagaaccttgaaaacagtcataactgctgcggatttggcgggacgttttcggttaagatgggacagatttctgaacaaatggtagatgaaaaagtaggctgtatagctaagacaaacgcggagtatttaattggagctgattgcggctgtcttatgaatattggaggaagaattgaacggaaaggacagcctgtaaaagtgatgcatattgctgaagtattaaatagcaggatgtaaagaaaggagaatgccgaatgtctatgaaaataggaaaagatcagtttaaaaaacgcgtcgatgatggagtcaataatgcgtttatgcgctttgcggtttcaagtgctcaagagcgcttaagaagccgtagattagatgcagcagaagagttaggaaactgggaagaatggagagcgcttggcgaagaaattcgtcagcatacgcttgaaaatctagattactatttagagcagctcaccgataatgtagctaaacgcggaggccacgtttttttcgctcaaacagctgaagaagcgaatgagtacataaaagatgtagcgaggaaaaaacaggcaaagaaagtggttaaatccaagtcaatggttacagaagaaattcatatgaatgctgctttagaagaactaggctgtgaagttattgaaaccgatttaggagaatatatcctgcaagtagatgatcacgatccgccttctcatatcgtagctcctgcgcttcataaaaataaagaacaaattagagatgtatttcaggaaaagctttcttataaaaaaacagaaaaacctgaagaactagctcttcatgcccgggaaatgctgagaaaagaatttttatcagcagatattggcatcacaggatgtaattttgcgattgcagaatctggatctatttcacttgttaccaatgaaggaaatgcaaggctaacgaccgccctgcctaaaacgcaaattacggttatgggaatggaacgaattgtgccaacatttgaagagtttgaagtgttggtaagtctgttaactagaagtgcagtaggtcagcggcttacaagctacgtaacggcacttacgggacctagacttccaggagaagtagacggaccggaagaatttcacctagtgattgtagataacggacgatctgcgattttaggaactgagtttcaatctgttttacagtgtattcgctgtgcggcatgtgtgaatgtatgtcccgtgtatcgccatattggaggacattcatatggatctatttattcaggtccgattggagctgtattatctcctttgcttggaggttatgaagactacaaagagcttccatatgcctcaacgctatgcgcagcctgtacagatgcctgtccagtcaaaattccgctgcatgagttattacacaagcaccgtcagcgaattgtcgaaaaagaaggaaaagcacctatttcggaaaagctcgcgatgaaagcatttggcttgggagcagcttcttcttctctatatacagtgggcgctaaagtagcaccggcagcgcttactccttttatgtcaggaagcagtatttctaaagggcccggtccgttaaaagcgtggacggaaagcagagagtttccagcgcctacaaaagagcgcttacgagattggtttgataaaaggagtgatggtgatgaacggaagcattcaaaatagagacagttttttagacaatattgctgctaatcttaagcgaagcaggcgaacaggcggtgtagtaaagccacaatggaagcatgctcctcagcatgaggtctaccgcaactattcgccggatcaattaaagaaagagcttgaaaaccattgcgaacgtattcatactcgctatgtagaaacctcatcacaacacttaccagctgcccttgaggaagccgtagcgaactatggaaatggtcttgtctgcacgtggaatgatcctaggttttccgaatatggattgaatccgctgatggagaaatgggaaacaaaccgtaaccttcacgtatggaattcagtaaaaggcgatgagaatgttaaactagctgaacaagcaaacgtcggcatcacgttcagtgatttgacgctagcggaatctggaacagttgttttgttcagcagtgctgcaaagggacgagcggtaagcttgctgcccgccacttatattgcaatcatacctcaaagctcaattgtccctcgcatgacacaagccgctgaaatgattcatgaaaaagtagagcgaggagaaacgattgcttcttgcattaactttattacgggaccgagcaattcagctgatatcgaaatgaatttagtagttggtgtgcatggacctattcaagcaacttatattgtagtgaatgatcgatgaggctgggacaaacgtatattagctcaagtgaaaaacgaaccattaatcaacgtgttggattaatggttcgttttctttgttagggtgagcgtaggttttatctgtttcgttccttctagcagttgattggagggcaaggcgaagactcctgcggaaagcaaagccttgcacggaaatcaacggcggtgtaaaaattgatccatactagggcgcttatccaatttgttcgtctttaaattggattgatgtagttatgtctcaatctctttttattcatgcattctttctaaatagcgggataatgtgaagaaatgtcgcattttgaataaacgtgactaattttaaaaaggtaaaaagcaaatcttgtagaatattaagtctatagataaaaggtggggaaatgggaagtgcaaaagaaaggagcaatgagcatgtcaccacaaagagaattaacatctgaagctgagcaaaatcagcgaggtgaattacagcagctacgagctatttttaatgacgtattagatgccattgtcgtattcgatgagtattttcaagttataaatgcaaacgattcagcctgcgggctgtttgaaaaaacaaaggatgagctattaacgtatcaaatgaaagattttctgatgtattttccgtatgacatgattgaagcgtattatccagcacttttagaagaaagctatttcaaatatgaaggcgcgatgacgcttcgaagcggcatgatgaaacatgttgaatttacttcacacaaacatagtcacatgtcgggcattattgtgtgtacatttcgagatattacgcagcacaagatgatggaaaatgaacggtttattagtcatcatatgtttatggatgtatttaacgaagcggtagatggaattgtcatttttgatcgaactggtcagcttatcgacgcgaacccttcattttgcgaacgattaaattatacaagagcacagcttctaaccaaaacattagaagagcttgtagaacctacttatcattataaggtgaaaaaattatggagaactctgcatcaagaaggaaagacaagcggagagctgcctatcaggctcgaaaatggagacgtgactttctttgaatttaccacaacggctaatatatacagtcaatactatatgtccattatgagagacgtgacggaaaaacggctgatggagcagcagctgttgagaagcgaaaaaaatttcagggctatttttgaaaatgcgattgaagcgatcttgatttggagagacgatggtgaaatcttgaacgctaatcttgcttcttcgcgtacatttgagctgccgttaaacaaactaattggaagcaatttgtatacgtttatcgatacaaaaagctttggtgcgttaaaggtgctccaaacgtttcaaacaaaaggagaaattcgcaatcagcttcctttttacatgccgaatggagaaatcaaacagttggaattcacagggaaaaaaggcattatagaaggagaccatttaacgatttttcgaaacatcagtgaacgtacaaaaatcgaacaggagcttcggaataacgaagagaaattcagacagatttttaatggttcgatcgatgggttagttttatgggacggcaagcgaaatattattgatgtgaattcttctctttgtgatattctagaactcagcaaagaggagatttgtgcgcactccatggaggattttatttcttcagcgaatttagatgcggtcattgagcataaagaaacgattgagcaaaaaggggaagcagaaggagagattacgtacgctacggagaacgaaaaagttaaaaatatcgaattctctacgaaaaaagatatcttgccaggtctatatatgacgcttttaagagacgtaacggaacgaaatcaaatgcaggagcagattcggaaatcggatacgcttcaagtagtcggacagttagcagctgggattgcgcatgaaatccgcaacccgatgacggctttaaaagggtttgttcagctgttagaaagcagcattcaagaagaccattctctttattttgatattattaaatccgaattaaagagaattgaaaccattattacagagtttctagtacttgctaagccacaggccgtaaagtttgaaaagaaaaacctagctgaggttgttaaagaaacgattgatttattaaatgctcaagcgcttttggaaaatattcagtttgaactgactgtttcccctcagctgccaatggtgtactgcgagccgaaccaaattaaacaagtactaataaatgtaattaaaaatgcaattgaagtcacgtcaaacgggggaagaatttttgttgaagtctactctacagagccgcgctacgtaacggtttccattcgagatcaaggagacggtatgccagaagagcgcatcaaacgcttaggcgaaccattttatacgacaaaagaaaaaggaacaggactcggtttgatggtatcatataaaattatagaagaacataaagggagaatcgaagtggaaagcaaaataggagaaggaacagcttttcatgttattcttccagcttaattagaaaggataaaaaatatgtactacggagaaatgaatttattttctgatttgaaaatttatattgtagcctcggaaaaaggggttcaagatatttggtttgatagcgatgatcataatgagcagcttaaaaaacttgtccatgacgagaattatcaccatgtgaaagaagcgaagcgacagctgcaggattatgctgaagggcgcacgctaacatttgatttgcctttggatataaaaggaacagacttccaaaaagaagtgtggttaacgcttaaaggtataccttatggacaaacgtggtcttatagtgatgtagcggagtctgttaaccgctctaaagccgtaagggctgtgggacaagcgaatcgtcgaaatccactgcctattattttaccttgtcaccgtgtgattggaaaaaatggagctttaacaggttatgcaggctcccaaactcatataaaagagaaactattaatgcttgaaagaaatgtagcaaaaggcgctctgtagttaaaataactattcaccgtctaatttccagccttctccctgcacaaaaacaccgtcaatttgctgaggagaagggagggaatttagttcttcatctttggataaatcgaatagctgatagtgctgcttacgattcagcgctttgtttttatccgttttttgctctgaactcatatttactcccccttatttaaaaagaatcccctataatatatgtagaaaaagaagagagtactgttacaattatgttacaaatgcagttgaaaaccagtgctcaacaaaaaaagccgcatagcagcggctttttttattgagcggattgcagcaaaactttttgaatggattcaaaagacggggaatggataattccatgctctgtaataatggccgtaatcagttcgcttggcgtcacatcaaaagctggattgtacacagagattccgtctggagcaatttgtgtatctccaatgtgcgttacttctttaggtgaacgttcttcaatagggatgctgcttccgtcttgaatagataaatcaaatgtggactgtggcgctgctacgtaaaatggaatactgaatgctttggctaaaagagcaagtccatatgttccaattttgttagccgtatcgccatttgctgcaatgcggtcagcacctacaataatcccattaattccttttgttttaatggtatgggcggccatattatccgtaatcagcgtaacgtccactcccgactgctgaagttcccaggctgttaagcgagaaccttgaagaacgggtcttgtttcacaggcaaatacttcaagcggaatatcacgctgcttagacaagtgaaaaggtgctaaggctgttccataataagctgtagcaattgaaccagcattacatattgtcatgattttatctttctttttaaataaagaaagagcatgatctccaattcggtagcacgtttcttcatcttctacttgaatttgaatagcttcatgaacaacttttgttttagcttcattaacggacgaagcggattcagcgcttttcgctacgcgctccaatgcccaaaataaattgacggcagtagggcgtgaactagctaaatactgttgatcaagagctagctttttgttaaattccttgactgaatctgtgtcatagctaagcgcagaaagagcaaggccaaaagccgccgtaatgccaattgcaggggctccgcgtactttcaaggtagtgatagcatcccatacgtctttaatggtttgcagcttaatatattcaactttgccaggaagctgctgctgatctaataaagtaatatatgattcattccattccactgagcgcggaagtgatagtgtatttgtcatgctgataccgatcctttcattgtgtacattattcgttatcgaagtaaatgttcaaattcatttggtgaaacgtcttgttggtgcagaagcaaatagcgtccaatttttaaagcagtacgtttagcgttaatttttctttcctctgaagaaatttcgtctaagtccgctacgtgagctaagccaatcgtacgtcgaatgatttcacatcctgcatatccaacagcatcttgccacgtttgcgttaaaatttcatgtaataagcgctcatctttagcgaaaggttcagtgttttcagaatgccaaagcgcagtaaaggtatctttgaatacgttccatgtgttcgtaatttgtgcaaataacggttcgcgatttgtttctcgagaaagagcatttaaaaataaattcgcaacaaattgccctaaatcaaatccaaacggaccgtaaaaagcaaactctggatcaatcactttcgtttcttgactgctagcaaagatgctgcctgtatgtaaatcaccgtggattaacgtttgtgcatttgttaaaaatttatattttaattttgctgcttgtagctttacatcactatcattccacaattcttctacatcaggacgcagcgctttttcaaattcatttgtatcaatatcaaaaaaaggatctgtaaaaactaaatcttccgtaatattgcataagtccgggttgctgtacttaacaacttcttcttttttatcctgaggctttaaggcgaaatcagacgttttgaacgcaatatgtcctaaaaaagaaccgatatgctgtgagagcagaggataactttcaccttgaataagtccggcgcgagaaattgttaaatgagacagatcttccatgaccgtaacagcaagcgtttcatcgtggtaataaacagcgggtacaagttctggcgtaaatgcaccgaattgcttgagcgcattgctttcaattgtggcacggttcaaggatagaggccagctttcgcctacaacttttgcatagggaagcgcttgtttgacaataatggatttattcgtttgatcatttatgatgtgaaagacgagatttaagttgccgtcaccgatttcacgggcagtcagtgcttctgtggcatcaaaaagacctagctttttcacaagtttgattgctgaaatttctgttaaaggctgatacttctctgtttttgttgttgacatcggaatccctccatagtttattaaactgatttgtttactaagttaataggtttaagaatatatggaggcttttataattttagaaaatataaaagcctctttcgttggaaagaggcttgattgtagtgttcaaacctcttatctgccagaaagaattactttctgttggaattagcaccgtgcctttgtaaaacatgttttacgggtgtgatccaccttaggatggaatgacggtcggttgctgggcttcacagggccaaatccctcagccaactcttgataagagtacgattacttattcaattttgatttgtttgaatattttatgatatctggtgaaaatcgtatcatgcaaaaaaaaggctgtcaatacataattaataaaattctgtgcggcgatctgtaaagacaggaatttgtttacgaatttcttttacaagttccaggttaacgtcagcacttaaaagttcttcgctatcgccagcttcagcgattatttctccccacggatcgatgactaaggaatgtccggcaaatgtgttattaggatcttggcctacacgattacatgcgattacatagcattgattctcgattgcacggctaatgagcagtgctttccagtgggcaagtcttggagccggccactgagcgacaacaaacaagacttctgctccgctgctagtatgaacccgaatccattctggaaaacgaatatcgtaacaaataacgcctgcgcacagtgagtgttcaagtgtaaaaagattttttgctgttcctgcttctaaatacaggtgttcatccattaatttaaataagtgcagtttactgtattgtgatacttcacgaccttttcggtcaaaaatatacatcgtattcgtgacgccttgctctgtttttttcgcgatcgaacctgccacaatatttacttcgttcgttttagcaaactgagagattaattgcttggcttgctgtccttcatcatctgaaatttcatctagccgcgtcaaatcataagctgtatcccatagctcaggaagcacaaggatatcagggttttctttcagggcttccgtcattttttgttcgatatattttcggtttttagttgggtttccaaacgcaatatcaatctgcaaacacgtaatttttacactcactttatcatccgtcctttttttagtagttgaaaaaaatgactttacaagttggttattacaatatattatttgtgactagaatttcaagaattttttgagaaggtgtgcgatgatgaaacaatttgagcaatcggaactattaaaaagtttaccaaaacaattttttgcatcacttgtaggcaaggtaggaaaagtaatggcccaagggcacgatgttattaacttagggcagggaaatcctgatcagcctactccttcacatattgtagaaacactgcaaaaagcaagtgctaatcctatgcatcataaatattctccatttcgggggcataagtttttaaaagaggccgttgcgactttttataagcgagaatatggcgttgatgtggatcctgaaaaagaagtagctattttatttggtggaaagggtggacttgttgaaatcccgcagtgcttattaaaccctggagatacggtgctggttccggatcctggatatcctgattactggtctggagtagagcttgcaaaagcaaagatggaagtgatgccgctcacggctggaaatcattttctacccgtatacgaagagataagtgaacgtgctaaagaacaggcaaagctcatgtttttaaactatccgaataatcctactggtgcagtggcaacggcagaattttttgaagacaccgtggcgtttgctgccaaacacgatatttgtgtggtacacgactttgcctacggagcaattggatttgatggtaaaaagccaatcagctttttacagactcctggtgcaaaagagacgggaattgaaatttatactctttctaaaacgtataacatggcgggatggcgagttggatttgctgtaggaaatgaaagtgtagtagaagctattaatcttcttcaagatcatatgtatgtcagtctctttggggcggttcaagaggcagcagccgcagctctgttggaatctcaacaatgtgtgaatgatttagttaagcgctatgaatctagacgcaatacctttattcaagggcttcgagaaattggttgggatgttacatctccagcaggctccttttttgcatggctaaaagttcctaaaggatatacttccgaacagttttcagatttacttcttgaaaaagcccacgttgtagttgcgcctggtgtaggctttggaacatatggtgaaggctatgtgcgcgtaggactgctgacagatgaagagcgcatgagagaagctgtatctcgaataaaaaaattaaatttattttaaaaacgcattgacaatcctttttgagttggcttaatatgtaagaagttaacgagattaataaccgataaatcctagcggtattttttatttagtatataatctacgaattcaatttaaataaatagcaactttcttattaagagtaggtggagggactagcccgatgaagcccggcaaccgacttaacgcatgttaagcacggtgctaattcttgcagcagcagctgagagataagaagagcaacgaaagcctcttcttaattacagaagaggtttttttattaacgatattaaacagcaagggagtttttagcataatgagcgaaatcgttgcaagctacttactacatgataataaagggaattttcataaaaaagcggaaggaatcgctttaggactaaccgtcggctcatggacagatctgccgcttttagatcaacagcagcttcaaaagcataaagggcgtgtcttgtccgtaactgagcttcaagattgcgaacgtgtaaacggatatttaggcggagaaattaagcaggctattgtcaaaattgcttatccaactgccaacttttcaagcgatttaccggctattttagttacggttttcggaaaactatcacttgatggaaaagtgaaattattagacttggattttcctgatgaattattagctgaattcccaggaccgcgctttggaatagaaggtatccgagagaaactaggcgtttatgaccgtccgcttgtgatgagtatttttaaaggcgtgattggaagagacatgacgtacttaacaactcagctgcgtgagcaagcgcttggcggagtggatttggttaaagacgacgagattttgtttgatagtgaacgaacaccctttgaagctcgtgttacagaaggaaaaaaagtactgcatgaagtatacgaaaaaacgggacaccgcacgctgtatgcggttaatttaacgggacgaacgtttgaattaaaagaaaaagcgagaaaagcagctgagctaggagccgatgctcttttattcaacgtatttgcttacgggttagacgtactgcaggcacttcgagaagatgatgaaattaacttgccgattatggcacacccagctgttagcggagcgcttacgccatcagagttttacggtttttcaaattcattactgcttggaaagctattgcgtttagccggagcagatttctcactgtttccatcaccatacggaagcgtagcgctttctcttgaagatacgacaggcattgcctacgaattaacgcgtcctgtatacaaatataagcagtctttcccagttccttcagcaggaattcatcctggaatggtaccgcagcttgtgaaggactttggaatcgacagtatcattaatgcaggaggcggagttcacggtcatccagacggagctattggaggaggaaaagcattccgtgcggcgatagatgcagtactctctcatcaaacactagccgaaaaagctgaagaatcaaaagagttgcaaaaagctttgcaactatggggaacagtagaggtgaaagcatgacgtcgttaaaaatcttttgtgactttgatggaacaatcacaaatagcgataacattattgctattatgaaacaatttgctcctccggagtgggaaagtattaaagacgacgtgttggcacagcgcgtctccattcaagaaggagtagggcaaatgtttgccttgctccccgtggaattaaaggaagatattatttcttatattttagagacgtctgctattcgagatggatttgatgattttattgcctatacaaaagagcaccatattccgctttatattgtaagcggaggaattgacttttttgtaaaaccacttttgggaaatcgagttgcggaggaaatgctctactgcaacggatctgacttttccggtgagcatatttccattacgtggcctcatacatgtgataaacaatgtacaaatgactgcggctgctgtaagccaacgattattcgccatcttgcagatgaaagagatcatacggttgttattggcgattcaattacggattttcaggctgccaaattagctgatacggtcattgcacgtgactttttaattaaaaaatgtgaagagctatctctaccgtatcgtcctttttctactttttatgatgtaattcatcatttacaagaattaacagaagaggtgaaagcatgagtatcatggctcagcaaaggttgcatgagcttgcggatataaaagacgagttggcagagcgcgattggttcttcggtacaagcggaaacttagcaattaaagtggaccaaaatccgacaactttctttgtatcagcaagtggaaaagacaaaagaaaacgtacaaatgaagattttttattagttgatcaatacggaaagcctgcagaagaaacgcatttaaagccttctgctgaaacgcttttacacgttaagatttacgatttaacgaatgctgggtgcagtcttcatgtacatacaatcgacaacaacgtgatctctgaactgtacggagatgaaggcgttatttcattcaaaggtcaagaaattattaaggcgctaggtatttgggaagaaaatacggaaattactgttccgattattccgaattacgcagatattccgactctagcagaagagttttctcatcatataaaaggcgatcaaggcgcgattttgattcgtaaccacgggattacggtgtgggggagaaatgcatttgaaacaaaaaaagcgctagaagcctatgaatttctatttagctaccatgtcaaactactgtcacttaaaggcattaagccaaaggtgcatttataaaaggaggaaacaacaatggcgcaaattcgcttacatgtaaacaataaaagaattgaaacccaagaggaagtatcagcttttctggcaaacaatgaagttatttatgaaaactgggacattacaaaacttccagaaaatcttcgtgaaaaatatgatttaactgatgaagaaaaaacagaaattttaaacgcttttggtgaggatattaaagatatttctgaacgccgcggctataaagctcaagatgttatctcgttatcggaatctacaccaaatattgatgaattgttaaaaaactttcagcgcaagcatattcatacagatgacgaagttcgctttattgtaagcggtcatggaatctttgttattcaaggaaaagagggcgaattttttgatgtggaattagagccgggcgatttaatttcagtaccagaaaacattcttcattactttacactaatggaagatcgtaaagtagtcgctgtccgaattttcgtgacaactgaaggatgggtacctatttacgcataacaattacttgtaaagcataggtcatcatcaccccgcttttacatctaaaagcggggtattctttggattaatataaaactaactatttttatgtgaataataagtttaataggaggaacaccatgaaaaaaggtaaaaaaatgctgtggccacttactatgctcgtgcttctagtctttgcactggctgcctgcacgaaagaacagccaagtctaaacgaggaagcacaggcagctccagcgcagcaagcggcttctgctaagcctgtacagcaagaaggaaaaaaggttacgaaagatacaaaaattgcgcttatttctgaatttacgtcaggcactcacgctgctcagtacataacaggtgtgacaaaagcggctaaaaaagcaggagtacagctatccgtttctgattcaaacaatgatcaatctaaaatggctgcttatttagacacggctattaaccaaaatgttgacggtattatgattgaccacggccgggctgaaacccttgagcctggcgtgaagcgcgcgatcgcaaaaggaattcccgttattgcaacagacgtagaattaaaagtagaaggcgttacaaccatcgatcaagacgattatatgcttgcgctccaggggctgaaacaaatgatgcaggacattaatggaaaaggaaacattgtatatgcgtttgttggaggctttgcgccgatggaaaagcgcgacagcatttataaaattatgatgaaccgctatccagatgtaaaacaaattgctacgtttggaagcgcaacggacaacacctcattagacacacaaaataaaatggcagctgtgttgaagcagtatccaaataaaggagacattgcggctgtttgggcaccttgggacgaatttgcaaaaggagtaacaagagcgattaaagaagcaggacgagacgagattaaagtgtacggagtagacttatctgatgaagatctgcaaatgatgcaggcaaaaaacagcccgtggaaagcgtcagctgccgtaaatccagcttcagtaggagaaaagcaagttgatctgcttcttaaaaagatttccggtcaagagatccctcgttattattcctttgatccggttttagtcaaacaaacagacttgcctaatcaaacgattaatatggatcagcttagtcagtacgtagaagaatggggtaaaaaagaatagaagtggagggacagatatgacgaatgagctttcaatgaagaacataacaaaaaactttggttcttttcaagcgctgaacaaagttgattttactgttcaaaaaggggaaatccatgctttattgggagccaatggtgccggtaaaagtacgctgatgaaaatattgtgcggagcttacgatgagtacaaaggaaaaatctttaaaaacggaggagaaatctccatttcttctcctaaagaagctaagcgccacggcatcggcattgtacatcaagaagtagatgtagcgctgattccttcgctgtcagtagctgaaaacattgtgttagacgtgcaggcttctaatgaaagtaagacatttgtaaactggaaatctatttataagaaggcggaagaagctctttctttacttggttcttctctatcagtcagaaaaaatgttgttgatttaactctatcagaaaaacagcaggtgcttattgcacgtgcaattgtacagaatgttgattatttaattttggatgaaccaaccgcacctcttagtgtggaagagacgaaacaattgttttctgtgatgagagagctgaagaaaagcaaagtaggcattatttacatttcacatcgccttcaagaagtggttgatatttgcgaccgcttaacggttttaaaggacggacgctatgtagctacaaaagaaacttcacatacatcaattgaagacgtgattacgctcatgttaggaacttcttctgtaaagcagtgggtcaaaaagtcagtagaaattggaaacgtacttttacatgtagaagcattatctcttccagggcgcctttctaatatctcttttcatgtaaaagaaggagaagtagtcggtattgcagggcttgtaggagcggggaaaacggagctttgccgaagtctatttggtttagagcaatatgtgagcggcagcgttcggttaaaagacaagaaattaaagttgaataagcagccgtattattatattgcacaaggcctttctcttgttcctgaagaacgaagaaaagaaggaatttttgttcatgaatcgattgccgataacttagttttgccaagtctgtcccgctttacaaattattcgtttctaaggcgaggaaagatcaaagaaaaagcgcagaaaacgactgggcaagttggcgtaaagtctcattctatcgagcagtcagttggaacgttaagcggtggaaatcagcagaaagtagcaatcggaaaatggcttgttacggattctgacgtactattgttcgatgagccaactaaaggggtcgatgtgggctctaaacgagaaatattcgacttaattacaaatcttgtgtcacagcaaaaaggcgttgtttatgcaacctgtgaattcgaggagctgctaggggtagcggatcgaatttatgttatgtacaacggaaaaatcgtaaaagaattatccaaagaagaagcaactagtgaaaaattattttattatacagcaggaggagtaaaagcatgagtgcggagtatgtaacagaacctgtagcgaaaccaaagagaaaaataagcgttttcgactttttttataaatatgggacagtcttaatgatttttgttattatgattattttttccattgccacacctaactttttaacaggagaaaacattagtgatatactgcgctctatttccattgttaccttaatcgcgcttggtgtaacgatatcgttaaccgtcaacggactcgatttatctgtagggtctacggctgggttagccactattttatcagcttctatgcttgttttacacagacaagaaattgcagtcgctatcattgttccgattattgcatcgcttcttatcgggttagtaaatgcttttttagtagtgaaagtaaagattcctgatattttagccactctttcaatgatgttcatcgtacaagggattttattaacgtatacaaaaggctcagctatttataccaatatgcctttatcaagcggagacagagctccgggaattttcattccatctttccttgcactggggcaaggtcatttactaggtattcctgtccctgttatcattatgctgctgactgtgctgcttgttcatatcgttttttcctatacgaagtttgggcgttttttctacgtaacaggagggaacatagaagcagcaagactttcgggtgtaccggttaaccgttatcgcatgtatgcctatatgttttcaggtttgcttgctggaattggaggagtcgttttagctgcccgtattggagtaggagaagtgaacgccggctcaccatttttaatggatgccgtagctgctacatacattggcttttccgtatttggagcagggaaaccgaatgtattcgggacgctgattggctctattttaattggtgtgctgttaaacggattaacgatgctaaatgttccgtattatatgcaagacattattaaaggggctgtattagcaggagccttggctttaacgtattaccgctcaaaacaaacatccacggctgtgtaaacagccgttttttttcgtttgaaatcgggaagaataaggaaaaacaatagtatagcctattatttatgtagaaagagggagtatagatgaaacgtgtcgtcattataggaggagtagccgccggaatgagcgcagcttcacagcttcgccggatgaaagaaaaagaagaagtggaaatctttgtgtttgaaaaaggtggagatatctcttacagcgcatgtggtatgccttactatctgtcaggtgttgtaaaagaaaaagacgatttgattgctcggacgaaacaagagtttgaggagcgaaacatctccgtccatctttttcacgaagtaaaagaagtaaatcatacaaaaaaatacatagtagcacaggatctaaaaacgcacgctgaaaaagaggtaacatacgatgaactcatcattgcaactggaacatcagctgttaaacccaattttatgagcaacaacatgccgaatgtatgcacattaaagtcattagaagacagcgaaagaatctatacatatctgcaggctcactccgtagagaaagtcaccattatcggcggaggatatgtcggaatggaagtagctgaagcaatgaaggctttgggaaaagaagtacgcatcattgaacagggaaagcagattctatctattttagatcaagaaatggcagagcatttgcaaaaacagctagatgacgacattttatttcatttcgaagaagaagtcgaagcattgctgcattcagatggttccgtcactcacgttcaaacaaaccgtcaaacatatcaaacagatttagtgattgtaaatgtaggagttcgtccgaacacgcaatttttagaaagaaacggactaaggatgcttgaaaatggagctattttagtaaacgagaagttggaaaccaacgtgcctcatatctacgcagcaggagattgtgcaacgagctatcaccgcgtattaaaaaaagatgttcatattgctcttggaaccattgctaataagcaaggaagagttctaggttaccgattagggggagaaaatagagaatttccgggtgttgtaggtacaagcattgtcaaagtgatggactatgaaattggaaaaaccggcatttcagaaagagaagcaagagaaaattctcttttatacaaagccattacagcagaggctccgagtcatgcttcttactatccaggagctgaaaagattgtaataaaacttgtttatcatcctgaaacaaaagagattttgggggttcaaatgattggtaaagaaggagtagcaaaacgaatcgatgtatttgccacagctattacttgccgcctcacaacagatgaaataacaatgttagatctttcgtatgcccctccttttgctacggtatgggatgctgtacaaattgctgctcagaaagctgaatagaaaaagatacagggacaaaagtatgttagctgaaggaagatccgaacgaagtgattcttgattaagaatcaacttcgttcggatttttttatggtgagggtgaacgcaggcttcatatatttagctgcttctagctgttgattggagggcaaggcgaaaactcctgcgggacaagcggttcagctcatgtatcccatttgttcgtttttagattgtattgatttcgttatgtctcaacctctttttctattcgacaagcagcatcttttgtcgaaaaacaagttgtaaaaaaaagataaatggtattcctatagtaatgtaagcgtttgtaaattccgacaaaataatttttttgcaaaaaaaatgtctattattgcgactctatttacatatttagtagaatttgtaataatgcgttataagctaatttctttgtcataggagaggattttgtgtttggagtgagaaatagaacgaaatcagagagattattagtagaaatcgtccaaaaaagacaaaagatggtgcagatcggagaagaaaaaggtttgactaatgaagaaaccgttacctgtagtcaagagcttgatcagctcttactcgtttatcaaaagcagcttttaaaagaagaggaagaaaagacatcgtttgccacactgattagccgctttttatctttttcaaagctgtaatgcaggacaagcattcgggatcgggcagtaaaacaattatgctgcccgtggcctctcttcacctttaaaaaatgttaattaaaaagatcataaacaaaataccaaaaataaacgaataggtagcaaatctttcatttccatcgccgtgactttccggaatcaactctttataaataataaaaagcatggctccagcagcaaaagctaatccatatgaaacgagagagtcaacaaaattagttaaataaaacccgagtaaagacgttgcaatctcaacggagcctgtaagggtagcaattaaaaatgcttttattttactgatatgttgctgagctaaaaatagcgcgaccaacagtccttcaggtgcattttgaaggccgattgcaagggcgattaagttccctgtattttcaacatttgaagcgtagctaacaccaacagacagtccttcaggaaggttatgcaaagtaatagcggaaacaattaaaagtgctttttcatcaaactgaatgccggttttagaatgctcaagatcaatgtgaggaatattctgctccaagagtgttaatgttacaactccaagcagtaagccaatggctaagggaaaaaaaccgccgctttgaagagattctggaatcaagctcatagtagaagctgctgtcataatacctgcagtgagcgcaagaagtatatctttccagcgatgagtgagttcttgattcaaaaacagaataggcaaagcgcctactccagtcgatagcgaagaaagaatgcttccaattagtacttcagtcataaaccgtctccttttacatattcttctgtttatcctcaattcacatcgttcttttagtttatgtttttttggtttctatgagcatgactattttaaaagtgaatagctttatgcaataaccttacaaaaaaagttgaaccagtaaaggttcaactttttaggtaaagtacaactcctgaacttggttagcaatgtgctcgagcttattggaaacttgaggaatgccatatcctacatacaaaggagatgtggcaaagcgaggaatgattttcgccgcaattttgccgtttttaagattataaaaaaataagttgtagctcgtgcagctacgatgaaaatggtttaataaatagtgagcagccgtttgaagataatctgcaaacgcgtgcagctctttgtcaagctgatccgttatcacgttaaattcaaaaaagcccattctaggttttacagataaattaaatgtgacgtgttcattttgggcaattgtgactccttcaaactgctctagtttcacattttcatttacatccatctcatttaaaccaataatttgcatatgaggatgtcgtaatgaccctccggacatgggaccatggtttttaaagaaaagaacagaagcatattctccgctgttcatcatagatatccatcgttcagtagcgaagctcagcaaggtgtatagatgttcctttggataaatagatagttctgaagaacattcatcggtctcaataataaccgtctgataagcatcttgcagaacgggaaacttatttttcagccaaatgataggtccttgtttttcaatgatgcctgtaagagattctacgtcgcaaaagggacaggggttttgccggttaacgattgtttcaggcttttgtgaaccaattgcggaattaaataataaatgggttggtttcataatcattcacctttttatgtaatggtcatatgtttattgtattaaaagcatatgtataaatccacttatatacattttttatcaaaaaaattgtacaagcggagagaataaccgatgaaataagcctgctttgattgactttgaagggaaattttagtattatcttgatatcaagataatattaaaggaactgattaaaatgacgaatgatgtaactagagaagagttagaccaatctcttaaattatttattgtactatctcgtgccaatcgttcaattaatgatcatgtgcataaatttattcaacagcatggaatgaatccaaccgaatttgctgtcctagagttattgtaccacaaaggccagcagcctcttcagcaaattggcggaaaaattctactcgcaagcggcagtattacgtatgtagtagacaagcttgagaaaaaaggtttcttagagcgcgttgcttgtccgaacgatcgccgtgtaacctatgcagctatcaccaagcagggcaaggaaatgattgaaagcatgtttccgagtcatgaaaaaagaattcatgatattttatccgttctgtctagcgaagaaaaggaagttgccatttcgatgcttaagaaactagggcactatgcagatgaatttttgccggaatcgactaattaattaaggaaagctcgtttgtttctgttgaacaaacgagtttttttctatgacttctttcatgaccaatcgacataaaaataaaaagtgacaaaaaattgaaattaacaggaatacaactggataaaaacgaattaggttacatacaggcaatagaggaaggggaacaaatgatgaaatttgaagattatacatatacgcgacctgatatgaatgaaattgaaaagcagtttgaaaaggccattacacattttacggaagcagcgtcagtcagtcagcaaaacgaggcaattcgtctagcaaatgatgcgtattcccagtacagcacaatggggaacatctgctatattcgtcattctatcgacacagcgaatgaattttataaagaagaacaagattattttgatgaaacacagccgcttttagaaggatatgtagagaaattttacaaagcattaatctcttcgccttttaaacagcaactagaagaaaagtggggaaagcagctgttctctcttgctgaaatgcagttaaaaacgttctctccggaaatagtaaaagagctccaggaagaaaacaagctatcgtctcaatatacgaaactagtggcgtcagctaaaattgtatttgaaggagaagaaagaacgttagctcagctcgatccgtttatggagtcacctgatcgagaaatgagaaaaaaagcagcagaagcgaaatttcaattttttagcgatcatgaagaggaatttgatgatatttatgacaagcttgtaaaagtgcggaccaagcttgctgaaaaattaggctataaaaatttcgtagaagtgggctatgctcgtatgtctagaataggctacgatgctgaaatggttgccgcttttcgcaaacaagtaaaagagtatattgttccccttactgaaaaactaaaaaagcgtcagcaggaaagaattcaagtagagagcttaacttattatgatgaaccatttcagtttgaaacaggaaacgcagtgccaaaaggtgatgaaaagtggattattgaaaatggacgggttatgtataaggagctttctaaagagacggacgaatttttttcatttatgcttgaaaataatttgatggatttagtcgctaaaaagggcaaagcaggcggaggctactgtacgtttattgaagaatacaaagcgccgtttattttttcaaattttaatggaacatcaggcgatattgatgtgttaacgcatgaagcagggcatgcttttcaagtgtattccagccgagatatggaaaccaatgagtatcactggcctacgcatgaaggagctgaaattcattcgatgagcatggagtattttacatggccttggatggaattattctttaaagaagacaaagataaataccagttttctcatttaagctcaggcttaactttcttgccctacggggtagcggtagatgaatttcagcatgctgtatacgaacgccctgagatgacgccttcggaacgaaaacaaacgtggcgagagatcgaaaagaaatatatgccttctaaaaactatgacggccatcactatctagaaagcgggggcttctggcagcgccagcttcatatttacacgtctccgttttattatattgattacacgctcgctcaaatttgtgcatttcaattttggaaaaaagatcgagaaaatcatgaacaagcatggcaagattacgttcacttgtgtaagcttggcggaagtaagccgtttttagaattagtagaggaagcgaatttgatctctccattcgaagagggctgcgtgcagtctgtagtagatgaaattgaaaactatttaaatagtattgatgataaaaagctataaaaaaagccgcgtttgcggctttttttattgacatattccttctttccatagaggaatcgtaagggtaacgctggttccttctccaacagtgcttttaatctcaaatattcctttatgctgatacaaaatgtttttaatcacaacaagtccaagaccggtacctgagggcttcgtggtaaaaaaaggcttttgaatgtgcgtaagcaaatttgaaggaatgccgactcctgtatctttaatgaaaatagtaagatctttagtatgctgagtaacgtttaaatgaatttctcctccgctaggcatagcttcgagcgcattttttaataaattaatgagtacttgcttaatttgatttgcatcacagcagatgtatgtatgcggggcttccacctgcgttttaactacgatattttttaatatacattctgattcatacagaagaataacgtcatttaaaatagtagagaatgcatgctttttcataaccgtatcatgaggtttagcgagcaataaaaattctccaacgattgagttaatacgattaagttcgctcagcatgatggttgtataagaatgatagcggctgctgtcttcatgaataagctgaataaacccattcagagaagtaagcggatttcgaatttcatgagcaattcccgctgccatttcgccggctaaagataacttatcggtttggcgcagaaatttttctgtttccttttcttcggtaaggtcgcgtgaaataccaaaaagcgcaacgacctgtttatcacgattaaaaataggtgaaacagtgatttctacatcaattactttgccgtcttttcgcttgtcttgggtttcaaaggcaaccagtgtttctccttttttaaccctttctaatcggctttcagcatcgccttttaagccagcaggaatagatggaatggcttttccgacaatttcttccgctttccatccgtatatttgctcaaaagcatcgtttactttaatcactttaccgtctaaactgaacacggcaatggcgtcgcggttgtatgtaaaaaaagattgtaaatactcttgagctgagtacagttcatcttcggttttgttcattttgaccgtcgtgatggcaatcaactttttagagaaatgagcacagtacaacaaaataatcattgtgatcagcgtaaatagaatgaaataaacgatatctaatttcacgaaagtcacagatgtaaaaaaagtgttgcttacataaaagtacaaaacaattattatggacattaatgtagaaattacaatagcgatatagctataataaataaagctaacaattattccaagaaacaaaaacaaataattaataacagcaggttcaatagatgtcatgtacgcaatataggcataatagcatatgaaaaaagaatacataatgatggcagggtgaaaacgaaagtaatacatagccgtcactaacagtaataaaatccctccgcttataaaaacaattatatgaggatcagctgcaatgaagtggtataacacaatgtggacaaaatatagcagccaaaaaataagtaaaagaataaaattccgtttttttatgaggttgtgtgattccataaaaaatccctttcttaaatggtgaataactttatagtcatctagtcgcacgatatagtgatatatcactcatattagcatagttacaactttgtgaatagccgaattgagcacttagaccaaggaagatagatctagaatgcagccggtcaataaactattaaggaaatatgatcggaatatgaacgaaatgaaggggatgtaaagcttttgtgataaccttgtaaaagtgaacttttttctaattggataggctatactgccagtagagccatatgaatggtgactacaaagaggctcagatgattcgaaaggagacggtaaaatgaacaaaagtttattagtcaagttatttggatcacttctagcaattatgttaatcacagcatgcaactcacaaacggatgaaaaagatgccacagaacagcaaacagaacagtcggatgatactcaagcggaggatacaactacagacgattcacgggaaacaatgaagcaagaccaagcagaagagtcatccggggatgaagcggcggatgatcaagaagaaccagcagacagtgctgatgaaaaaacaggcgacgaaagcaaataaacgtaagtatttctataaaaaaagcgactcaagtagagtcgctttttctattagttttgcacggtgatttcgcttgcttcatttaacgttacgttcactgtagatacgtctgcgttatctaaaagtaaatctgtaattcgatcttcaagctgttcttgaattgctcggcggagcggtctagcaccgaatgcagggtgatagccaagttcagccagtttttcttttacttcatctgctacgctcagcgtgatgttttgttcttgtaatgtttctttcaattcagcaagcataaggtcaacgattttaatcaagttatctttttcaaggtgattaaattcaatgattgtatcaaatcggtttaaaaactctggtttgaaataagatgaaagtgaatctaaaacggatgcctgcttaagtgcgtcgttttctgcatcaaacccaaccgtaattttcttttcacctacaccagcgttacttgtcataatgataaccgtgtctttaaagcttactgtgcgaccttgactgtctgttagacgtccgtcttctagaatttgcaaaaacatatgctgaacgtctggatgagctttttcaatttcatctagtaagatgatggaataaggattacggcgtactttctctgttaattgtcctgcctcttcgtgacctacgtagccaggaggtgaaccaatcaatttagacaccgcgtgtttttccatgtattcactcatatctagacgaaccattgcatcttttgagccgaatagttcttcagctaatgttttggttaactctgttttaccgacacctgttggaccgacaaataagaatgaaccaattgggcgatgcttcgcttttaatccagcgcgagaacgtcgaatcgcttttgctactttttctacagcttcctgctgtccgattactttttgagctaagtgctccgctaaatgcttcatttttgctgattcattttcttgaagtttaccaacagggatacccgttttcttttcaataattgcttgaatgtcagcaatatccacattcattttttgctgttcttcattcaattgtttttcaagagcagcttcttcatcgcgcagttttgccgctacttcatacttttcattctttaacgcctgctctttttcttttgtaatttcttttaagcgagcggccgcgtcatctttatttgtaatgcctgcctgtaaattcatttttgagcctgcttcgtctagcaagtcaattgctttatcaggcaagaagcgatcttgaatgtagcggtgtgataaatttacacaagcgcggatcgcttcatctgtatagctaacgccgtgataatcttcatatttactttgaattccttttagaatttcaatggcttcttttacagacggttcgtgaaccataacgggctggaagcgtcgttcaagagccgcatctttttcaatggaacggtactcttttaaagttgtagctccgactacttgaagttcgcctcgtgcaagagcaggctttaaaatattgcttgcgtccattgaaccttccgctgaaccagctcctacaagaaggtgaatttcatcgataaataaaatcacgttttttcgctgttgaagctcagaaattaactgcttcatgcgctcttcaaattgaccacgcacgccggtattagctacgagagatgctacatctaacagatatacatctttatttaacagcttggcaggaacttttccttccgcgatttttaaagctaacccttcaacaacagctgttttaccaacaccgggttctccgattagtacaggattgtttttgtttcgtctatttaaaatttcaatgacgcgctctacttcttcttcgcggccaataacagggtcaattaatcctgttttcgcaatttgagttaagtttcgcccgaactggtctaaaaagccgccgccatttccttgctgtggctgttccggtgcagcttgttcttgtgacatttgcttgaataaatcatcgatgttcataaagccgccacctccaaaacctgatgggattttatgttctttcataagtgcttgataacatgtatgacataaacgatattgagatttttggttatttgtttgtacatttaattgaatagatgcttcacgtttattacagttttgacaaatcatttaattagcctccctaaatgattttaatcgaagatcagcaggtgtttgacctttattgacctttcgtaattttattatactttgaccttttttgactttcaagtcttttgcttaaaaattttttgagggaagttcctcgcttatgtacaaaaggtagtacattaaaaaaagatgtgttttatgtgtacccgttctatacatgtaaaaacataagaggcattttgtacaatgatctgcttggagagggaattaatattaataagaagaaaagtggaaaaatgagtgcagagcctaccgttggataaataagttattgacagcaagaaggataaaaattatactcaagaaggtttgcacttaactgcgtaaaagcataaaagcgtttaagtgaaaaagaaagatagaaagggaatacctcatgaaaaaagaaatttcatttatacaatcaatagcggtggttttggtgctattagctattatttttgtttcattatttacgttaaagctgccgcctcatattccgctgatatttggtgtagcatttattagtgtgattggctttttgttgaaatataagtggacagaaatggagaaagggattttagacggtgtcagactgggcattaagcctatccttattttaatgctgatcgggatgcttattgcgatttggatggtaggaggaacgataccgacgattttatcctacggctttcactggatttcaccgcagtactttttaattagtgctctggttattaccgtattagtttcaacattcacgggaagttcattaacaaccgtcagtacggtaggggtcgctttatttggcgtaggaactgctattggtgtacatccagggctagcagcggggatgattgtttcaggagctgtgtttggagataagatgtctccattgtctgatacaacaaattttgcttctggtatcgttgaagtgccgcttcctaaacatattcagcacattacgtggacgacggttccaagtattgttattacagcaatcattgcactggtaatcggaatcaacggaaatcaggaaagcgtcaattacggggaaattcaaggaattcaagatgcattaaaacatacgtttaatttacatgtgttaacgttgctttctccacttttagttcttgttttttccatgagaagagtcgatgtactgccaacgttagttttaggtattgtaacggccatcattacaggaatgatcacacagcatgaatttacgctgagtcaattgttaggcgttcttcaaagcggaccggcagtagaatcaggaaataaagtagtggatgcgattgtgaataaaggcggactgcagtccatgatgttttctatttcccttatcatgattgccttgtcgctaggtggcttgatgagagcagttggaattattgatgctttgttagaaggattagcaaaacaaatccgccgcagcggagacgttatttttgctacgcttctatcttcaattggagtgaacgttattacaggcgaacagtatttatcgattctcttgcctggacagacgtttaagccgctgtatgaaaagtggaatttagatccaaaaaacttatcacgaacgcttgaagacggcggaacggttattaatgctattattccgtggggtgtcagcggcgcttttatttcaactgcattaaatattcccgcggctgactatattccatttacattctttagcattttatgtccgatcttttcaattattttagcatatacaggcattggcattgccaagaaaaaagctcagtcttaactgggctttttttgggggaaaaggacaggtaaaaaacgacaaaaaaagtatcattccacttttcaaatctataatttaataatacaatttactatacgtctttcttgttaatgtatttggatgaattcttatttctttattgatgaagaaatttgggttttgcggtatgataaataagctgtattggcgatgggatgaatgccctttttagcaaacatttaagaagggtaaagacaaatgaaaacactcattataaaagagaaaagatatttattgaggagagggtttctgttgaaaaaatggggcatcattgcattaatcactgtagctgtgctcggtgtgacagcggttttcaaccgagctgaaagtgatgatgtaaataaagaaaaattgaatttattatcgccttattcaaataaagtagatgtatatagcattacgtatcctagtgataatttaaagataaaagggtttctggttcagcctaaagacattgcagataaacattacccgcttttagtatataatcgcggaggaaatcgcgaacatggaatgattcgcgcaaaaacacttcagtatttatcatattgggcaagtaaaggctacgtcgttgttgcgactcaatacaggggaaatggcggaagtgaaggaacagagacgtacggcggtaaagatattgacgatgtattaaatcttattaagtggggagaacagcttccttatgtaaatcaccagaaaaaggtagcgctaggatattcacgcggcggcatgatgacgtatttaacgatgaaaaacggcgttaaatttgatgcagttgtcgtacaatcaggtattacagacatgtttcaattctatgatcaaagagggcctgaaatgcaacaagtactgcggacaattgtaggagatcctgccaagtatccagagaggtataaaagtcgttctgttgtctattggagcgacaaagtaaattcacctcttttgattttacagggtgatcatgatcgtaaagttcaccacacgcaggctgaaaagcttgtgaaacaactagatgagcagggaaaagaatacaaatatgtactgtacaaaaacggagaccatccgctaactgcttattatgatcaatataacgcggaaattgataaatggtttaaaatacatttagctaagcagtaaagaaattggaagcagttttgatgaatggaaaagagcagcttgttttatcctactacatgtaagcatataaaaaggggatgaagcaaaatgactcagtctaaaagtcaaaaagagcgtcagtggaatgtgcgaaaacaatcacaaaacccatcgcatggaaaagtaaaatcttttgaagaactatcagaagaaatcgcgcctaaacgtaaataaggtaaccgtcatataaaggaagacacaaaaaaggagagctgaagctctcctttttctatgtttttatggatttgtggaccacatgcccgcagatttgataaaaatacgcggatgcagttttaattgtgctaccataatttctgctaggtcttcaggctgcatcactttatcaggattgccatccgttaagttttctttatacgctaattccgttgctactgtacttggtgttagagctgttacacgaatattgtgtttgcgcacttctaacgatagagattcagttaagccgagcacgccaaattttgaagcactgtaagcacttgtaacgggagcgcctttttgaccagcagtggatgaaatattgatgatgtctccaccatttttttcgattaattgaggtagaacggcgcgcgttacgtagtaaacgcccattaaattcacatcaatgatttgtttccactcagctgggtctagctctaaaaagcttccgaatttaccgattcccgcattgttgattaagatatccgttgcccctaattttgtatgtagatgctcaactgctgcgtttacttcttccatagaagaaacatctgctgttgcataagcaacttgtacatcaaatgcttctagttcagaagcaacagcctttaaatctgtctctgtacgagcaattaaaccgatatttacgccttcttttgctaattcaatcgcagttgaacgaccgatgccttttcctgctcctgtaataagagctactttacctttaagtgattgtgccatgtatagactcctttcaatgttccgcataaacattcttcataataacaaagaattatccattactatcctatagaaatgcacaaatgatgtcaaaaataaagattattaaaatggcttcaagtataaatttccttttcatacaaaaactatagagactaaaaagaagaaattccgtttcttttcgttcaatgtagtggaggatgaacaatgcgtataaaaaaactatctgagttaacgaataaatccaaacagcggaaagaaaaagctgatgaatcgaaggactctaagaaaactagtgcttcttctacacaggaagagcagaaattatcggagagggtgggagataatttatcccgcatgaaaaaagcactgggacagagcacggacttagttgtgcgagagtttcgaatttcgattgaagaaaaattcactttaggtgttgcttacatcgacggattagtaaataaagacgaagttgaacactatgcgctggactccattatgcactatcacgatgaacatttaacacatgatgatggcatcgttaatatgtacgaattgattaaaagctatagtttggcagcgggtgaaatcatggaagcaaagacattggatgatgctcttcttcatgttttatcaggagataccgtactgtttttagaagggtatcaaacgtgtattgtggcaagtacaagaggatggagagacagggctgtttctgaaccacaatctcagaccgttgtaagagggcctcgagacagtttcacagaaacactgcgaacgaataccgcattgattcggcgccgaataaaatctccaaaactttggattgaatctcagcaaataggagagtttacaaaaacggatattgcgctcgtttatatagacggcattgcggatgaacaggtcattcaagaggtaaaggagcgtctttctaaaattgatatagacggtattttggagagcggatatatcgaagagttgattcaagatgaagattatacaccttttcctactatgcataacacggagcgtccagactccgtggcagcaggtcttttagaggggcgaatagccattttagtagacggtacaccttttgtattaatggttcctgccttatttattcaattttttcaagcggccgaagattattaccagcgcgcagatattagtacattgattcgtttaatgcgctacatggcatttttcttagctcttttaacaccttctgcttatattgctttaactacttttcatcaagagatgcttccttttgctttgttaattagtattgcagctcaaagggaaggtgttccttttcctgctattattgaagcgtttattatggaaatcacgtttgaaattttgcgagaagcgggagtccgattgcctcgagcagtaggttcagctatttcgattgtgggagcactcgttttaggagaagccgccgtacaagcgggattagtttcacctgcaatggttatcgttgtatctatcactgctattagtaactttgtgtcacctgtgtatgatatggctattgcagtaaggatgctgcgctttattttaatggttttagcagctacttttggcttgttcggtattatcctggggctaattttaatgattctacatttatgcagcttaaggtcatttggagtcccttatatgacacctatggctccatttgtgaagcgtgatcaaaaggatgttctgattagacgttcgatcaaaaaaatgaaaacaaggccaaagcttattaacgagaagaatatttcacgtcaaaagacgcaaaaaaactaaactgtgtaaaggtggccgtttactatgaaagcatttctaatgttatgtatctgttcattgctattaagcggctgctggagcagtcgagagttgaatgagctagccattacggttgctgtcggaattgataaagcagaagatggcatcattgttacagttcagctgattaaccctggtgatattcaggccaaaacccctacaaacgggccttctgttaccacattttctattaaggcttcgtctgtaatggaagggttaagaaaaataacgacaaaatccccgcggaaaatttatctttctcatttacgaatgctagtcattagcgaaagcatggcggaagacggtattgctgaagtgcttgatttctttgctcgggatcatgaagtgcgtaccgattattttgttgttgttgctaaaaacacgaaagcatcgagcgttctgaacgtattaacaacaatcgaaaaaataccagctaaccatatgtttgcttcattagacgtgtcacagcgtatttgggcacctactagaggagtaaagttaaatgaactgatcagtaacttaaccagcgagggaaagcaggcggtattatcaggggtattggtgaaaggcaatgtgaaaaatgcaggagatatgtcaagcatttctcgcactaatctttccacactgctcaatttcaaaggattaggtgtctttcaaaatgataagcttatcggctggttcaatgaagacgaaagtaaaggatataactatattacaggaaatgtaaaaagtacgttaattgttattccatgcgaaaaaaaagaaaaaaagcatgatatcatcggagtagaaatgcttcgaacgaatgttaaggtgacagctactatgaaaaatcataaacctcatattcatgttgatttaaaaggagaagcgaacgtggctgatgtagagtgtcaagtgaatttacaggacccagctgtaatcaatatgctcgaacgaaaaacagcagccgacgtaaaagaaaaaatgaatgatgcagtagaaaaagctcaaaaaacctataaaagcgatatctttggttttggcgaagcgttttacagacaagatgtaaagagatggtacaaaatgaaaagagactggaacagaatttactcagaggatttaaccgtcgatttagatgcaaaagttcaaatccgtcgcttaggcacgttaaataactcatatatgaagcaaatgaagcattaaggagaaagaaaatggagggatttatcgccttacttgtactgcttgcttatttgactaaaaaaataatgatcaacttccgaaaggaaaagtattatcgtgagatagtcgtctacctttgtcttataggtttgggtctattcttttggggagcgattacactccgtaaagaagttcctacgcctctgtactttttagaagcactaattaggcctcttactagaaccgttcatcatttgttattcacgtgagcaagcatgtaggagagaaggtgtgtatgatgcaaataaaagaatttattagtccgaaacaatttctttttctaatttatgttttttgtatcggaagcgccatcttggcagttccggctacattattagagacgaatagacaaaatgcgtggttttgcggtgtgcttgctattggctttgcacttttaatcgttgcggtgcttttatggctgattcagcgttaccctcagcaaacattcattcaaatagctaaaaaggcgctaggtccttatgccggaacgtgtatttctcttatttacattttctttatgttcattcagtctacgttttcgcttcgagacatcagtacatttatgacgactcaaattgtccctgaaacgctccctacgtggattcatgctcttgttcttttagctgttatatacggagggtatctaggtattgaagtggtagcgagaagcgcggaaatctttttgccgtggattgtggtcccctttttattgttaattgttttaaatattcctcagatgaaaattgatcgtctttatcctttttttgaatttagcatgggtgatttagtattagggaccacttattttttaggaaacccgtttatggaattggtttttattctaatgattacgcctcatataaaagatggaaaaaaggtaaaaagaatgtttgttatcggcactgtcgcatcgggcttgacgattacaattgcagttgcggcttgtatattagctcttggggcgaatattgcatcgatgcacagctacccagtttatttattagggaaaatgatttcgttaggtgcaacgattcagcatgttgaagtattagtagctattatttggatgttatctatcttttttaaagttgtcattgtgttctatgctattcagttaagtatcgtccaattgtgtaatttacgggtgcgcaattttttaagctttcctttaggtctaattattacaggcgtggcgtattacattattcccaatacagcgtacttcaattattttgaaaaatattactggccgttttatttatttgtactaagcgtctgttttccgttgttatttattgctctttcttatataaagaaaaataaggcagctaaaggcgatagaagccaacaaacatagcattatttatacgcatgtggtataatacgatgacaattcaagaagaaacgccgtgcacgtttgtatatgtacgggagaggttcgaaaactccctctataaaaaactaagatcatcgttgatgacaaaagacacggttttagcgtgtcttctttcacgtgcttttctatcaacgcgtctttttgacgtgtatgctggcgaggacgtgtatcttagttgctttttagggagattgctggaaaagagcagtctcttttttgtgttataaaattagtcacaaagggaacgaacggttcaataaagtttcttcttcttttgatttcaatcaaaaaggagacgaacaataatgatgaaaaatgaaaaagctattgttgtatttagcggaggtcaagatagtacaacatgtctattttgggctttgaaaaactttaaagaagtagaaacggttacttttcaatacggtcagcgtcatagtcaagagatagaggtggcaaaagctatcgcagctgatttaggtgtgaagcataccgtactagatatgtcacttttaaatcaattagcaccaaatgccttaacgcgagatgatattgagatcgagcaaaaagaaggagagttgcctacaacgtttgtagatggccgcaatctgttatttttatcatttgcagccgtattggctaaaaacagcggaggccgtcatatcgtaacaggcgtttgtgaaactgatttttcaggatatccagactgtcgagacgtatttgtgaaatcgttaaacgtcacgcttaatttatcaatggacttcgagtttgtgattcatacaccgcttatgtggattgataaagcagaaacgtgggcgttagcggatgagctaggagcgcttgaatatgtgcgtgaaaaaacattaacgtgctacaacggtattgttgctgacgggtgcggcgaatgtcccgcatgtcaattgcgaaaacgcgggttagatcaatacatgcaaacaaaagaaggaggagagaaataatgctgcaacaaatgtatcctcaagtatttcatgactatgaatatgaactgaacaaagatatgcagtttgctgcggcacattttgttcctcacacagaagcaggaaaatgccgtcaagtccatggacatacgtattttgtaaatctaactgttgccggagataaattagacgaagcgggctttttagtaaactttgcgctattgaaaaaaattgtttctggtcaatttgatcatacattattgaacgatcattctatctttaacgaagaaaatccaaatgattttcctacaactgaagttgttgcccgtaaaatttatgagttggttcaagaatatctagacacactaccaaataagccttcttgcgtacaagtattcgtgagggaaacgccgacaagttacgtagtttaccgcccaaagaaggtgaaaaaacgtggctaatacaattccagtacttgaaatattcggaccaacgattcaaggggaaggaatggttgtaggacgtaagacgatgtttgttcgtaccgcaggctgtgattattcctgcagctggtgtgattcagcttttacatgggatggatcagctaaaaacgatattcgtcagctaacagcagaacaaatttggacggagctaaaagaaattggaggagagtgctttgatcacgtcaccatttctggaggaaaccctgcgcttatcaaggcaattggttcacttgtagagcttttgcacagtcatggggtaaaagcagctctcgaaacacagggaagccgttaccaggattggttcctaaagatcgatgatttaacgatttctcctaagcctccaagttcattaatgaaaacaaatttctccgtattagacgatattatagagacattaataaaggaaaaacgcatggcgcatataagcataaaagtcgttgtatttaatgatgaggactttgagtatgcaggggctgttcatgaacgttatcctgaggtcccattttttgttcaagtaggcaacgaggacttaacgacaatcgataatgcgtcgttaacacaagaattgcttaaaaagtatgagtggttaatcgataaggcagtggcagctaaaaacatgaacgatgtaagagttctgccgcaggttcacgcccttgtttggggaaataaacgaggcgtgtaagcgcatagcaaaaaatttacaaagaaaaataaaaacagatgtatacaaaataaaaaaacgctgttagaatgacaatcgtagaaagagaggaaatgcaaatgagcggtcgaaaagatgaagaattagaaggtgtatctctccttggaaatcaaggtacaaactatttgtttgaatattcaccagagattctagaagcatttgataacaaacatccaaatcgtgattattttgtgaaattcaactgtcctgaatttacgagcttatgcccaaaaacaggtcagccggatttcgcaaccatttatattagctacattccagatgaaaaaatggtggaaagcaagtcgttaaagctttatttgttcagcttccgtaaccatggagatttccatgaagactgtatgaacattattatgaatgacttaattaaactgatgaatccaagatatattgaagtatggggaaaattcacaccacgcggcggaatttcaattgatccatatacaaactatggccgtcccggtacgaagtatgaagaaatggctaattatcgcctgatgaatcatgatttatacccagaaacaattgataatcgttaatttgaacaaacaggttgtgtatgcaacctgttttccattgcaaaaacaacaggtgagaaggtgaaagaatgtcacagagatcagcattagtattaggtgcaagcggacttgttggtcaagaacttttaaaaatgttattaagcaacagcttatatagccatgtgacagtgtttgttcgaaaaaagctaccaatcgaacacacaaagctacgtcagcttgaaattgatttttcagagcttgataagcacgaagaatgctttgcagttgatgatgtatattgctgtttaggcacgacaatgaaaaaagcaaaaacaaaagcgaaattcattaaagtggactacgaatttcctttaaaagcagctaaatgtgcagaaaaatatcgctgcaaaaactttttaacgattacagcaattggtgctgatcttcgttcgccattcttttacagtaaagtaaaggggcaagtagaagaagatatcgcaagcttgtatatccgttctactcactttttccgcccatcgttattattaggcaagcgccaagagtttcgcctatttgaaaagattgggggatacacgttaaagtcgtgttcattttgccttgtaggaaagtggagaaagtatcgtccaattaaagcgtataacgtagccaaatcgatgatgaaagctgctcttgaagataaatgtggggttcatgtacatgaaagccaagacatttatacaggtgaatgctattattcgtttaccaacggcaagcgagtattatcaaaataaagaaaagcctcttcataagaaggggctttttttctatcttccgtcaccatccgcatctccatctccaccactatctccatcgccatcatgatcgtggttagaagcagattcactccagcttgtgtaggagttagaatcttcttcggcataattcatgggttcaacggatgtttttttatttgaagtttgtttgcgtttaaaaacgaactgcacgatgaaaaaaagaatgacaataagagcaacgataaacaatacagtatcaaacatgctagtaattcctttcgataagaagatagtagtagcttgttcttattgtcacacgaaaataagcccctttcaagaaaaaatggggcctgtttttgtttctttaaggaaactttttttatctcagccatatattattgtataaagaaacattttagaaaagagggagtacagtgaaaaaaagttcgaaggatgttaaggtgcaacagtatatttacctcatgtataagctggggattattacagaagaacaaaagaatcaattctttcaaaatcaataaaaaagcaaccgcttttgctttccggctgcttttttcctttacatagctggattaatgatggtgtagtttttgtggttcacaacagttcgctgttctaagtctaaatcgcggtagtttgtcatgtaagtcaaatccacaatcacggaattttcatttactttttcgacaataccctgtaggccatttttaaattctatcaagtttcctacctctgctattttcatcattcatcgctcctttgttttaaattagttcattataaattttttcaataattttaattttaaaaatagtaaaactagttagcgttttctttttttacaattttgccttaaaactgggaattagtaaagggttttttgaaaaaatataaaataaaattgaaaaaataagtaaaatgtgctgagaaataaaaggaattggtagctttaacgaaagagagaagcaggacagttccatctttgttcatctttcgttataataaacgaggtataatcttgtcataaattataagaattagaaggtgtagaaattgaaagatactggactcgtgctcgaaggaggcggtatgagaggcctttatacaactggagttttagattactttatggaaagaaatctgtaccttccgtatgtaattggcgtttcagccggcgcttgtcatgccacttcttatttatctagacaaataggaagaagtcgcaaagctaatttagattttttagaggatcctcgctacttgtcgtggaaaaattattttaaaacaaaagagatatttggaatggatttcgtttttgatgaaattcctaatcagcttcttccatttgactttgaggcatttgctgagcgtacagagaagcttgtagtaggagcaacggactgcgcgacgggagaacccgtttattttgatgagtatgaccgggacattttgacagcggttcgcgcttctagttcccttccatttttagcacctgtcgttacatataaaggaaaagagctgttagacggaggaatcagtgatccgattccaatcaaaaaagcagtgcaggatggatatagaaaaaatattgttgtgctaacgcgaaacgaaggatatcgaaaaaagaaatcaaatatgctttggttattgaaacgcaaatatcgtcattatgatgggctgactcgtgcgcttgagaatcgctataaattgtataatgaaacattgtcatatattgaagagcaggaaagacaggggaatatctttgtgattcgtccgcaaacccctcttgtagtagggcgaattgagaagaatcgtgagcgtctcgacgctctttacaaccaagggtataaagaagctgaagctcaatttgcatctctgcaaaattggctgaacagttaaaagcgaggtgaaactgaatggatgaacaaacagtaataaacatgttgaatgagttaagtgaaggaaaagtaaccgaaattaaagtcaaaaaagaggactttcttgtttttcgaccttttttagtaaaccggcctgatttcaaacatttccgaggaatagccggacgcggaggcgattttacctatacgtatctagaaattcctaggagttaaacgaaatgatggcattatttgattatgccttatataatggatgtatgagcctgtacagtagagaatatactgttacaagtgcttgtgcgtttatttaataacgtacggtaagagcgaataaatgtgtgcagctataggagggatattatggatgagtttcgaaaaagtacagcacctttttattttgcagatcatatatggaaagataaaaatggaatgacgacttatgggatgctgttaacgaaccggcccgaagatgacggggactatgacctccattcgttattagaagaagcatatgtagatcataaaaaaattctaattactactgtttacgataacagtgaacagcagttgaccggatacgtgatacatttagcagatgatcaagacgtctttacgtttatggatgatacgggtgctaaactagtgattgatttctatgacgttgtagaaattgagattgaagattaaaaagagctgaatgttgattacaacattcagctcttttgtgtaaaagtagatgaatttaaatgtttatcataagaattataggggaaaaacgaatgaagaaatttctgattaaactgaaataaagcgggaaaatatacctgtattttagaaaaattaccgtgattatgacaaaaaacaaggtacaatgtcataattgtgttccgaacgtaattttgttcatcaaacttaaagaaatgtaattgaatcgttcggtgaaacccctatatagctatgatagagtaataccatacgaaatttcaggaggtattacctatgaaacatagttatatgaaatcaatggtagtagcttgtttagctactctttcatttataggttttaatgcaacagctacagctgcaactaattataaagtagtcaaaggcgatagtctttggaagttaggtaaaagatatagtgtaacaattgacgatattaaaaaattaaacaatcgtcaaggagatatgatttatattggtgaaacattagctattccgagtaagacaaaagtgctggctgctgaaacaacggaaccttcaacggcagcaccggctaatacggctaagccggaaccaaaaccagaagccaaacccgcagagcaggaaacacctgcagtttcgatttccgcaagtgaaaaagatttattagctcgcttagtagaagctgaagcaaaaggcgaatcgtatgaaggaaaagtaggggtagcaacggtggtgttaaaccgtgtagattctccgaagtttccagatacggtaacaggagttattaaacaagttgtcggaaaagcatacgctttttcaccggtccaaaacggatcaattaacaaacctgcttcagaagattcgaaaaaagcagtagagcaagcattgactagaaaagatcgtttagacgattccatttacttttataatccaaaaacagctaccgataactggatccgttcacgtgctgtcattaaaacaattgatcatcatgtatttgctaaataaaaaagagccgttcgggctctttttttagtctaaaaagatatttcgttccaaactgccttcagaacccgttaaaaccagaccaatatcggtatcagcttctaagttctgaacgatggtaaaaggcactttatgttggttagccgcttgaatgtagggggagaggtatgaataagacaaggagccatttaaaaacaaatgaccgtctttcactttttttaaaagaggctttatttttgctgtatcctttttcatgacttgccctttttttagcgcaatttcaatattctcacgtagagcagttaagaaatatcttctttcgtctctttttgtttcctttgctccgtacattcctcgttctaagtattcttctagttgatcagacattgcgtcacttcctttcattataaactataaacgattatggctataagtaaaagggacaggaaaaaaggaaaatcactgtgctatatcacctgtttttttgctgagtacaaagaaaaacaaaaaatgtgttgaaatttagcctaaaatattgtttaatgtaaatagatagaaaatcatatcggttttttattaaaggtttgtaagcgattacagatatacatacatagcagcgtttggggagacgctcctatgattttatgttcaaagcgcattgtataaaaaggggattatatagctttagggcatatacggtcaagcaaagggtcagataaattaataaaaaatcgctatgtattttcataagaagaacggtcaacatttttgttgagcgttctttttatgcgttcatattatgtttattcctcattgcagcaactgatgaaaattgtaaaggtgcattcctcgtttcatctctcttattttacataagttacatgcagtatgtttcaaagccttaaaaaatatatgtctatacgcttgtttaatcctaacgaggtggtagaaaaggaatattttttaagaaatcacaaaaaaagaggcgatcgcctatgcaagaagtaggtgaataacatatgtaataaagagaatgaaatataatttgaggaggcatgtatcatgcaagaatttgatattaatgacataagaagaccattcggtggttttggaggctttggtcgtccaggattcggtttcggtcgcccaggattcggttttggtcgcccaggttttggtttcggtcgtcctggttttggctttggtcgcccttggggttggggctttggagctccatttcttggagggttagttcttggaagtgcactaggaggtccaggttattacggttatccagcaccatattatccgccgtacccaccatattatccttattattattaaaacaatgagcgctgataaagcgctcttttattatgtccaatccaaggtatatatagaatgaatgcaagacgttacgtttagaaaatgataacagttttaaataaggaatgaacgcttaagctaaaggagacaagttttccttgcaacaattgttgattttgctataataacttcggtggcatttttggtcactgggtgggcgagggatagatgaaaagaaggaaattagattgaacgcattatttgaaaagttgtttcgtttaaacgaccaccaaacaactgttggaaaagaaagcttagctggggtcatttcatttctttccatcgtgtatattattgctgttaattcaaccattttgtctgatgccggtattccgcttgaagcaggaatattcgcaacagtagcttcggcttttgtaggctgtgttattatggctttttgggcaaatgcgcctcttattctggtgccaggtatggggattaatgcattgtttacgtatacgatggttcaatcaatggggttatcttggcaagaagggttattagcagtagtgatatccggctttctttttatagcattagctttttcacgactgtctgccaaaattgtctcttcgattccgcattcgctaaaagaagcgataacagtcggtgttggcttatttttaacatttatcggtttgcaaaaagggaagcttgtagttccaagcgaaaacacttttgtagcacttggagacttgtcagatccgtttgtgatcagtacgctgttgacgttaattatcacaatcgtactgtttatccgaaatgtgaaaggtaactttttgttaagcatgattgctggatcagtccttgccttcttacttggtgtaagaagcggtgcagaaaaaggacagtccgctgggagcgtgaacgacttctttagcagctttggcacattgtcttttggagccattggagacgttgcgttttgggcagctgtcttttcattaacaatggtattgatttttgaaaatatcggtttgctgcatggtcagctaggtatgatgaatcaagatagcaaatttccgcgagcctttcaagcaacagccgcctcagctttgctaagcggcgtgtttggaacaagtccaacggtgtcttctgtagaaggagcatctggtattgcagctggagggcgaacgggtttaacatcgctgattacaggagttttatttttaagttcacttctgtttattccatttatcaagctggttccagatagtgctattgcacctattctcattgttattggagcattgatgattcaaaatatcaaaaacatcaatttacaggacttaacagaaggtttccctgcatttttaattattgcgcttattcctcttacgtacagcattgctgatggaattgcatttgggttcattgcttatccactgcttaaattattccttggtaaaatgcgtgaagtatcgatgtttatgtatgtaagcgcgctgttgtttttcttgaattttgtgctgcattatattgcttaaaatagacagctgagtacttttgctcagctgttttttgtgtttgcggtaaagaatcctctttttagatatcatactccgtatttcgtgtcctttggctaatctgccgcttctaaaatgacgtttcctgcgtaaagtagtacagaagtcggagggggatataagggggagaaaacgatgggaattaaattaattaaaatatcagccgtttattttggaattggcatcatgttggggtattatatgtcaattgttcacagctatgctttgacacctgttcacgtgcacatcaatttattaggatggacgtcgcttacgttagcgggacttatttattatttgtttcctgcatttagcgaaagtaaattagccaaactgcacgtatggttgcataatataggattacggtcatgatgattggtttatttttcatgatcgtactagaaaaccaagcttttacacccgtagtggcatcaggagcaacacttacagctattggcgttttaattttcgtatatcacatccttaaaaatttgaaatctgaacgataaacgaagaaggtcgttgacgatggctgctaatttcaaaaggaaaaagaaccagctatagcgaatatacatgtaaacaaggtgaaagtgtgatttacataaaggtgtgctaggcatctttataaggaggggtaagctgcacggatttctagctcttataaaagccaataaaagggctgattataagtttcttgcggcggagatactatgggagaacatcaacaattagtgcgtgttagggagctagcaaatgaaattattcgacttcgtcttcaagaccgtacgacttatgacgaattagagttgcaaaataatgtagagttgttgtctcgttctgtggttgacttagtaaacattatgttagccgaagatgtggattcgtctacgtctttaaaagctacagcttctaaaatgaaaatggtgtataataacatgcatcaagctgagaaaaaagattatttgcatttctaattgctaggctccttttcgccacaaacgaaatggaggtgtacgaggcagatgctatcgtcactaacgacttctgaagctattgtagcatccgttcttgcactagttgtcattgccgtttccattatcttttttgccactcttattatggttgttgttcgacgagaaagaatcagcagcttggttaatcacggagagcatgcagatgggaagcaaaaaagcttaggtgaattttttcgttctttacgaaaaaaataactaccgttttcttattaaatagataaaagcggtcaatttaaacgttgaccgctttttttaggttgtttgcttatttttttctaaaacaatacgcgctgcttcactaactgatgacacaacagcagaggcgtggcgctgaacagcttcaggagctgtaaccatagcgaaactgttcggcgttaattgaaacataggaatatcattaaatgaatcccccacacatgcaatttcctctggttttagctgaagataatttaataaaatttcaatggcatttcctttgctgatatgtttaggcataatatccaaacactgcttggcagaaatatatgtatcaatataatcaccaaactcttcgttcacttctttttgcagagctaccatttcatcatgatctccaagaaccgtgattttagatggcgaaagagtttgcccaaatgaatctgtcatttcaatttgttcttcgatagggaaaaacatgtgagtttcaattgcttcaataatttcatttcgctgctctacataattggtgtcgtttgaacagacaagcgtaatacggttaggatctatcgtttttttataaagttgaaccgctaaatcattttcaaacacttttctatgaagttcttgattttctttggtccacacaaatcctccgttttggcttatgcgatgaaatgtattattaatatcagtagaaatttttaaaatttccgtatccattcgtccagaagcaagacaaacctctaccccttggcgctgaagttcactaagtgcgtctgcattatgctgttctacgtatttttcttcgtgtaaaagagtgccatctaagtcgcttacaaataatttaatcatttcttgaaaattcctttccttgaaaaatttcccgagataagaacgttacaaatttattacattccttattctatcagtgtttcccaagaaactcataaaaaaagctcaaaccggcggtaaattcaaagagattgagccataactacatcaatttttcccgcaggagtcttcgccttgcccttcaatcaacagctagaaacagctacatgaaacctagttcaccatcacaatgaaaaaatccgaatggagttgattctcagtcaagaatctggattcaccgttcggatctttcttcaactaaaatacatttgtcgcagcctttttttcaggtttgttcactgtaaaaaaacagccgcggtctaaaagaccgcggccatattttataatacgttaaaatatttcgcttcaggatgtgcaaaaacaagggctgtaacagaagcttctggttccatcatgaaaccgtctgttaactgaatgccgatgtcttcaggtttaagtaatttaaacagttttgcttggtcctcaaggtctggacatgcaggatatccgaatgaaaaacgctgaccttggtatttggctgaaaaacgctccgccattgtaaagtcaggcgaatcggggaatccccagcggtcacgaatttgctgatgaacacgttctgctaaaccttcagctagttcaagcgcaagagcttggaacacgtgactctttaaaaactcgccgttttctttaaatttcgccgcgcgttcgcgaatgcctgttcctgctgttacagagaagaaacatacatagtccatctctttttctttaggctttgcaaaatcagataagcacaaggactgtccttttgcttgtcgagggaaggtaaagcgttcaatttctgttttttcatcagcaggatcataaataatcaaatcatttccgtctgcttgagcagggaagaactgataaataaccgctggcttaattaagttttcttttagtgccagttcgagcaggtcatcaacggtttcctttaattgaacagcacgctcgtctttttcagcaagcagcttattcacttttccttttagtcctaagtgatggcctaaaagcatctgccagttaatatacggaagaacctgtgccaaatcgtagtttttgacaacgtgccgctttaaatcagccggtacaaaaacaggagcgtccgttgaaatggaggatctttctaaaacagccgtagctgcttgagcggtttgaggctggcgttctcgaaccgttactttcttttcttgccgcgtttttaaatctgctaaaagctgaataacttcttctttgttctgcagcttatttgctaacgctaatccgtccatcgcatctttggcgtagaggaccgcaccttcatattccggggcaattttaaagtcagtaaatttacgggaaagggcagcgcctcctaccataattggaacatcaatgcttgattgtgttaaatcttgtgcagttaaaaccatttgctgagctgattttactagaagacctgacaggccaatgatgtctggcttttcgtcttttactgcttcaatcagctgctgcggcgttactttaattcctaaatcaattactttaaaaccattgttgctcaaaatgatgtctactaagtttttaccgatatcgtgtacgtcgcctttaaccgttgcaagaattactttgccttttccagaatcattttcagttgcttccatatgaggttctaaaaaggcaacggatgctttcataacttccgcactttgaagcacttctgctacaatcagctggttgtcattaaacaaacgtccaacttccgccatccccttcataagcggtccgttaataatatctaacggatcatcatattgagctaaagcctgttctaaatcaggaagtaatccttcttttgtaccttcgacaatatacattgccaatcgttcttcgagtgttaacgtagaaatttctacttttgcttctttctttttatcacgataaaagtcggtaaacgtgcttaacgtttcatcagttgtgttaaataataacgcattagcaagctcaatttcagcttctggaatagaagcatagcgctctaatttttcggtattaacaatggcataatcgagtccagcctgcgtacagtgataaaggtaaacggcatttagtacttcacgtccgactggaggaagaccgaatgacacgttacttacgccaagaatggtcaggcaatcaggcagggcttctttaatcattttaattcccttaactgtttcttcagcagaaccaatatattgttcatcaccagtccctacaggaaacacaagagggtcaaaaataatatcttttggattaaagccatgtttttcaacaagcaaatcatgtgagcgtttagcaatctctacttttcgttctgcagtaacggccatgcctgtttcatcgattgtaccgacaaccagagctgcaccgaatttttttactagcggtaagattgcatcaaaacgctcttcaccatcttctaagttaatggagttaataatgaccttaccttgtgagtacgttaaagctttttcaataactttctcgtccgttgaatcgattacaagaggaaccttcactttttttacaacttcttgaataaattcctccatgtcttccatttcttcacggtctggatctgctaagcaaatatcaataacgtgagcaccgtttttaacttgagcacgcgcaatttcagatgcttcttcaatttttccttccgcaatcagacgcttgaacttgcgagaaccgattacattcgtacgttctccgacaaaaagagggcgcatagaatcgtcatatacaagtggttcaataccggttacagcatggttatgctcggagcgatcaagcgaacgaggcgcaacctcttttaccgcttcagccagtgctttaatatgagcaggcgttgtaccacagcatccgcctacaaagttcagccagcctttatcagcaaaccctttaattttttgagcaagcagctcaggggattcatgataattgccttcttcatccggaagtccagcatttggataacagctaactgctgaagtggctaggtctgaaagagagcgaatatgatccgtcataaattcagggcctgtcgcgcagttaagtccgactgaaagaggcttcatgtgttccagtgataagtaaaaagattcgatatcttgaccagcgagagttgttcccataggctcaattgtccctgaaatcataataggaacttcggtttttagtttttcaaacgccgctgtaatgcctagaaacgcggcttttacgtttagcatgtcttgacaggtttcgactaaaagtaagtcaacgccgccgtctaacaagccccgagcttgctcttcgtacgattctactaactcagagaatgtaatgcctccggtaacagagagagttttagtggtaggaccgatagctccagctacgaacctaggccattcgggagttgaatatttatcgcgggctgcacaagcaagcttcacagcttcgatattcaattcatacgccaagtgacctaaatcgtattcatcaagtacggtagatgttgagccaaacgtattggtttcaatgatgtcagcacctgctgcaaagtactcttcatgaatgcgctgaatcacatgaggcgctgttcgagtcaaatattcgttgcagccttcatattcttcgccgccgaaatcttcagcggttaaatcagcatcttgaatcatcgttcccattgctccatcgatgacgagtattcgcttctttagttgttgttcgataagtgagctcatttatatcttcctttctgatgtaacaagttgcttgtcatgaatatagcgtgttagaatttcggtcatttcatagcgcataaacggcgtaattaagtaaataccgtcaaataactcatatgctgtatcaattaagttttttgcaatcgcaagaccttcgacttcactgcgaattcggtcatttcccgttgcatccatgcgttctagaatatcttcggataatttaattccaggtacttcatggtgaataaatcgagcatttcttgcgcttgttaacggcatgataccgatgtataccggtgttgttaaatgtttggttgcttcgtatacctcttcaatttgcttagttgaatagagaggctgagtaatgaaataatgagccccgcagtcgattttcttttccaaacgctgaacggctcggtctaagtgacgcacgtttgggttaaaggcagctgcgatggaaaaattggttttttgtccaagcggtttgccggaataagatagtccttcattaaactgagcgattaaactaatcaagtcaaatgaagataaatcgtagaccgaagtggcgccagggaaatcgccaacttttgacggatcaccggtaattgcaagtacttgattcattcctagcgtatgaagtcccattaaatgagattgaagtccaattaaatttcggtcgcgacaggtaatatgaataagcggtcgtgcttttgtttcttgctgcatcagtgttgccattgccaagttgctgatgcgaggtgaggcaagagaattatcagctaatgtaatagcgtctacgccgactttatcaagtgcttttgcgccttctaaaaatttcgtcggaccaagctgtttaggcggatctagctcgacgataaccgagcggcgcttcttcacaatttcatgcatatgaggtttatcctgctgctcacgctcttgaaccgtaacggctggtctcattttaacgactttgcttgtaatcggaggcaggtcttttaaggcagatgacattgcgcgtacgtgagctggtgttgtaccgcagcatcctccaattaagcgaaccccttgttcgcggaataaacgcgcgctttctacaaagtagtcttcattcgtttcatattccagttttccttccacatacgctggaaggctggcattagggtaagcagataagaaagcacgatcaggaagcggtacttcttcaagagactgaatcatatgataaggacctaaacggcagtttagcccgacaacatctgctcccaacgcttctaattcttttaatgcatctgctaaaggacggccatcttgcagtacgccaatatcatgcagggaaacgtgggtaataataggcttatctgtttcttttcttgccagtgtaagaacggtttttaattcttcgaaatcatagtatgtttcaaacaaaaggccatctacgccttcatttaaaagccaaaacatttgttcacgaatgcttcgcttaacctcttctaaactaatagcgtttttttggaaggaacgaattccgccgagtgtaccaaccacgtaagcttgatcttttgcagcttgttttgctaattttacaccagcaacattgatgtctttgactgaatcttctaatccataacgggcaagtttttgataattagcagcgtacgtatttgtttgaataacgtttgcaccagcttctacataggctctgtgaatacgagaaacctcttctggtttggtgatgtttagttcttcaaaacagctgtcaataccgtgtgagtaaaggagggtaccagtggcaccatccccaattaaaattttagactttaaatcttcaagtaaccccatgtcaaaacctccttaaattgttccgcttctatttcacgagtgattcgttttatgcaatatgccgataaaatagaaaaagtcttcttaagaagaagacttttttcgccttcttatcttccaagcaataaattgcttgctggatttagcaccatgtctctaacgactggttgctgaggtttcaaagggccagtccctccacctctcatgataagaatcaattttatataattgaaacatatttttttaaatagaaagaatacttatttaataatttatctgatttttagaaattatacaacagtaaattgtgaatttccagcaaatattgaggggaatttaaaagctaaagggaaaatatccgtatattttgtttggaaatgactgttatgttaggggttaaggagttttttgtgagaaatacaaaaagaaaatgaaaaataaaaaataaacgaaaaggcacaagcgctgggatatgcatagatgtacacgtaaaaaggctcgtctttttttaatcgtttctacatatagtgaactatgaagggtagaagggtgatgggcatgaaaaggtggaaactcacgctgcaggttgctgctacgtatgtaggcaccgttgtaggagccggttttgcaacaggcaaggaaatcgttcaattttttacacagtacggggaacttggaatggtcggaattttggtcagcggcttgttttttatttggctaggttcgaaaatgatgctgctttcgcacgcaattggggcttcttcttatcagcagcttaatacatatttatttggtgatgtgcttggaaaagcggtaaacggtgtaatgattgtcattttatttggagtaacttcagtcatgctagcgagtacgggggcaataggaaaagaacagttcgggctgtggcctcctgttgggatgatttttacaattgttttaacttatatatttatcgcaaaaggaattaacggtattttaatggttaattctcttgttgtgccgatgatgttttcatttgcttttatcatctttgtgccaaatatcagctatttctcactgattcaaacgaagccggatttaacgctcgtcacgcagtggaagtgggcggttagtccctttttatatatttccctaaatctagctttggctcaggccgttttggttccattaggaagctccgtgaaagataggagcgtgattaaaaaaggggccgtaataggaggatgtgtacttacgtttatgcttgtttctactcatcttgccctttccaatttgccttattcatttcaacttgatattccgatgagtgccgttgttaaaaatatctcagcgtgggtgaatgttttatttacggtagttgtgttaggcgagatttttactacattgattggaaatgtatttggaatcgctaagcagcttcagtcatttcttcccctgaatgacaaacaagcttttgcgtttattatcttggcttgctttattattgggcaattcggatatgcccagcttcttgagtttttgtatccgatatttggctatattggactagcttttgtatggatgctatgtattaaaaaagaaaaaataagctaaaagctggattttaaagaatagatgtgaaaaaacgaagttaaatgatgtgacaagtcgattttactttgctataatgtaaaacaaataagactatagcagtcgaatatattatccttcggggtcgggtgtaagtcccaaccggcggtgataaagcgtatgcttttaagcccgtgacccgttttcatacgatgtatgttagcggtggatctagttaaaatctagagccgacagtaaaagtctggatgggagaaggatcaggaagcacagttgtttttttgtgttgaattaataagggacacgcttgccttttttaaagctacccttgtttttgtacacaaaatataactgtttatttcgtatacaattagcggaattttgcatagataaaactgattcagctcagccgaccccttggacatttgttcaaggggcttttttattttcagtggttgggggaaagataaatatgaaaaaaaagcagctgctatttcaaaacggtataagaagttggaatagcgccaaagcaggtgaagaaaatgttcacaggtatcattgaagaaattggaaaaataaaacgtattcaaaaggccacagaagcaattgttcttacgattgatgccaagaccgtgttagaagatgtgaacttaggggacagtatttcagttaatggcgtttgtttaaccgtaacggcttactctcaaaatgaatttacggtcgatgtcatgccggagacgattaaagcaagtacccttcagcttctaaccgttggatcacgtgttaacttagagcgggcgatggctgcaaatggccggtttggagggcatttcgttagcggacacgttgatggaattggaaccattgtaagcaaaacacgtaaaggaaatgccttttattatgaaattcaagtcgatcctgaacttcgtgaatttatgatgttaaaaggatctgtttccgtagacggaacaagtcttactatttttgatgtcagcaaccaatcatttactatttctcttattcctcatacggtgcttcacacagtcgttggagacaaacagcgaggagacaaggtgaatattgaatgcgatatgttagctaaatatatgcatcagatgatgacaaataagtcaactcctggcgcctcgaatcgttcaggtaacatgaaggatttattacagcagcatggttttacaaattaacagtgaggtgaaagagatgtttcataaagtagaagaagccattgaagagttaaaaaagggaaaagtggttattgtatgcgatgacgaagatcgagaaaacgaaggagattttattgcattagccgaaaaaacgacgcctgaggttattaactttatggctactcatggaagaggattaatttgtacacctgttaatgaagaaattgcgcataaattgaatcttcacccgatggtagcgaacaatacggatgtacatggaacagcatttacagtaagtattgatcatatttcaagtacaacaggtatcagtgcatacgaacgctctgctaccgttatggctcttgtaaatgaagcgacggtagcaagtgattttcaacgcccaggacatattttcccattgattgcaaaagatgggggcgttctgcagcgtgcaggtcatacagaggctgctgttgatttagcagtattagcagaaggaaagcctgcgggtgttatttgtgaaattatgaatgaagatggaacaatggcacgcgtaccggatttaacaaaaattgcagagcaatttgatttaaaaatgattacaataaaagatttgattgcctaccgccgcaaacatgaccagcttattagccgtgaagtagaagtgagcttacctacggcatttggtgagtttaaagctgtaggatatacaaataaacttgataataaagaacatgtggctcttatcaaaggtgatattgatcacaatagccccgttctcgttcgcgttcactctgagtgtttgactggagatgtgtttggttctgaacgctgcgactgcggtcctcagcttcacgcagctcttacgcaaattgaagaagaaggacgcggcattctgctgtatatgcgtcaagagggcagaggtattggcttactaaataagctaagagcatataagctgcaggaagaaggatacgataccgtagaagcgaatgaaaaactcgggtttgctgcagatttacgagagtatggaatcggtgctcaaatcttaaaagaccttggagtcaaacaaatgaagcttttaacgaataaccctcgtaaaattactgggctaaaaggttacgaccttgaagtgatcgagcgagtgcctcttcaaatgccggcagtggatgccaataaaaaatacttagatacaaaagctaaaaaattaggtcatttattacatttataattttacactttttttcgttataacaaatgaagctaattcatgaaaagaaatgtaaataactatatattaatactagcaggaggaacaaaagatgaattatttatatgaaggaaatttagtaggcacaggattaaaaatcggaatcgtggtagggcgttttaatgaatttattacaggccgtttacttagtggagcagaagatgcgctcaaacgtcacggcgtagctgatgaagacgtagacgtggcttgggtgccgggcgcttatgaaatcccattaatcgccaaaaaattagctgaatctaaaaaatatgatgcagtgattacgctaggaaccgttattcgaggagctactccacactttgattttgtatgtaatgaagtagcaaaaggcgttgcatctcaaagcttacaaacaggcgtgccaattatctttggtgtattaacaactgaaacaattgagcaagcaattgaacgtgcaggaacaaaagcaggaaataaaggatgggaagctgcagcatcagctatcgaaatggctaacctttcaaaaatgattgaaggataatagataccattccagtttttgtaagttgaagagtcgaaagaggctgaaacaaaagtatgttagttgaaggaaggtccgaacgatgaatcgttcggattttttcattggcatggtgaatgtaggtttcaggtatgtagtggcttctagctgtagattaaagggtaaggcaaaggcttctgcgggaaaagccgaagaagtgtgaccccgaagaagcgtaggcgacgaggaggctcagcggccgcccgcggaaagcgaagtcttgcacggaaatcaacagcggtgtagaaagcgatctatactatctcatgtatcccgtttgttcgcctttagattggattgatgtagctatgtctcaagctcttttgaatagaagctagctatgtataatttggctaaaacgtcttactctaagtaataattaggtcgtaaaagggagacgtctatgcctcattatactgctttttttgcattgattattatcagcacagccgttttgcttacagtattcatacgtaaaaaagataaaaagctagtcgttttgcttttttttatcattggaatggcttatgtactagagtatgttgtatttgtgttgtttgaaagttacgattacgatcctgattttatgaccaatgaatattttgataatttgtttggttccttaacttctcaagcgtttgcttttccaatcatggctatggtggtagcttcttatcaattaaaattccgctatattttattcatttcaactatgtttatggggattgaagaattatttttacactgggatatttatacacatcactggtggaaaacagtttatacaggcgttttaatgactataggctttagcatttcaaagatttggtatgtatggctaacagaacggtatatgacatttgtgcattacactacatttgttctcgggatgctcgccattacttctactattatgtttatgctgttagcatattttcataataattggttttatacgggatggtttgcgtcggctactcatgattccgtaaatgccacgatgatttacgtttgtattgttacgattctcctcgtttggagtgtagccaaagaattttttgttggagctggaatgattatagcggggctgcgtatagtagatattttactgattcactatggggttttgctggtatctattaccacttcacttgttctttttacgcttctacaagcgggtgcattcattctgagcgttatgcttcaaaactttattatgaaaaattgttatgggacgagcaaaaaagacgttgcgtttccagcgaagaactactaagataatacgtaactcaaatagtttagttcaataatatttgaaacaaagaaaaatgaattgacggttatgcgtattatttgtaagataggaaagcaaataatagaaagccgaaacaggggagtgaaggattcgtgaaagagtccttttttgtagaaaaggtacttaataataatgtattaattgctaaacaccttacctatgatgaagttgtgctaattgggaaaggaatagggttcaataagaaaaaaggcgatgaaatcgatgcaaaagccgtggagaaaatgtttttgttaaagagtgaagaagagcaagaacagtacaagcagcttttagcgcaggtggatgaagacgtgattgaaatgatgaatgatattgtaacgcacattcaaaagcgtgttgacattcctttgaatgagcatatacacatttcattgacggatcatatcgcgtttgcgataaaacgttttcagcagggaatggggcttaaaaatccatttttacttgaaacaaaagctttatatccagaggaatatacgatcgcatctgaagtggtagaaattattagtcgcaaaataggcgtacaccttccagtaggagagattggttttattgcgcttcatatccacagtgcgctgactgaaaaaaacctgctggaagtgaatcaagactcgcagcttattcaaacgattattaatgtgattgaagaatcgcttcatctgcaggtagacaaagaatctgtgcactatatgagattaattcgtcatttgcattttgctattgatcgagtaaaaacaggagaaaaaatagaagagccaaaaaaaattgctttgctattgaaagaagaatatcccctgtgttacaatgtgtcttggaaagtgataaaagtaatgcagcaagcgttacatttacctgtgtatgaagcagaagcagtttacttaacgatgcatctgcagcgacttataacaaaaacggatttataaaatcatttcaatacgtgttactgatacgatcaggcatgagtgagaaatgaagcgatgtgtaattggatgagtgtatccatttatcgtttctttttcctcatgccttttttgttacaagaaagcgcaatcatttaaagtctaggcttcaggacaccaggagatgtaatgagttttctagttaaagaaagcgttttatgaaagcgcgttaatgatttacgtatcaaataaatagcttgttgcacactaaatatataaaaggaggtaagcgccatgtttaaaaaactttttggagtattacaaaaagtcggaaaagcgcttatgttaccggttgcgattttaccggcagcagggattttacttggagtagggacagcgcttcaaaaccctacattgttggatgcagtaccggcacttggtgcagactgggttcaattggtttcaaatgttttgtcgcaagcgggtcaaattgtatttgacaacttatcgctattgtttgccgttggtgttgccgttggtttagccggtggtgacggtgtagcaggtattgctgcaatcgtaggctacttaattatgaacaaaacgatgagcacaatcttagttgctacaggacaactagatcttgacaaaatgggtgccaatccagcttacactagcatcttaggaattcctacgttagctacaggtgtattcgggggtattatagtaggtattttagcttcatccatgtataatcgttatttcaatattgaattaccatcttatttagggttctttgcaggaaaacgatttgtaccaatcattactggggtattttcaattgttttaggtgttattatgattttcatttggccgccaattcaaagcggattaaatgctttctctactaacatgattgatgcaaacccaactttatcagcttttgtatttggattgattgaacgttcattaattccatttggacttcatcacatattctactctccgttctggtttgagtttggtgattacgttaataaagcaggtcaacatattcacggtgaccaaaagattttctttgctcaattagcagatggcgtgcctttaacagcaggaacattccaagttggtaaattcccgttcatgatgttcggattgccagcagcagctcttgcgatttatcacgaagctcgtcctgaaaacaaaaaatatgtagctggtatcatgggttcagctgctttaacatctttcttaacgggtattacagagccgcttgagttctcattcttattcgtagcacccgtactatttgcaattcatgcagtatttgctggtttatcatttatggttatgcaattattaaatgttaaaatcggtatgacattctcaggtggggttatcgattacgttctatttggagttatgcaaaaccgtacagcatggtggctagttattccagtaggtttagttctagcagttatttactacttcggtttccgctttgcaatccgtaaatttaacttaaaaacaccgggtcgtgaagataaagaagaaggagaagaagatgtaaaagtagaagcagcagagcttccaacaaatgttttagctgcacttggcggtaaagaaaacattacacatttagatgcttgtattacgcgtttgcgtgtatcagtagatgatgtaggtaatgttgataaaaaccgcttgaaaaaacttggagcagctggtgttctggaagttggtaacaatattcaagctattttcggtccgaaatctgacacgttaaaaggtcaaattcaagacattatgaatggcaaaacaccggttgtcacaaaagaagagacaaaaacaattgaaaaacctgttgcaacatctgaagtaggaagcgataatggtaatgatattgtttcaccgattgagggagaattggtacctttatcggaagtaccagatcaggtattttcacaaaaattaatgggtgacggttttgcaattattccgaaaacaggcacagtagttgcaccagtggacggaaaaatagtaaacttattcccgacgaaacatgctttaggtattgaatcaacgactggacgtgaaattttaattcacgttggtattgatacagttaatttaaaaggcgaaggttttgaagctttagttgcccaaggcgatgaagtgaaaaaaggacagcctctattgaaaattgatttagactttgtaaaagaaaatgcgccatcgacgattacgccgatcattttcacgaatttacaagctgatgaaaaaattgatatcttaaagcagggccaagtttctcaacaagaagcaaatattattaacatttcaaagtaaaaaggagattgatttaacatggcacaaaaaacatttacagtaacagcagactcaggaattcacgcacgtccagcaacaactttagtacaagcagcaagcaaatttgattctgatatcaacttagaattcaacggtaaaactgtaaacttgaaatcaatcatgggcgttatgtctttaggtattcaaaagggcgctacaatcactatctctgcagaaggttctgacgaagcagatgcacttgctgctcttgaagatacaatgagcaaagaaggattaggcgaataatgacaaaggaaattcaaggcattgccgcttctagcggcattgctattgccaaagcatttcgtctagaaaatccagaattaaccgttgaaaaaaaatcagtaactgaagttgaagcagaagtagcacgtctagaagctgcgctagaaaagtcaaaatcagaacttgaaattattagagagcacgctcgtaaagaacttggagatgacaaagcagaaatctttgaagctcacttattagttctaagcgatcctgaacttattaatccaattaaagataaaattacaaatgaaaatgtaaacgctgaacatgcactcgatgaagtagcggcaatgtttattaatatgtttgagtcaatggacaatgaatatatgaaagaacgtgctgctgatatccgtgacgtaacaaaacgtgtattagctcatcttttaggtgtaaacgtttcaaatccaagcttaatctcagaagaagttgtcattatcgcagaagatttaacgccgtctgatacagcacagttaaatcgtaagttcgtaaaaggatttacaacagatattggcggacgtacttctcactcagcaattatggcgcgttcaatggagatcccagctgttgtaggtacaaaaacagttatggaagacattcaaaacggcgtattagtaattgttgatggtttagatggcgaagttatcgttgatccaagcgaagaaacagtaaaagcttacgagaaaaaagccgctgaatatgcagaacaaaaagctgagtgggctaagcttgtaaatgaaaaaacggtttcagctgatgattatcacgttgaacttgcagctaatattggtacaccagaagatgtaaaaggcgtattagaaaacggcggcgaaggcgttggcctttatcgtacagaattcttatatatgggccgcgaagagcttccgacggaagaggagcagtttacttcttataaaacagttcttgaacgtatggaaggcaaaccagtggttgttcgtactcttgacattggtggagataaagagcttctttatttaaatctaccaaaagaaatgaacccattcttaggattccgtgccattcgcttatgtctagagatgcaagacatgttccgtacacagcttcgtgcgcttctacgtgcaagcgtatacggtaatctgaaaattatgtttcctatgattgctactgttgatgagttccgtcaagcaaaagctattcttttagaagaaaaagctaaacttcaacaagaaggcgtacaagtttcggaagacatcgaagtagggatgatggtagagattccttcctcagcggtaatcgcagatttatttgctaaagaagtagatttcttctctatcggaacaaacgatttaattcaatacacgcttgctgctgaccgcatgaatgagcgcgtttcttatttatatcaaccgtataacccagcgattcttcgcttggtgaatatggtaatcaaagcggctcacaaagaaggtaagtgggtaggcatgtgcggagagatggcaggagatgagattgcaattccaattcttttaggtttaggcttagatgaattctcaatgagtgcaacatctattctgaaagctcgttctcaaatccgtcaattatcaaaagctgatatcgaacctcatttagatacaattctatcaatgtcttctacggaagaagttattgagttcgtaaaatcaacttttcatattggataataaaaaggtgtgatcatatatgatcacaccttttttatcttttaagcgaaaatagtaggtagaagcatattcgcaaacagcattgtaagaagtgctgctacgatcatgccaaggctagaaaaagtaccttcaatttttccaaattcaaaagctcttgctgtacctgtcccatgagaagctactcctaaaagaagacctcttgctagagaagagtgcagtgcgaggagcttaatcagttttggagcgaccatacatcctactacacctgttataatcacaaacataatggtgatatttggatctcctcctagcgtctgagatacattaactgcaataggaatcgtaaccgatcttggaatcaagctatgaaccagcgttgattgcaaatgaaacactaatgctaacagcatggaagatatcatggcagcaaacgtaccgagccctacgcttaagctgatttcaacacgatgttttttgagtaaatcaaaatacttaaacataggaacagcaaaagcaacggttgctggtccaagcataaagctaatagcactggcaccttgcttataatgatcataagagccattcgttactaataagataccaattaaaagaatgggggctagtaaaataggggaaactagcatagacttatattttttatagagcacttttgtgccgacataaacgagcagtgtaagcggaagagcaatccatgtgagtaatgtcattttagcgtaccttcctttcttcttgaaatatgttctgcaatgattcccgttatagacatcacaataatcgtactgattgtgataataatcacaatctggattccaaaatgcatcaatacatctccataattgatgagtccaacgacggctggtatgaaaaatagtaatagttctcccactaacagtgttccaccttgttcaacccagcttaatttaattactttaaagtacagtaagaaaaacagtaagaaaaatccgatgatactacctggcactgggaggtcaaaccactgtgaaatactttctcctattaaaaacagagccgttagtaataaaatctgtaaaatcaccataatcagtttcatgattagcctcctttatttatgttcttattcattcattcctagtttgttgagacaataatggagtcgtctatgctgaaaagacgactccatcatgggaaaagagaaactatttggattttgcaaatggggatacaacttgagtaaatgaatgctacacacttatcttacaaaaaaacgactataatatgaaatatataataactatgataactattctttttagttatagttgaaagaaatctctttacaaatgcgttggtaaccttttcaaaaaagagtttgtgaaatacaaggtctaattatttaataaaaggcaattaaaaaaagagatggagacatgcttaaatcaattcaatctaaagacgaaccaaggggataaatgatttagtatgaatgacttgttacaccgctgttgatttccgtgcaagacttcgttttccgcgggcagccctgagcctcctcttcgcttccgcttttcccgcaggagtcttcgccttgctctccaatcaacagctaaaagccgctacatatatgaaacctacgttcaccaccataaaaaaatccgaacgagtttgattttctattaagaatcaaactcatttggatttttaattaaactacttttgtctcagctttgttaaactgtacttttaatataatcaataaaagcctgtgtagcgtaagagatatagcgatcttttttaacgattaaagcaatttcccatggaatagcattctcgagattaattactttcacatgctccaaatcaagtttttcacataatgaataagggaaaagagcaatgccgagattagcagctaccaactctccaatgaagtcccactgagagcttttaaaagcaatattaggggtaaatccattttttaaacattcgttatagaccatttcatgcatggtgaagtcttcatgaaaggaaataagcgtttcgtcttttaactcttttaatgaaatcgtagaatgctgagccaacggatgagatttatgaacaacaagctgcagcgtttctcgggctaaaggagtcgtaaaaaacatgttttcatcaactggaagtaaaactacgcccacatccacttcgccttgttccacaaatttttgcattcttttagcgccatattccactaattgaatatgaatctcagggtattgctctcgaaatgctttaataatagtaggaaaaaacaatgtaccaataatagggggaatgcctattttgatggttcctctttttaaatgcattaaatcatagagggaatccgataaatctcggagagaagataaaatgctttctgcttgctcgtacacaattattcctgcatcggtaagctgaacttgtttgccagcgcgatcaaacaaaggtgtgccgagctcttcttctaatgatttaaccattttactgagagaaggttgagaaatatgcagcgcttcagaagctcttgtgaaatttttatgtttagccacttctgttaagtaatgcaaatggcgaacatccattttgtatacctccgtgttcatacatgctaattaataagatacacacattctaccacattcacaatcagctctatacctttctttcctatcaaataaaataatcagtagaagaggtagtgaatacgaaagaaattgccaacaatatatatttacacattgtttattttagaagtataatatataaatcagtagaacggttacatatcgatcacagaatcaatcaataaggtggttagaacggttgagtaaagcagatgaaataagagatatcgtttatattaatggccatgtaaataaaaaatgctttattacatatggaattgaatttaaagagttttatcattcccttcctacgccgcttgcaaatatattattgttaaagcacggttttgaagacagtgattaccattaccaaacccatatggactacgtagaagaagaacaaattcatcttttagcagaggatgatgtttataattatggtgatttttgttggattgattttgaggatgtatcttcgttagatttgttagaacctcaagatattgcagcgctgctgtatttaggtcatttaaaaaaaccgctcaattcgccatttaataataaactcggtaatcaatttgtttatttagctcatgatgatggattttacaacaaaatctattttcgagacgtgtacgatatgaagcatattttaagccgaatcattccgttgaaaatgtcagaaattaagcaaaaaagatttgtatttagaagaaagaagttagaatatccaatattgccgctcgtgttagcaaatacgcttcttactttaacgaatgacggtttgtttattgattttgaacacatggtgcaatcccgtagagatattaaaattcctttgtatacaatcggtgactttgacgacatgaatgaaatgtataatgatcggtttgagcacaaagagatgagtaaattgcaggcgcatcttgttctcactcataaagagctagagtggagcattgaagaagttcaatagtctaaaaagaggttgagacataactaaatgaacccaacctaaagacgaacacatgagatacatgagctggactgcttattacaccgcagttgatttccgtgcaaggcttcgctttccgcgggcggccgctgagcctcgtcgctttcgcgcctgcggggtctcatcccttccgcttttcccgcaggagtcttcgccttgccctccaatcaactgctagaaggaacgaaacagataaaactatattcaccatcacaaaaaaacgaaccactaatcagacatgttgattaatggttcgtttttcacttgggctaaaatatttttgtcccagcctctttttgaatagccgtataaaatggatttttccattccattagtacggcgtagttgtgtgaatcttcatcttcaatatagtttgctgcgagaccaataggcgttctgccacagcgcattaaaaaggtcataaccgggtcgtagagagttccggcagatacaaggttcatgtattcaacgggcgtgtacaaggaagacactgatgcgtatccagggatgcggcacccgccgagcagcctttctaacttgtaatgaatcacaacttcatataaagactgcaaaagcagcttcccaagccccatcgatcgatgcgaaggagtaacgcatacgtccactacataaagcgtattaccagaagggtcgtgcgtatgaatatatccgcttcctgttacttcatcccatgtatgagcctcatttccttccactgaaacaatcgcgcttgtgatagatccgcatattgtcccgtctatctccacgcatagcgctccatccgtaaaaagggaaacatggttatttaactgatctttgctccataataattcagaagggaaaggagggggaaaactttcttcttgaatccgaatcaactcatcgaagtcatttgatgtatatgatcgtaccgtacatgtgacaggcttattttgatgaaagacaaagcattgctttttatacactgcttttttgcctcctttaagaaaaaattttcagataattaagtataccatatggaaaaaagaaattatttcatatttattgaagaatttgacgagaacgtgataaagtaaaaaagattcgaactattagacgaggtgaaagaaatggatgttgaattaaaaggaaaaacagcgcttgtatttgcggccagccaagggcttggcaaagcgattgctgccaggctcgcagaagaaggcgcaaacgttatgattgcaagtcgttcagaagagaaactaatccaagtagcggaagagatttcatatcttggaagcggacaagtgttacataaaacggcagatgtcacgaaaactcaagacattcaagatgttattcaatatacagtagattcgtttggaaccattgatattttaattaataatacaggaggtcctaaagctgggaacttcctttcgttaacagatgaggattggaagcatgcatttgagttaaatctcctcagctatattcgtatcattcgtgaggtagtgcccgttatgaaaaagagcggagggcgtattgtcaatattgcttcttcttccattaaagagccaatcgctggacttattctgtcaaatacattccgtaccggaatcgtgggacttaccaaaacacttgcttcagaactagcagaggacggtatcttaattaacacggttgcgccaggaagaattgcaacagaccgagtgaaagagctagataccattcgtgctgaaaaattgggagtagacgttttagaaattgaagaagagatgagagaccaaattcctcttaagcgctacggtcagcctgaagagtttgctaaagccgttgctttctttgtctcgggagcgaattcatatatgacaggccagtcatttctaatcgacggaggcatggtgaaatccatttagttacatagaaaaaccctgcagccgcagggttttttgttaaatccaagttgtaacttgatctaatggtaaacgatcgctagcgtgtgcttctttagctgcttttccaactgagataagcataactggaatgtatcgatcctcaattttaaattcttctacaaatttttgagcgttaaatccgcccattgagcaagtgtctaatccttttgcttttgctgcaagcatgaatgtcatagatgcaagagaagcattcgtaaacgctgcatcgcgggcaaaagcaccgtttttataagcgccgttaatttgtcctgacaaaatattttttacgtcttctgtcatgtgacctgcttcgactagtggattgtacacgtcatctacatttttattggcttctaaatcacctaagacagctactacagcgcctgcttctgtaatttgtttttggttataagcaattggaagtagacgttctttcgcatcttggtctgtaataacaacgaaatgccagtgctgtaagttccaagctgatggtgacttcactgttgcttctaaaagttccgttaattcttctttggttaatttagctgaagagtcatattctcgaatcgatgtacgttcatttaccacatcaaaaaaatcttttgtcataataaaaacctccgttaaaagtatgtatttctttagtgaatcgatgcacattttataatgatacactattgaagtcaatttatatgcttctagtatacccgctcttatgtgctgtcactcacaaaaaaatgcatacacttcttaccatcggcttaacgtgattgacgagatgtaagataagcttcaattcgatcacaggctttacgcagcgtgttcatggaatacgcatacgacaggcgtacatatccttcaccgtgggaagaaaaagcgctgccgggtactagtgcaacacccgcttcttttactaactccagggcaaaatcaaatgaattactgtggaagttctgaatagaagggaagatataaaaagcacccgtcggcttttctacgtcaaatcccatgtttactagtcggtcataaacataattcagtctttgttcgtattcttttttcatatctactgcatcatttttgcctgctgtcagtgcctcgagtgcagctgcttgagagacagaagaagcacagctcacgttgtattgatgaacttttaaaatatgtttggctaaataagaaggagcaaataaaaggccaattcgccagcctgtcatggaatgagactttgatactccgttaataacaattgttttctctctcatagatgaaatggaggcaatggactgatgttttttatcaaaaacgagctcgctgtatatttcatcagatagtacaaaaatatttttatcgcttaaaagagcagcaatttcttctaattcttgctgtgacaacgtcacgcctgtaggattagacggataaggtaagatgacgcatcttgttttagacgtcaaatgttgttggattaaatccgctgttagtcgaaatcctgtttcggttgtatcaatatgtacaggtttagcgccgtttaaccggataagcggttcgtatcctgggtaaacaggtccaggtaaaataacttcggagtcttcttctaaaatggtgcgaagagcaatatcgattgcttgactagctccaatggtcacaatcacttcatcagctgggttatagtgcaactcatatttttctttgacaaattgagctgctgcctcgcgcagttctatcgttccagcattgtgggtataagaagtttggttatcatcaattgcagattttgccgcttcttttacatgctgtggtgttaagaagtcaggttgtccaattgtgagggataaaacatcttgatattgtgagaccatattataaaatgtacgtattcctgataattcaatttctttgacacgtttattgattaagtgctccatagtttcaaatccttccgcgtattttcaactcattttatcacaatgaaaataggtaaaaaaccactatttgcgcgttttgcaaatagtggttttaagttaggtgttatacagcttattataagcagttgttagttcataaaattgttcttcgtctctgttatctaacgcatcgtcgataagagatttcaaatgctgtttattaaagtttgtactcatagtcgttaaaatacgatcagcttctttcgcgtaatagtgttggtaaggtgtgtactgagatgagtgaggatagtgattcatattttttcgataagaactcataacataaacctcctttttaaaaataaaacgcagcttctattacttgaaatgtaccctttctatatagttgttaaccctgtttttagctgcgaatgtgctaaggtatgtgttagggaatcagaggttcctcgcttcacgtttaattctagattaaaaataataagcgcataaaaagacctgcatatatatgcaggtcttgtatattagtcagtgtgtatttggccttcacgccaataaacgggggaaacgtagccaaaatcaacttcatgatcgtccaatgttacaacgcagtgatcagagccttcttgttctttcatatcttgatatacagcttcttctacgttttcaataatggtcatttcattatcgtcattaaaaagaatgacggagcctttcatattacgaacaccttcttttaagattattcattcactttgtgtagtataaaccgttttggctgtagagtccacagctatcttcgatttcttgttaaaaatttgtgaacaggcttttaggaatgaataagaaaccctctaaataaaagagtaaccgacttgtctattctttcttgaagggtagcagagtcgggttggttggtacaccagtagagaagtgtgccaaaaaaattaagtatagcaatagaagccatttcttcggcagggatatcgactataagttcacctcggtcttgtcctgtttgaaaaacttttgtaaaatgagcacgcattttttcaatttgaagaatttcagattgttgaaaggaactgttggtaatagcaatatgaaaccaagagcggattaggtgagggttcgcttcttcgtttgattgtgctagtaataaaaacagttgtttaacaatggcagcagttgattcttctgtttggaggagctgttctaatttataggagatacggtttgtgaaattaattccaaggtagtgaagaacttcttctttcgttttgaagtaattaaaaaatgttccctttgctacacccgcttcatgggtaatttgagacacagtcgttttttgatatccctgctgttggaataaagagatagcggctttttggatgcgtttttttgtttcttctttttgtaatcctctgttcataaattacacctcgttttaataggagtagtcgtttgactcaagttcataagctagtatagagaagtaaaatagagcaagtaaaaaactgagcagaggatgagacgaaagggatcgacgctcatatttttatatagtatataatattctgtcaatttataaaacaatattttatgtatatgttttagggaaaaaggataacaaaataagaaaatttttctttacggatataagaggcgatcactataatggggaatatggactattagataagcaggtgagatgagaggagtaagtatatgaatcgagataaaggaattttgttggaaagtggtacaaacgaactggaaattgtcgaatttgagataggaaatgtttggtttggcatcaatgtagtaaaagttagagagattattaatcccgtatctattacacctgttccaaatgcgcattcttacatagaaggtattatagagctaagaggggaagtacttcctgttgttgacatagcaaaagcgttaaaaatggaaccttcaaatacgccggaaaaagataagttaattgttacagagttcaatcagcaaaaaattgtctttcatacccatgcagtgacgcaaattcaccgtatttcttggaaagaaattgagaagccttcagatttgtatcaaggtttggaaacgcagattactggagtggtaaaattaaacggtcaaatgattctgctgttagactttgaaaagttgatttctgacgtgaaccctgatgcgggtattaatcagtcaaaaataaaaaagctaggggctagggaacgctctaataaaaagattgtcgtggctgaagactcgccgctgctgcgccgaatgattgaagatactcttgcacaagcaggttatgagaacacggaattttttgagaacggtgaggaagcgtggaactatctaagctcggtgatcgatgaaggtgtggaaatcagtgatcaagtccagctgcttattacagatatagaaatgccgcaaatggatgggcatcatttaactaaaaaagtgaaagaaaatcctcagctttctatacttccagtcattatcttctcttctcttatcacagaagatttacgtcacaagggaaagatggtaggagcggaaggacaagtaagtaagccggaaatcggagagcttgttgagttaatcgatctctatattttgtaggattacaaaaaagtgcctgaaagcagattgctccacttcaggcacttttttaaaaataacttttacccagcggtttaaacacaggtgcttgccgttttcttggagtcgaaacagggcttttagccggctgtacgagatgacccgtatatttagataataagcgcttcgcataagataatgacatggtcgttttgggatttcgatactgatggtttaaatggccgaggtgtgataactctttgaagtcttctttctttggaggcatatggaaaaagtagtctccaactgatacaagtacatctgatttttgttgacttttaccagggtttggcgaaaagtgaagtccttcttttttggcttttccttctaaaattagttgatctaatgcaattttctttaacgtatataactgcttaggatcaggagcagcttttgcgtgacgatttacagtgaaaatagcttgtgcaatctcagatacagacggggtcaaagagccttgtccatttgcttgagacatacgttcactccctttctatcatatcagctgttcaacctataaggtgaaaactgatacgttcattatagcgtgtcttgtcccatttgaaaataattacacgaagaagtattttggtaattaatgaaatttcctatgtatagggtttgttttgttacgcttccttatacaagtaaagtggaacagcacgccatactttctattttaaaaaaatgctgctcgcacagttaaaccatcattgattagtaaatcccgaactattgagccattcgtcgagaaggtcgaatataaacaccagtcccatttggcacaatttgagctagctcatttacttgggcattatacatgcgaatgcatcctttggatacggcttttccaatagaacttggatcatttgttccgtgaatgccatatgactttttagacaagcttagccacattgtaccaaaaggccccccggggtttggctcccggttaacgataacaaagtctccagtaggggttgcgctcagcatttttcctgctgcaatgggatagactttttgtatgatattatttcttcgtaattcaagctgcttttcagcaataaacacgtggatcgtgtaaggaatgagctctttatcagggaggtttggaatgatgattacttgcccaggcttcagcgtactatggcttacaaaaggattagccatccacaggtcttcaaccggaacccggtagtcacctgaaacgctttgccaggtttcaccgtgctttactatatatctcattaacttcgctcctttgatatatgactatgttgtaacagtatacgattgaaaaaagtaaaagtgacttttgtgagcataaagttattttgaaaaaggtgttgaaattacattgacttataagcatggactgattgatataggttcaaatacgatacgccttgttatttatgaatacaaaaaaggcagagggtttaagcaaattgaaaacgtgaaagtagctgcacggcttcgaaattatttaagtaaagaaggagtgttaacggctaaaggaatatataccttgcttgatacgcttaaaacgtttggagttattaccaagcatcagcagctgccgcacgttacctgtgtggccacagctaccatccgtcaagcggctaatgcaaaagaagttctagcgcttgtaaaaaaagaaacgggcttttctattcaactattgtctgaatatgaagaagcgtattacggctttgttgccgttattcattccacttcgatcgaagaagccattacaattgacattggtgggggaagtacggaagttacgtattttcgcaatcgagagttagtgcagtaccacagctttccgttcggtgccttatctctgcgtctgaagttcgtcaaaggcaatattcccactgcagaagaaaaagtaaaaatccgcgatttcgtgatccggcatttccatactgtcccgtggcttttaaatcgccaagttccgattgtagcaattggaggaagtgcaagaagtatggtgcaagtgcatcaaggttttatccactatcctctcgccgggctgcatcaatatgaaatgaatttagctgatatattgcatgtgaaatctgctataggctcattgtcttatcacaatcttcgaaagctagaccgcttgtcaaaggatcgtgtggatacaattttgccagcgattgaagtatttcaatcattatatgaaacagtcaacgcgactcgtttcatcttaagtcgcaaaggcttaagagaaggggtgttatttaaggaggcttctgatgctaatatccagccaatgtaccccgatgtcatacagcaaagttttcaagaaataatggaagagtttgaagtaagtaaagattatgtcaaacagcttacgcgcacagctattatgatgtttcagcaccttagggagcagggaacggttgatttaaaagaggatgacttagcgcttcttataaaagctgcgcaagtgtatgatataggaaagtatattgatgcggaatcaagcagccagcatacgttttatgtgcttgctaatcgtacaatcgatggaatttcacatagagaacgtttaaagctggcacttgtttcttcatataaagggaagtcttcttttaggcaatatgttgctccttttaaaaagtggttaacaaaagaagaacaaaaaaaagtccagctgctcggtgcagttttaaaaatagctgacggtttacatgcaacaaagcgaaatgttgttcaacatattgacatgaaaagcgatgaaaacacagttacgattaaactattatgtacaaaaacctttcgtcctgaacaatatcaggctgaaaaacagaaaaagcatctagaaaaagtagtgaaaaaaaatattgttcttgaatttactaagctttagaataacgctggatcggttagaatattcagtatagctaactagattaaatccattatcctggaaggtgaggctaatgttagaaagtaatcgcacttataagcaaaccatacaagtggctgattcagcttattacaataatcgtgaattgagctggctggcttttaacaagcgggtgctggaagaagcagtagatacgaaaaaccctttgcttgagcggtttgaatttctaggaattttcagttcaaatctggatgagttttttatgattcgggtagccggattaaaagatcaagtgaaagctggatttagcaaacctgaaaacaaagcaggcttaactcctaaacagcagctattttctatctccaaacaaaaccacgatctagtcaagcagcagtatgatacgtatattcatacacttcttcccgaattacagaaatacggcgtggaaatcattacggttgaaaagctggagaaatcaaatctagataagcttgaacagtattttgacgagcaaatctttcccgtattaactcctatggctattgatacctaccggccgtttcctatgttgatgaataaaagcttgaacttagcagtcgtcctttcagaaaatttaaatgacgagcagcaaattgccgagataaaagaaaggctagctatcgttcaagtaccttcgatgctaacgcgctacattgaaatagccacgtcagattctacccgtctatttgtattgctagaggatgtaattgcctattttattaaaaagttgtttaagggataccgcgtttcttccgtttctcaatttcgaattacccgcaacgcagatatgactattcacgaagaagacgctcaagatttactaaaagaaattgaagaagagttacagaagcgaaaatggggagcggctgttcggcttgagattaagagtccatatgatcagggtgtactagcgcatttaaagtcagtacttgaaattgacgatgaagatgtgtatgagatcgaaggacagctggatttaaccagtttattttcgttttatagattacttaaatctacgcatgaagagttggctgaaaaagcctttactcctaagcttacaacagagttacacccggatcaaaatgttttcgaccaaatgattcaaagagatattttgcttcaccatccttatgaatcgtttaagccggtacttgattttgttaacggtgcagcagacgatgaaaatgtgcttgctattaagcaaacggtatacagggtaagcggagattctcccgttattaaagcattaaagcgagcggctgcaaaaggtaaacaagtgacggtactagttgaactaaaagcgaggtttgatgaagagaataatgtgcaatgggctaaagagctagagcgggcagggtgccacgtgatatatggaatgactcatttaaaaacgcatggtaaaattacgctcgtggtgagaagagaaggagagcatattaaacggtttgttcatcttggtactgggaattacaacgatgcgacggcaaagatctatacggatataagtctttttactgtcaaccgaaacatcgggatagatgcggccaatttttttaattacttaagtggctatacgcaaaaaccagtatatcatcatttatccgttgcaccatttgatataagaaatgattttttgcatctcattgatcaggaaatccattatcacagacggtatggcaatggaagaatcattgggaaaatgaactcattgacggataaaattttaattatgaagctatatgaagcttctatagctggtgtgacaatcgaactcattgttagaggagcgtgctgcttgcgccctcaaattcaaggcgttagcgagaatataagagtaagaagcattgtcggacgatttttagagcatagccgaatctattattttcatcataataaacaggaaaagtttttcttttcatctgcagatatgatgacaagaaatatggtgaaacgagtagaaattttatttcctatcttggatacacatttgaaaaaaaaagtgtggaagtggcttgaagttatgcttgctgataatgtaaaagcacgagaacaagaccaagaagggaattatcattacgtcataaaaaaagaacatgagctctctattaatagtcaagagatcttttgtcaatatgctctttgcgacgatcaagaataacataaaaaaagccgagtgctcggctttttagtcatgttattatctaggaatgggaccaacaggaccgtagccaggtccgtagtatgtgttataaacaggagcaccgcctccatagccggcaccagggtagcctcctccaggaaatcctcctccaggaaatcctcctccaggaaatccaccgccgtaaaacggaactggataaggataaggtggtggacagcacccaggtctgcctccaaaaccgccaacagctagtccgccaagcagcccaccagctaagccagcaacaaaaggaaatccaaaaaagcgctcgtcaccatttggaatattacgatatcctgtatagggatattgatagtacataatttaacctccttgtcagttgtctttgtagtgtatggctgaatggaagcttttgagcctggtttatttctttaagactagaattaggcggtcatgatcagctaaaaaaagacaatcaacataaaaacgcccttacagggcgtttttatgttgattgcaaggtgaaaagcgtaatttcaggcgtagctaaaaaacgaaaaggaatgcgagtggttcctaagcctctattcacataaagcttcattttagaatctccaacttcgtacattccttctggatataccgtcccaaagggcggtgtaatcaaaggaccgtaaaaaggaatttgaatttggcctccatgactatggccggagagctgaagatccactggaaaaggagctgctttgacagcaacgtcaggttcatgaatcatagcaatagaaaaaatatccggctgtaattgtcctagcgttccttcatattgtggattcccaagcataatatcatcgagtccacaaatatgaatgtagcttttatcaggcatggacactgtgtcaacttcatttactagaagtctaaatcctgcgtcttcaatggcttgtttatagatatttgttccatatcctccatgatcatggttaccatatatggcatattttccaagaggagcctgaagcctctgtaaaattggaggaattctttctggatgcgggtattcattaggtacatccattaaatctccggtaaataatatgatattgggcttcaagttatttatggtcaccataagctgttctagttgtaataaatcgtaagagagtccaaggtgaatatcactaaattgtaaaatttttattccgttaaagcttttcggaatatttttagaagtaattgtatgacgaacaatttgcagacgtctaggctcaatatatttggcatatgtatacccaaaagacgtggtgagcaaagaccctaacgaaatagacgctagtcctttcaaaaaagatcgtcttgtatacgtctttttcatgcaaaatcaacctattccttatagttttcaagttttcattatagcattgttttttttatcaccacaacgagaagtctgcttttaagttaaatagataaaagtttcactttattcagaaaaaatagtaaaatgatagttgtaaaacacttatgttttggggaggaagataaattgaagaacaaggtcgtaattgttactggcggttcaagtggaatgggaaaatatatggcgaagcgatttgcagaacaaggtgctcatgtggtaatcacaggtagatcagccgatcgattacaagagacagaaaatgaaattaaaacgtttgatggacaggtactttcagtggtaatggatgtacgcaacccagaagatgtggaacgaatggttcaagaaacggacaaggcatttggacaaattgattttttagttaataacgctgcaggcaattttatatgtgcagctgaagacttatccattaacggatggaacagcgtaattaatatcgtattaaatggtacattttattgcagttctgcagtagggaaatattggatcgataaaggtacaaaaggggccattacaaacattgtggctacatatgcctggaacgcaggagcaggtgttattcattcagcttgtgccaagtcaggagttttaaccatgacgcgcacgctcgcagtagagtgggggaagaaatatggtatacgggtaaatgcgattgcaccggggccaatcgagcgaacaggaggagccgataaattatttgagtcagaaaaaatgaaagcgcgtacattgaattctgtaccattaggacgccttggaactcctgaggaaatagcaggattagccagtttcttattctccgatgaagcgtcttatatcaatggggaatgcatcacaatggacgggggacagtggctaaatcagcatcctttttaagtttggatacgcactaaaaagtacaaagcaaaccgagaagggctagcaaaattatgctattcgtattatactaacgtaaagtgaacaaggagaggggagagttgagtggacccgttagatgtattaacaaacatagagaaaactcttccgtattatcaagcaatttttagtgcagatggacatagagtaattggctatgaagtgttggcgaggtttcaaaatgaaggggaaattgaaagtcttggcccattctttcatgatgatgcgattccggatgaatatcgcatagaagttgattatgctgttttaaaacaagcgcttgagcatatgttgacccaggaagaacaatttttaatttttattaatcagaaccctaatttattaatgaacgatcatggagaatctttgctagaattattgcaacttttcgaaaataaaggattatctcttgatcgaattgttctcgaaattaccgaacacaattttagtggagatttggaatcacttcaacacttactaaagtattatcaaacatatggtattaagattgcaattgataatataggaaaagaaagtagtaatctagacaggattgggttgctttcaccagatatcttaaaagtagatttacatattctaagacaaacggacatggcgcagtcgtatcaagacgtattgtattctttatctctgttagcaagaaaaatgggtgctacgcttctatacgaagatatagaagcctcctatcagctgcaatatgcatggagaaacggaggcaggtattttcaaggttattatttacataagccggctgctgaacttgtcgatccgaacatcttaaaggataaactaaaggaacgttttgaaatgtatatcgctcacgaaaagaaaaagctgcttgctgtttaccagctgacagaacgctttcaagataaaatgcagcaggtaatgacaaagtgcagaaagctagaaacgtatgacgatatgctgcctgttattgcagaagaactatccaacgtgtgttttcgcctttacatctgcgatgaaaatggatttcaaaagtcttctaactatgtaaagaaaaacgaggattggattcttgaacctgaatatgtaaagaaaaattggagctggcgcccatattttcttgagaatattattcgaatgagctatgaaaaaaaaggcatattatcagatttgtataatgatattgaaacaggtgagaatatccgaactttttcgtatccgattgataatatgcactatatattccttgatatttcatattcttttttatacgaaagagacgttttgtagagaataaataagttgaagttaaaccggcaaccagcaaaagtggttgccggttttttatgtttttttagaggagaacgacagtcggttatagagatatgcataggcagagaaaatttcggaattctaataaaaaagaagttaaggagctgatttaatttgaagaaaatatgcttacttgtctttttgctgattgtcttgtactcaggaaaatctgttcatgcagaagtatcaggagagattaggcatgaaatctttataaatttgcaggacgcttatcaggctcagctaagagctgcgtctgcccatactaatcaagacgctgttcgtgagctgaaattgtttttagatgatgagtatgcatctgtgttttttaatgaggctctcttacaaaaagctcaagggtatgccggagagggacctgaatatttaacacattacatccctttcttttctttcgatgaacacacgaaggtagctcttcattccgaccaaaacaaagcttatgtctatcaattttttccggctgtgcataatgaacgggtaagataccaagatcattacgaaatgatcacgttagtaaaaaaacaggggaaatggaaagtgcaaaagtttatatatagtaagtaacactcaaaatagccgaggaaagcttattttgagtgtttctgttacccgatgttaagaagcttctcaagcgcttgaaggtcaaatcctctgataatttcctggtcaacacgaatggtcggcgtggaataagactctaactcagtagtcattcgttttcgagcagaagcatctttagatacgtcaaattctttataggaaacgtgatggtgctgtaaaaactgtttaacaatttcgcaaggtgggcaagctggttgtgtgtacaactctatagatctcaatgaaagcacctccctatattaaaatgaatggtgttaaagtagaatgaagttttgtatgatacatagtatatcgctatgttattataataaaaaacaacatatatcgctataataaggcattttcttatgaaaaatcacgtaaagtacttgtgtttttttagtatgtggcatatagtgaaatggtgtcttttaagtattagtttagataaagtatttatttgaattgatattgtagaaaagtcgaatgcgtaatgatgtaataggtgaaaggagagattatatgtcacaattacaaggtattttaactcgtcttgtgaatctccgtgagcaagcaagtggaagtgaagcgccacaacgcttcttcgaagtagagggaaaaagaatttgcagcgtgaaatatcatgcaaaaactgaaacatacgaacttgaagtatatcaagatggtgaaaagccagccgtttatcaatttgataacgttgatatgattgcaattgaaatttttgaacttattcattaagggataaagcaaaacgaatgccgcaaaggattttatactttgcggcatttttttgttactgcgtatggagtttttgcggtggcttctgccctattttctcgagaaatatcgacaaagtgatagaggattttctgataaatagaaggaacgggtcgaatgctgtaaaaaaaataaaataaaaaattcagataattatgaactttcgttgacacttgttttaaaaaaatctagacttaacatataagggagaacatcgagtgtgtctgcttctattccctcttaaaggttcgcatttacgtaagcaagctattttcattttgtagcttgttctttttctctttacacacgtggaagttatgagaaatggaaggagaatgtataaatgattgatattgatcacaatcagttaaatcaaattgaacttcgagatttgcttgtcacttctgataaagttgctcatgttcaagtgggaaataatttagaacatgctttgcttgtgttaacaaagactggctatacgtccattcccgtattaaatccaaggtttcagctgcaggggttcgtgagcatgacgcttattttagattcgattttaggattaaaacgcattgaattcgaacgattagaaaccatgaaagtagaagaagttatgaatcaaaatgttcctcgtgtctccatgaaaaagtccgtattaaaagtcataaatgccatgattaaccatccttttttgtgcgtagagaatgaagatggcatttttgaagggattttaacacgaagaaatttgttaaagtcattaagaaggcagtccatcattctcccgaaggagtcatttcaataatttttttaagaaatcgtgtttcagcctatctttctccgtttttttcttatatgataaaggtaaaatgaaagtaaaaagaggcttgaaaggaataactgaatgcaattaatagaatgtcgaatgctcgttgtattagctcaagaattaaatatgagaaaagctgcagagagattatttgtatcgcaaccagctttatcacagaggctgcaaaccattgaaaaagcatgggatacacaaatcttcattcgttcgcaaaaaggactgtcattaacgcctgctggagaaaagattgttcaatttgcaaaagaagtggtagaaaaagaagatcgggttcgtgaggacttgcatcatttagataatgaagtatatggtacactcaaattagcggtggcttcgattattggacagcactggctgccggcggtgttaaaacgctatatggatcgttacccacatgctaaaatctctcttgtaaccggctggagcagtgaaatgcttcgctatctgtacgaagatgaggtacatattggaatcatacgcggaaatccggattggaaaggtgtcaaagaacatttgtttacagatcctctttacctagttgattcagaaattgaaagggcagcggaagtagtaaatactcatcgaccatttattcaatttaaaagtgactcaacgtattatcaagaaattttagaatggtggcatcgagagtttcatactacaccgaagcgtacgattgtagtggatcagattgagacgtgtaagcaaatggctttaaatggtcttggcttcgctattttaccatcgattgctattaaagaagctggaagccatattcaccggacgccgcttctgaaagcaaatggagagccaattacgcgagacacttctttagttggatatgaatcagcgtttaaactgaagcaagttcgagcattcgttgatattgtacgtgaatatgtaagagaaacggtctaaagcgagctcagatgctcgctttttttatttgcaatcgttatctttttattaaaacgataatgatgcttgtcattgtgaaagcattttgttacattaaatgagacattgcttacttaggaggaatacataatgaaaatgatggatgctaatgagattatctcatttattcaaaacagcacaaaatcaacaccggtaaaagtttacgtaaaaggtgaagtagaaggaattgactttggttcatcttctaaaacattcgtaacgggcaacacaggtgtagtatttggtgaatggaaagaaatcaaagctgctattgaagcaaacgaaggaaaaattgaagactacgtaattgaaaacgatcgccgcaactctgcgattcctttattagatatgaaaggaattaaagctcgtattgagccaggcgctattattcgcgatcaagttgaaatcggcgacaacgctgttattatgatgggtgcatctattaacatcggctctgtgatcggtgaaggaacaatgatcgacatgaacgtagtacttggtggtcgtgcaacagtaggtaaaaactgtcacatcggcgcaggttctgtattagctggtgttattgagccaccttctgcaaaaccagttgtagtagaagatgatgtagtaatcggtgctaatgctgttgttcttgaaggtgtaacagtaggtaaaggtgccgtagttgctgcaggtgcaattgtggtagaagatgtagctccttacacagtagtagcaggtacgccggctcgcgttattaaagaaattgacgaaaaaacaaagtctaaaacagaaatcaagcaagaattgcgtcaattaaacgaagaataagaaaaacgatcagtttgcgctttttctttgctgaattaataggttttagcgattgggatactgaatccttaaacgtatcatatggacaagttggaagcgtgggcaaccacgctttcttctttatttcgtgaggaggacatacacatggctgaaaatgaatttgtgaaaataagaagagagctacataaaattcctgaattagggtttcaagaggtgaaaacacagcgttttttgcttgattatattaacactcttccgcaagagcgcttagaagtaaagacgtggaaaacaggaatctttgtcaaagtacatggtacaaatccaactaaaacaataggctaccgagcagatattgacggtcttcctatcacggaagaaacgaattattcttttcaatcacagcatgaaggactcatgcatgcctgtggacatgatatgcatatggccattgggttaggcgtactgacttactttgctcagcatgaaatcaaagataatgtactgttcatctttcaacctgcagaagaaggtccaggaggagcacagccaatgctccaaagcgacatcatgaaagaatggcttccagatttcatcttcgcccttcacgtagcgcctgaatatccggttgggtcgattgcgctgaaggaagggttactatttgctaacacgtctgagctatttatcgatttaaaaggaaaaggcgggcatgctgcttatccacatacaacaaatgatatggtagttgctgcatgtcagctcgtttcacagcttcaaactattgttgctcgcaacgttgatccgctagacagcgctgtaattacagtaggaaaaattcaaggcggaacggttcaaaatattattgcggagagagctcgcatagaaggaaccattcgcacgctatctcctgaatcaatgacgcgtgttaaagaacgaattgaagcgattgttaaaggagtagaagtaggatatcagtgtgaaacagccattgattatggttgtatgtatcatcaagtatataatcaccataaagtcacgcgagagttcatggaatttgccaaagcgcaaacggacgtggatgtcattgagtgcaaagaagcaatgacaggagaagattttggctatatgctaaaagatattcctggatttatgttttggcttggcgttcagtctgaatatgggcttcatcatgccaagctgcagcctaatgaaggcgcaatagatattgcgatttcacttattacaaaatattttgaacataaaggcaatcaataaatcgtataatcatttttccttatggctaaattaataccatgaggaggtgggcaacgatggcacgaattggtgtagaatacggtttaacagatgtacaggctgcacttcagcagctcggacatgaagtggtacaattacgcaacgaaagtgatgcacaagggtgcgattgctgtgttgtaacaggacaggattcaaacgtaatggggatttctgatgcagtaacgcaaggctcagttattacagctagcggattaacggcagaagaaatttgtcagcaagtaggcaacaaggtacagggataaaagaaagccgaaggaataaatccttcggctttcttttatgcatgctgaggctgcttggcatcttcaggctgctttttatcaatatttacttgatgagggaacggaatatcaataccgtttgcgtcaaacgcttctttaaactctttgcgaagctgacgttcaattccccactgttcaccgtttttagctttgccaactacacgaagcacaacgtctgatgcgcctagaccttgaactcctatcacgtttggtccttctacaatgttttcatttgttgcagcaacgcgctcgcatgctttttctagtacggaaatagctttgtcaatatcatcatcatacgaaatgccaatatcaattaacgcgcgcatattgcctcgggaatgattgcttaagcttgtaatttcacggttaggcacatagtgcagagttccatcaaatccgcgaatttgagtagtacgaagacctactgattcgacaattcctgaaaaacttccggttgttacataatcgtcaacatcaagctgtttttcaagaagtaaaaagaaacctgttacaacgtcgctaaccagtccttgagcaccgaacccgattgctagacccacaactccggcaccagctaatagagctgtggcatggatatttactgcttcaagcagcataacgacaaaaataaaaataagtacatatgaaaacacattaacggttaaacttttgagtgtgagcatacgtccgcgcgtagcattttcgcgctcactcattttttcaaaggaacgttcaataacttttttaccaattgctcgtacaagtaaaaatacaatggtaatggcaatgagttttaacacaataactccagcattggtaagaagctgttcccagttgatgtcttgcatcttaaacattagttgttcatccttcctatgttctgtttcaatattaataagtgggaatttattctgcggaaaagattttgtaagagtatgagcacatttgtttattcccgatattagacatgctaaactgagaaggtaaataaatgcaacccttttatagcatttttttgctgaagtcagagtttaatttgccctaaaggcgggcataacaactatgttaccattataagatgttgtttaaattcattcttaattaatattgactaaaaaaacaatatccattataatgaaaaccgttataacagtacataagtgagaatgttttatacattttctcatttaataattatttggagggatcatgtatgccagaacgtatggtaggtaaacaagctccacgctttgaaatggaagctgtattatcaaacaaagaattcggtaaagttagcttagaagaaaatattaaaaatgacaaatggacagtattattcttctatccaatggactttacatttgtatgtccaacagaaatcactgcactttctgaccgttatgatgagtttgaagatcttgacgcagaagtaatcggtgtttctacagacacaatccatacacacttagcttggatcaacactgatcgtaaagataatggtttaggtgatcttaaatatccattagcagctgatacaaatcacgttgtttctcgtgagtacggcgttttaattgaagaagaaggtgtagcacttcgcggtttattcatcatcagcccagaaggcgaattacaatattcagttgtaaaccacaacaatattggccgtgacgttgatgaaactttacgtgttcttcaagcgttacaaactggcggactttgcccagctaactggaaaccaggtcaagctactttaaacgcgtaagcacaacgtttaaaaggtctaacgtccacgttaggcctttttttcatcggataataaagaacatatagtcaataatagtcaaaataagggaggcttttattcatgaaattacgtcagccaatgcctgagttaacgggcgctacagaatggttaaacggagaggttacaaaagagcagctaatcggcgaaaagccaacgcttattcatttttggtcagtgagctgtcatttatgtaaagaagcaatgcctcaagtaaatgaatttcgcgaccagtacaaagatcaattaaacgtagtagcagttcacatgccgcgctctgaagatgatttagacttatcaaaaattaaagaagtagcagcagaacatgatattacgcagccaatttttgtagacagtgagcataaattaacggatgcatttgaaaatcaatatgtaccggcatattatgtatttgacaaaacaggtcagctacgccacttccaagctggtggaagcggtatgaaaatgcttgaaaagcgcgtgaatcgtgtattaggcgagaacgactaaatacaggcagttgtaacaggtgaaaagcattcgatgcttagtagaacttgcatcgaatgtttttcttttttgtgtgtaggaagtaactgataaaggaaatataaaaatgtggattttttcttgtgagtttacaccatactaacactaacaacatgatacgaaacttactataggaggtaatttacatatgaaattaggcatgattggcttagggaaaatgggagcaaacttagtattgaatttactagatcataatcattctgtggtagcattcgatgtgaacaacgaagccgtacagaaagtatcagaaaagggagcagaaggagcttcttccattaaagaattagtgagcaaattagaaaaaccacgcattgcttgggtaatggttccggctggggagctcacagaaaaagtaatttctgagctccaagaactacttgaagaaggagatatgattattgaaggcggtaattccaagtataaagattctgtacgacgtgctgcagcttctgctgaaaaaggaattcactactttgatgtcggaacaagcggcggaatggaaggtgcccgaaacggcgcttgtatgatgatcgggggagataaagaagcatttgctacaatcgaacctattttccgcgacattaacgtagaaaacggctatctctattcaggtgtagcaggaagcggccacttcttgaaaatggttcataacggaattgagtacggtatgatgcaagcaattgccgaaggttttgatgtgttagagaaaagtgaatttgactatgactatgaagctgtagcccgcgtatggaataatggctctgttattcgctcatggttaatcgaattaatggaacgtgcattttcaaaagatgcaaaacttgacagtattaaaggagttatgcattcttccggtgaaggaaaatggacggttgaatcagctttagatttacaagtgccaacgccagttattgctctatcgttaatgatgcgctaccgctcacttgaagacgatacgtttacaggtaaagtagttgccgctcttcgcaatgagttcggcggacatgcagtagaaaaacaataaaaaaagaggctggaacaaacgtattttagacgaattgaaaaaagaaccattgatcaacatgtttgattagtggttcttttttttgttatggtgaatagtttcgtctgtgtagatctttctagcagttcaactaatgtattccatttgttcgtctttagatgggattcatttagttatatcccagcctcttgtttatgactatttacctttttttgaaaaaatatctaaaaattatggtaatttatttcgggaaccgatatatttaaatatgtgtgccgcattttagctaaaggaaggacggggtatatggaaacgtttaaaaaactaaaagatttttatctgccgtaccgaatgtactttttttattctgctatttgcttgttgtttgtaacctccatcactgtgatttaccctattgtgttgcaatatacgattgaccatattgtgttaggaaaacaatatcagcttgtcgataatgtagcatttatttttattgggctgatgattgtcaaaggaatctttacatatattcagcaatattacggcgacttatttggaattaagtccgtgtatactcttcgcaataaactttaccgcaaacttcagtatttaccgttttcttactatgacaatgctaaaacaggggacttgatgtccaggctgacagctgatgtagaaggatttcgtttttttctatcttttggcttctcagaattaattcgcttcgttattttacttactgccagcttttccgttatgttctattactctatttcactcactcttgtcacaatctgcctgctgccttttttgggggtagctgtttatcgttttgataaacgcgttcatccagcgtttcgcttaattcgccaatcgtttggggaacttaatacaaatgttcaagaaaatataagcggcatacaaacggtcaagtcattatcaagagaaaaatttcaaacctctaaatttaacgactccaatggagtttataaaaatcgaaacattgaaaccgcgaatgtttgggcaacttatttccctttaatggagtttataggaaacttatctattgttggtctccttgcgtacggaggagcgcttgttatgaacggaagcgtacgtccgggtgagcttgttgctttctttagcttaacttcttatttaatgtggcctatcatgaatctagggtttgttatcaatatgttttcacagtctaaagcttcaggtgaaaggctgctagaaattttagaagaagaagaaaaagtccatgagcatgccggaagtttctctattaatggaacggtcgagtttcaacatgttagcttatcctatccaaacgaagaaaaaaagtcgcttgagaacatatcattttctgcttctaaaggaaaagtagtaggtttaatcggagcaactggagcaggcaaaacaagcttaacacagctgcttacgaggttttacgaacccacttcaggacaaatcttagttaaccatcgtccgattaaagagtatccaatctctgttcttcggaaagagattggctttgtacttcaagaaacatttttgttctcaagcagcatagggaccaatatctcctatggcgtaccggggatttctagagaagatattgttgatgctgcaaaacgagcgcaggcacatgactttattatggagcttccagatggatatgacacgatgctgggagagagaggactggggttatcaggcggacaaaagcagcgcattgcgattgcacgagcgcttatcttaaaccctagcatcttagtattagatgatgcgacgagtgccgttgatatgaaaacagaaagagaaattcaattggctttaaaagaagtgatgaaaaatcgtactacgtttattatcgcacaccgtctttcttctttgcgacacgccgatgaaattttggtcttacatgaaggtcaaataaaagagcgaggaagccataaaacgctcattcaaaagcaagggatttataaaaatatttatgacattcaatatgaaagcaatacgtcggtgatgaacgtataacaagggaggaatagaatggaagccgaaaaaaataaagttgtgcgagagcgcttttattatcaaacagatcaaatcattgataagatgtttaactggaagcaaatggcccgcttgtttcattatcttcatccatatcgaaaaaacttgcttcctttctcgtttcttatggtcattatcacgacggtcattagactcgctattcctattttgataggtgtctacacgcttgatcacgctgtaaaagataagaatagcacgctgctcatgcagttagttttcataatctttagcttgtatgtcctatcttatatttcgaatgtctttcgaattaaatggatgaaccaactcggacagcatgttatatatgatttaagaaaacatttatttacgcatgttcaagggctgtcgcaccggttttttgatacgcgttcaggaggctctattcttgtaaggattatgaatgatattaactctcttcaagatctatttaccaacggggtagttaacctgtttatggacctcttattgttagttgggattgtagttatattattttctctcagtcctgctttgacatgtgctgttttagtcattttaccgattatgttcttgatttccacaaagctgagaagaagaattcgtcggtcgtggcaagttgttcgtatgaagcagtcagtattaaattcacatttaaatgagagtattcaaggcatccgcgtcactcaatcatttgctcaagaacaagaaaatatgctgttttttgagcgcataaacagtgaaaattacgagagctggaggcaagctactcgaaaaaatgccatgtttcgaccgtttgtagaactcacaaatgctgtcggaacggctattttaattcggttcggggccgtacttattcaagatgaacggctaacaattggtatttttgtatcatttgctttttatcttggaatgttttgggaaccgatttctcgtttagggcaagtgtataatcaattattaatgggaatggcttcatccgagcgtatttttgaatttctagatgaaaaacctctcgtcgcagatttggaaaccgctacgtctttagaggatatgaagggaaaagtcgagttcaagcacgtctcattttcttatgatgggaagcggaaagctctcaacaacgtatcaattgaaataaaagaaggccagacggttgctttagtggggcatactggatctggaaaaacgtccattgctaatttaatcacccgtttttatgatgtgaacgaagggcagattttaattgataatatgcctattcaagatattacgttagcgagtttaagagcgcaaattagtattgtgctgcaagaaacctttatcttttcaggaaccattatggaaaacattcggtttggaaaaccggatgctaccgatgatgaagtgattaaggccgcagaagcggtaggggctgcagattttataaagcgtctgaaaaaaggttatgatacggaagtagaagaacgaggaaacgtcttatccgtgggagagcgtcaactgatttcatttgctcgaacgctgttggctgatcctcgtattatcattttagatgaagcgacagcaagcatcgatacagaaacagaagtgaagattcaacaggcgcttaaaacgctgttaaaaaacagaactgccatcatgattgctcatcggttatctactatacgagaggcagataacatcattgtattagatcacggaagcattattgaaacagggaatcacggggaactaatgcagcaaaaaggcgtatattattaccttgttcaaacccatgctacagcttaaaaaacagagggagctaatccttctgtttttctatgagtgtgagaaatagtaaagagatataagtgttaacgggaaaatgaggttgatgcaaaagaattgtggtaaaataacgttagttcagattttttcctgtacataatggaggaattcaaatgaaaaaagaatttgcagtcatcggattaggtagatttggaggaagtatttgtaaaacattaagcgatcaaggaatggaagttctggcgattgatattgatgaagaaaaggtaaatgagtatgctaacgttgcttcgcatgcagtagtaggcgattcaatggatgaaggggtcctaaaaagtttaggaattcgtaattttgatcatgttatcgtagctattggtgacaatattcaggcaagtattttgacgacccttattttaaaagagctgggcgttgaaaaaataacggtaaaagcgcaaaatgattatcatgccaaagtattatcaaaaattggcgccaattttatcgtgcatcccgaacgagatatgggacgaaggattgccaataacatgatttcaaacagcgtgctagattatttagagctatctgaagagcacagcattgtcgaattagtagcgagcaaaagaatggctggcaatacgctgattgagttagacattcgtgcgaaatatggcattaacattgtagccattaagcgtgatcgagatatcatcgtttctcctcaggcatccgaaacgattcaagaaggggacgtgttgattgttattggagcagatgcagatatcaaccgcttcgaaaataaatttgccagtgcttaataaaaaaagagcagatgcaattgcatccgctctttttcttttattaaacttccataatgattggtaaaatcattggacggcgctttgttttttcgtaaaggaatggagccaatgtgtctgtgatttcatttttaatctcagaccattgtgacgtacgacgttccatcactttgttcaagtgttttgtaatgagggactgtgcatcattaattaagtcgccagattcgcgcatataaacaaaaccacgagagataatgtctggaccagcagcgatcttgaagtctttcatattgatgcttacaaccacaataacaagaccttcttcagataaaatgcggcggtcacgaagtacgatatttccaatgtcaccaattccgcttccgtcaatatatacagagcctgaagggattttgccggctactgaagcttcgctgtcacttaaggctagcacctctccattatccataatgaagcagttttcttcaggaactccacagtctgttgcaagtttgatgtgcattttctgcatgcgatactcaccgtgaattggcataaagtattttggtttcatcaaacgaagcattaatttttgctcttcctgtccgccgtgtccagaagtatggatatcgtttagcgcaccgtgaataacctctgctcctgcacggaatagcatatcaattgttttgctaacacttactgtatttcctggaataggtgaagatgagaatacaaccgtatctccagggataatttgaatttggcgatgagtaccgtttgcaattctagatagcgctgccatcggttcaccttggctgcctgtacataaaatagtcacgcggttagctggaattcggttaatttgagaaggctcaatgaacgtatcttttggacatgaaatatatccaagctgttggccaatctcaatagctgcttccatactgcgtccgaatacagcaactttacggttatgcaatacggctgcttccactacttgctgtaagcggtgaatatttgaagcaaacgttgcaaaaataatacggccgtctactttacggaaaatgtcatgaatgctgtcacctacgcggcgctcagacatcgtaaagttaggaatttcactgtttgtactgtctgaaagcaagcatagaacgccttctttaccgatttcagccatttttgttaagttagccggttcgcccactggtgtaaaatcaaacttgaaatctcctgtatgtacgatttgtccgtttggtgtttttaccacaattccgtaagaatcaggaatactgtgagttgtgcggaagaacgttaccgatgttttacggaatttaattacgtcatcttcagtaatttcatgaagctgagctgtacgaagcaacccatgctcgtctaatttgttgcgaagaagcccaagggctaatttccctgcataaataggaatgtttaattctcttaataagtaaggaattccgccgatgtgatcttcatgaccatgtgtaacgaaaaggccacggattttatctgcattttttactaaataactgtagtcaggaataacgtagtcaattcctaaaagctcatcttcagggaatttaattcctgcatcaataagaataatttcatcttgaaactgtacggcatacgtatttttaccgatttcgcctagtccacccagggcgaaaactgccgtttgattattttttacaaatttcattttcatcatatctccaatactttaaaatcttcatgctgttgttcatattctagatagtctccagtcactgcttgaacaaactcaatattaattgaacgcgcttttaactttttacgaacgtcacgctcagaatctgcgttcacatacactgtttttgtattttcacgtacagctacttcactcattttttcttgaaaataaactttaaaa

SEQ ID NO: 6 - DNA, 197713 bp, Priestia aryabhattai
  source 1..197713: mol_type = genomic DNA
ttttcaataaataactgtgtggaaaatagacgttttttgtgaacagcatcctttagctaacggatgttttttataacaatagatatgaaaactattttatttactatgttttttcttctgcaatagacggattttaaaactcatagtatgaattatttccactgtggataaaagtagtcgtgttaaagagtaaataacttggaaatcatcgttaataaaaaataaaagggatgtttttatcaacaaagaggatgatataacgttaattgaatatgttttatttcttttgtggataagtgtgaaggtgtttttttagtaatattccgtagttatacacaagaaatatcatttatttgaactcattacgtttatatagataggatagtggaattggatagctacaaaaatgggtatttgtttgcgctatttgtatcaaaaagagaagagaagggagataaaataaaaaaaggcatgccaaataagccccttatgaagctgtaagttcggcagggacttgatcttgaagattttttgaaagctcttttcgaatgagcgtacggatttttccaccgtaattttcaacgacttgagcatcatggctgaagaaggcctgttcaatcagagaataaagggaagacttcactcgttcaataccatattcaaaagaaagctgaaccaaatcagcgatgtcttcgttttggaatgaagacataacaattcctgtagaatctgtactgtgtccagataattttacaaaagtctcttcaatagcacgtcgaatcgccgcatcgtattgatctttcttttcctgttttgacatcttgccatttttagctccgtcttttaaaacaaagaaaatagtagatccttggacaacggttttaaatgcgctcgtctgtgtttcagctattttttgcatcatacctttgtagtgagtatatttcggtgtaaaaattttatagtcattaaagctaatttttgaagtgttttctccgggattaaactgacgcttaatcgtatcgttgtcataaaccaattctttgcgcagctctaagcgaagggcatttacgttttcaattagaataagttcttcaaagcgagtatattctaattccataaacccaaagccgtgttcttcaaaatattggggatagggaacaatacaaatattgattcctttgccgctgcgagaataggaaattaattctgtttctgctaatactgcattgttgttgcgaactgttcgaactgtacaattcaaagcggctgcaatctctttttcagaaacatcacaaataatacctctttcatcaacgtgaaggaagtgataaaaaattaattgtgaaatttgagatttagataaacggtgatgttctgccactgttttgattgtagggttcccatgagcgtctaggtccatgtgatcttcaacatctttatatttttctacggtgctagacaattggcgaataatttgttttccaattttcgcaaattctttttttatcatgagaatccctccaatctatttcatatcaacactaatttattagggtaaaataacaaagaataccttgtgaaaattatatcaataagaaatagaatcgcaaacgaacgagtagtacgctaaaaacggcaaaaggttcaaagaatgctgtcatatcaaggagttcagcgtataggttttttagtacgacaaaaacggcaaaagcaagcaagcgccggtagaacagtgtttgttacgatcagtaaaaatcaaaaaaaactttatgcgttttagtacgtaaaaaacggcaaaaggctgagtatagtacgccgaaaatagcaaaagtgaagagtggtacgctaaaaacagcaaaagttatctcgattcacctaaaaaaaggtaaaaaaatcacttctctgatcgttgtaaataacacaatgaattttattagtacgtcaaaaatggcaaaagctatttttagtacgtgaaaaacgtcaaaaacggcgtagtagtacgacaaaaacagcaaaagttttcgtttggtacgtcaaaaatggcaaaagctttatatatgctgcgaaaaaaataaaaaatggagtttgaaaaggcaataacaaagggaaaagcaatgtttagtacgcagaaaacggccaaagtagtgaaggagtacgtcgaaaacggcaaaaggtaggattgttttacggaaaaaagagaataattaacaattaataagtgattactagtaaataaaatgaatttagtacgtcaaaaatggcaaaagaatcagagtggtacgttaaaaacagcaaaaggtagtaattagtacgctaaaaacggcaaaagaagcgaaagggtacgtcaaaaacggcaaaagcttctggttagtacgttaaaaatgacaaaacttccaaactgtgaaataaaagtagagggatattttgtatttataagctgaaagtggcaaaatatcaaataaaaaaggaagggaacaatttacccttccaatgtttctctatgttctcctccaaaatagtcttgaatttcataattttgaagaggaataaaagagatttcaaatccttgaagtttttgctgataactttggatcagcacttgattgctaacaaactctgctagagattcattaattaattttagattgacatcaattttctttgaacgaaaacgaacttttgaagcaaaatattgatatgggtaaaaatgggtgtaagacttctcttgtaaataacaatctaatcgctctttttgaaatgcatacagcagtaaagaagacagcgagttatctttaaactttttaataacgtcactgtaaatttgtacaaactgctgatttaaaaagccttgatgcgtatcgtcgctaaatacaatggttgcatatcgtctgcccgttacttcatcggtttcaataacagctttttggaagaagtttatcgcaaattttgtatctctggaatttttcttcttcgctacaccttctacgtggtatctggcaattttcataatgcgggcttcaaccgcttcatagttttttacaccttttgaattataaatttctttcacgatatccgctaaatcaagagtcaccgttttttctttataaaacatctcgtcgcgctgtgaaagagcaaactggataatttgggaatcttttgggtctaaaaccatatttcgtttggaaagaaccgtttgattatcattcacagggataatggtgcgaatgaaatattcttcatcaactttatagtcattatataaaacgacttcttgggagtttgttttaacttccatattggttttaagagaatgactttcgtttgagaagataggggcctctacccacgaatttaatcgtttatcaatccagttactcaaatttccattgtatttttctaatatgatttcagcaattaaaaaagtaaagtccgtgtgaaatgctttctctatttgataattcatttttgaatctaaataaggaaaatcggtaatgtttgtttttttacttttagcccatgtctctacttcttttaactttatctttaaaatatcttcaggtttttccacgccaaacagcttttttaagtgttcggtatccacttttttatccatcacttttttggccaactcaatgtcttcaaaaataggattaggcttttctgctttaatatctttttttaacgtttgcagccagtttttcttattcgattgtcttcttttgtaagcgggatttcttatttccttaggatttattaatttattctctaaaacaaacgtatcttgcaatatatttaaaatgtagtcttctataaaatctttttcattcgaaaaaaacgaatgagaatcatataaaaagtctatgcactttgctttgatattgtcatcgatcgcatcgctgatttgtttaataaggtaaggagaaaaattggatggttcgttcatgttgacctcctctgtatgtatttaatctgtaacagtcttattatatcttttttgaacgatactctaaagactaaaaggaaaattcgtttttgtgaatgctgttttatatcaaattagcctagccagccagctattagtatataaaggcttattgcaaatataaaattctttctttatagcgtttgtacaatataagtatgtactttagatgtaaggagagtattatagtagttttataaaagagaaaagcaaagtacattcattgagtttaaaaatcgaaaagtttatacttgccaagtacactcttttacaaatagggggaataagtatgttgttaaaacctaaagcgatttttttagatatggacggtacgatattaaaccgtgctaacaaagtaagtattcaaacaaaagaaatcattgacgaattacgaaaacagggaatttttgtttttatcgctacgggaagagcgtttgatgaaatagaagagttagttcctgaaggctttcaagtggatggatttatcacgtcaaatggtatggcagggtacgtaggaaaagaagcagtctttcagcattcgctttcgctccagttggtggaaaccattattgaaaaagcaagagcgaacaaggtatactatgagcttttcccgtacggcacatctcgcgtgacgttaaaacaagatcagtcctatgcggaaaatgaaattagagagccaaagccagacagtgtggaaattaacgagtggctttcccgtaaacaagcaattaaagaagaaattgactggaaagattccgtagaaggaagcgaattttcaaagttctatttctttgcaagaacgcacgagcatatcgataaatggaaagaggagcttgaagaacttaaaaaagaaatcgactttacaacttctacttcatctaaacacaatgttgaagtgatggtggcaaacgtaaataaagcaacgggaattcagcaaatgctaaaacattttaatttgcccgagcaagacattctagcaattggcgacagcaacaatgatttaccaatgtttgagtttgccagctatgccgtagcgatgaaaaatgcgccggatcatattaaagaaattgtcgatgacgtaacggaatttaactgtgacgaaaacggcgtatcccattatctttctaaatttttattgcaaaaatctgctagaagtaatcccgttttataaaaattaatctatttcgcgataatgcattataaccaattctttaaaacatcgtcttttaggcggtgtttttagtatacataaggtgaaaagtaagccgttcattctttttagttatagcactcttagctaaaaagaatagataagaataaatcttctataatttaaaaatcatgttataaacaacgtaattatacaactatcctcgtacctatccctgcaaaacaactctcagccctgatgagtgccaccatgccaaagcataaaacattttaaaatctaaactttttctttcttcaaactttttataaaatgctgagaaaagggattgtatctccttatatttaatgctaatataacatttaatgaaaatagtataacatatttagttttattttataattagtatgacacaaattctgaatttaattgttttgttaaagtgtttataatcatagtgaccagcatatttgtctattcattactattaaattttgtatcttgcaagctgctaaatgatagttgaacaaaaaatactagcgttattaaactattaaaatcaaagaataggaagatttaatgtgaataaaagaaaaattgtctatatagtttccgactcagtaggtgaaacggctgagctgatggtaaaagcagttttaactcaatttagtggagaagatattgaaattcaaaatacttcttacgtagaagatgagggaaatattgataatatcattgctgaagcaaggtgtaacgaggccatcattgcgtatactatcgtcatcccatctttaaaacagtatcttgacgaaaaggcacaagaagaaggaattgtagccattgatttaatgacccctcttatgagtgcctttagcgaaacctttaataaggaacctaatcttcaaccgagattaacgagaaaattagacgataactattttcgaagagtagaagcagttgaattcgctgttaaatatgatgatggacaagacttcagaggcatcaagcgagctgatctagtgttgattggtgtttcgagaacatctaagacgccactttctatgtatttagctcataaaagtcttaaagtagcgaatataccgttagttccagaagtgacgcctcctgatgaactttttactatttcgaaaaataaatgtattggtttagttattacaccggataagctcaatgaaatccgaaaagaacgattaaaaaatttaggtttagcgtctcaagccaattatgccactgtagatcgaatccttgaagagctggactatgctgagaaaattatgaagcgcattggttgtcctattgttaatgtctcaggtaaagcagttgaagaaaccgctgaagtgatattaagcatgttaaaaaaggacaagatgaaagggtatgtataaaaacgcccattatgtaagacagataacttgtcagacatacttaatctatagagagtcaggtagaacaggcgtgttgctataaggtgcttttttaaaatataaaagataaggaagattgtgatgagcaatgtatataaaaaaacagacgttatcttaattggggccggagttatgagcgcaacgttgggatctttactaaaagagttagcgccggaatgggaaatcaaagtatttgagaaactcgcagatgcaggagaagaaagctcgaatgaatggaataatgcagggacgggccatgctgcactgtgcgagttgaactatacatctgaacaagctgatggatctatagatattacgaaagcagtgcgaattaatgaacagtttcagctttcaaggcagttttggtcgtatcttgtaagcagtaatttaattcatcatccgcaagagtttattatgccaatccctcatatgagtttcgtacaaggagaaaagaacgtatcctttctgaaaaaacgttttgaagcgctatcaaataatccgttgtttcaagggatggagtattcggatcgtcctgaaaagttaaaagaatggatgccgcttgttatgaaaggccgtacatcgactgaagcaattgcggcaaccaaaattgactcagggacggacgtgaactttggagctttaactcgtatgttgtttacacatttaaaaagtaaaagcgtagaaataaactataaccacagcgttgaaaatctgacacgtaccgcagacggctcgtgggaagtaaaagtacatgatattcatagcggcaaacaggaatatcacacagcgaactttgtttttatcggaggaggaggaggaagtctgtctttactccaaaaaacgggtattcctgagtccaaacatattggagggttcccggtaagcggattatttatggtatgcaataaccccgaagttgtagcgcagcatcacgggaaagtgtacggaaaagcgaaggttggcgctccgccgatgtcggttccgcaccttgatacacgctatatcgaccgcaaaaaaacactgctgtttggaccttttgccggattttcaccaaagttcttaaaaacgggttcaaacttggatttaatcaattctgtaaaaccgaataatatcttgacgatgttagcagcaggcgtcaaagagatgggcttaacgaaatacttgattcagcaggtgctgttgtccaatgaaaagcgtatggaagaacttcgcgagtttattccaaacgcaaaaagcgaagactgggatatcgtcgtagcgggtcagcgtgtacaagtaatcaaagatacggaagccggaggtaaaggaactcttcaatttggtacagaagttgtgagttcagctgatggttccgttgctgcattgctcggggcttcgccaggtgcttcgactgctgtttatgtcatgcttgaagtgctagaaaagtgtttcccgcagtatatgaagaaatgggaatcaaaaataaaagaaatgattccttcttacggattatctttggtagaaaatccagcgctttttaacgaaattcatgattctacagcacaaatgcttgatttaagtaaaaaagaacttgtgtaccgatgattttaggcagcctttgacacgtatgctttaaattaaaagaattttttagaagctgttgtaaagtattcaaaatataggtgaaacatataagaaaaaatgagggaggttcgttatataacgggcttctttttatttatttcctttactagcagaatttacttcgtattcatgatataattcttactagtaagcgtttacatataatgaagtgaagaattggaaaatagctatttcgaggagccgataaaagatgattctaactaatacatctttactaacgaaagaacaaacgatttttaatcatacaggtaataaaattaaattagaagacagagaggttgatattgttgctcgatttgaagagcctcttgttctagttttaggaaatgtcctaagtaacgaagaatgtgacgaacttatacagctatccaaagataaaatgcagcgatcaaaaattggtgctgcacgtgaagtaaacagtattcgaacgagcagcggcatgttttttgaagaaagcgaaaacgagcttgtacatcaaatcgaaagaagactttctaaaataatgggaccatctattgaatatgctgaaggtcttcaagttttaaaatacttgcctgatcaagaatacaaagcacatcacgattatttcacttctgcaagtaaagcatctaaaaacaaccgtattagtacattggttatgtacttaaacgatgtcgaagaaggaggagaaacttattttcctaagctgggtctttccgtatctccgacaaaaggaatggccgtgtactttgaatatttttatagtgatgctgaacttaatgaccgtactctccacgggggagctcctgttataaaaggagaaaagtgggtcgctacccagtggatgcgcaaacaaaaaattcgatcgtaaaaacaaaggtttgaagagccctattagctattattgttaatgagggctcttatttatgttacaaaaaaatagcaatcatgttagccagttattatattgcaatattcacacttattctatttgtgcggctattccttattcttataagccggtagacgataaatgtatttgtagtgtaaaatatcctcatgattaaaaatctggatacactaaaacgaaaaatgtgttcgtgagataaaaataaaatagatgctatttaaaaaaatgactttaaaacaggtaagcaatttttataacagttgcacgaaaaaactcgtgaaaggtattttcacgagtttttgtttttaggtgatttacactatttataaaatcattttacttttatatagtagatagggaacgtgttaaaggaggacccgggttttgaaagaaataaaagcaattatttgcacgatgcttgcgatgtttatgctacttcttactggatgcagcgatgagcaggcaagtcattcaagcacatcttctaccgatacaaaacaagcagttcaagtagaaggttcatcagatcaagaagaagatcatagtccttctaaagcaaatcgtgaagatgtagtaggtgaggcggctacggtagaaagagtagtggacggtgatacgcttaaagtgaaaatgctgaacggaaagagagatcgcgtgcgattacttcttgttgataccccagaaacaaagcatcccaaactaggcgtacagccctttggtcctgaagcatctgcttacacaaaaaaaagactagaaggacaggaaattacccttgaatttgatgtgcaggagcgtgatcaatatggacgcttgcttgcttatgtatggatagacaatgagctgtataatgaagagctgctagcaaaagggctagcccgcgtatcagtatttcctcctaatacaaagtacgtagatgaatttaagaaaatacaggagcaggctcgaaaaaacgaaagaggcatctggagtattgaaaactacgcacaagaaaaaggatataacacggatgctgtaaaaaatcagtcctcttctaaacaaaaggatactcagtctgccaaaagctgtgaaggtaaaataaaaggaaatcaaaactccaaaatttatcatgtgccaacaggggcacactataaccaaaccatgaacaacgtcatttggttttgtacggaaaaagatgcgcgagaagcaggatacacaaaagcaaagaactaacaaagaaattcagtaaacgctgagtttctttgtttatgaggtcagtaaatcactaaataccatccaacaaagagcggccaattcgtataaggaggcgcagtggcaatataagcagctgcggaacctggaaaagaatttccgcaaaaagttcccattcacttattgtattatctttctgctgacggcgttttttcatagtcatcatccattcatttgaaaatatacattaattatacaatgaaaggaagattaggagttaattttttctttcttttctttttcgtgttaaagtagataggtaagaaggtttgctacaaataacgcaagcgaagagaataaagggagtttgaaaatcgtgaaaataaggaaagcaagaaaagaagatgcttctgctgtaacggaattactttatgacatgcttggcagtattgcacgctctcatacggcggctacaacgaatgaagaagcgcttttaagacttaaagcgtttattctgtctgagaaaaatcgctatagctatcatcatattacagtcgcagaagtcgacgagaaggtagttggacttatgctttgctacgaaggaaatatgttacaaacgctttatgaaccagttaagcgttttgtacgtgctaaacttaataatccagcgtgggaaattgatatagaaactgaacacggagattattatattgactctctatgtgtagatgaggcttaccgtggaaaagggataggaacggctcttttaaatgtagccaagcaagaagctaaaaagcgtaagatgtttttatcgttaaacgttgaatataataacgtagaagccaaaaaattgtatcagcgtataggctttcaagagcataaaaccatttttattgataaaaaaccatttttttatatgaagactgcctgagcatctttacggtagtattttttgtgataaaatggatatataagtaaaataataagaaccaacagctcagcacttttgctgagctttcctgtaaatcgcgtaaacgtatcaaaatggaaagaatcctacatccaatggaccataagcaagcggtcatgaaagtatgtttgctgatgtgccacatgaaaggagcgtgcatgaacatcagagatcttccgtttaatatgagttatcgatttaatgaacagcttcgagaagttccgattaatccacaccaaatgaagcagggaattatctatttaaagaaacgagctcttgaagaagagggtgagtgtgccgctgctaaaacatatggacatattggtgtatatgagcgcatacttggagaattaacgagcagtgaaagacatctgctgctggccatttatctatatgaccgacatgctgatgcaataggtgaatttttgaatacgatccgacttggacatacatatcactggcaagaacagtgggataaagcgaatgaaacgtttcagctactcattgaacaattaaaagcagatgaagaccttcacatatatgaggactttgtctatcagcattatggaaaatgtttacttgatcagcgggttgtttccagagcacatcactattttcaacgcgcgttagaaattcgattgaaaaaaggcgataaagaattaattgagtcaactaattcctgcatccgtctttgtttaaataaattaaaacattcctagtatacataaaagataaatgactcatagccttggttacacataatgcataaactttccgtttgacaaacgtatgtgaacatattatagtcatacatggcaatttaagaatacgtaatataaaaactaaacataagcgtctcttctcttttggagaaggggcttttttatgtgaatttttatgccaaggagggtttaatcgatgagtaaaacagtaaaagatgtcatctttttattaataggttcgtttgtattttcacttgcagttaacatgttcgtcattccaatagggctaggtgaaggcggcgttacgggtatatcaattattttatattatacaacgcatctttcaacgggcgtcactaactttattttaaacggtatcttgcttatcgtagggtataaatttttagagaaaaaaaccatcgtctatacgatgattacgattatcgctacatctatttttcttcacgtaactgaaggctggggtcttcatcttcatgaagagctcattggcatggtttttgccggtgtactgctaggcgttggaattgggatgattttgcgagttggtggaacaacagcaggttcagccattattgctcgaattctaaataagtttttaaactggaaagtcagtcgtgcacttttaattgttgatttactagtggtattggcttcttattttattattggaatcgaaaagctactatttacgatcgtcatgctgtacattacaacaaaagtaattgacttcgttattgaagggtttgatgctaaaaaggccgttaccgttatttcaagcaacaaaaatgaagtagcggatcaaatcaatgaacagcttgatcgcggagtaacgattctaaacggtcgagggaactatacaaaagaatcaaaagaaatcttgtacgtggtcattaataaacaagagcttattaaacttaaaaagctgattaaaaaaattgatgatgaagcatttgtgattgtacacgatgtacgagatgtaattggaaaaggctttctaagcgcatagagctgtggttcttggcaattttttctgacgttggtgttttccgaaaaagtatgatataagtgtgtctaaagacaattcaatatacgaaaggaagaacccatatgcgtaataaaaggcatgtaaaacgtcttcttcaacgtcgaattcgttctttacgatacgttgtcttgattttatttacgatactgatcttaaagtacgttagtgaaatcatgtaacttttttatatgagtcttatcgctcatttggagtgctttttcttttaaatgagtaaaccaatttatataatgggttttaagaaggaggagttccatgagcattcccaaaccattagttcagcttaatcaactctttatcgttataacggttttgatcgctttacttgcggcaaagtggcttttacttttgccttttctcgttggagtagtcacacttgcaacaaagcgtaatcccgtaattatggcagggaaaaagcttcttaaaaagcctgcttcttcttatcaaatggaagaccgggatcagcagctttttaaccaatggattgcaacgatatgtatcggggttgctttcatttcatttttaatgggttatacgcttgtcggctatgtatttagtataatggtgcttcttgctgctggtgtagcgctgatgggatattgtataggctgcacgattcgttatcgatatatgatgtggaaatataaaagaaaaaaacacgctgcataaacaaagcctccagaaggctttgtttttttatgctcatttgtatgcgttatcaataaatttaatcatcataacgggtgaaaacaagtgttagaacaccaatatcctttaaaaacctttgttgacaaagtaaggtaaacaaattaaactttttatgataataataatcgttacgatttaaaaggaggaagttatagttagagaccgtacataaaagaaagatagttttgaataaaggagggatttatatgagaaaaaggataagtctgctatgcttaacgcttgctgcgacaggtatgctagcggcatgttcgagtaactctgcgagtaccgaagaaaaaaatgaaaagaaatcacttaattttgtatcgaattttccaagtgacatgctcgatccacagttgaattatacaactgtacgagctggtattgccgaaacgttagtaaaagttaatgagcaattacagattgaaccgtggctttcaaaaaagtggaaaacagaagatgatgggacgacctgggtatttgagattagagacgggattacgtttcaaaatggcaaggatctgaatgctgaagccgtgaaacattcgttagaaagaacgataaaagaaagcgaagcaatgaaaagtgcacttaaaattaaagaaataaaagccagtggccaaatcttaaccattacaacaacagagccgcttgccacgctgccttctgaacttgttcatccaaacacggcaattattgatgtagatgctccagatacaaaaagtaaacccgtgggaacagggccatttaaagtagcttcgtttaaaccggataatgaaatgaaagtaaaaaaatataaagaatattggggcggggaaccaaaattggatgaagttgtgttaacatttaatgatgatgaaaatgcacgaacgtccgctttgcaatcaggtgaagccgatattgtgtaccgtccggctattgaaagcttaaacacgttaaaaaaagattcttctattgtagtagatatacagccgagcctgagaaatcaaatgcttttctataattcaaggcaagaagcgtttaaagataaaaatgtgagaaaagcgtttgatgtattattaaatccaaaagatgttgtcgatacagcgcttgcaggtcaagggtccccggcaactggtccatttttaaagagtttagatttttcgaacgatcaaaaaacgaaaacctatggaccaagcgaggctcaaaaatatttagaaaaagccggttatatactcaaggatggaaaagcaataaaaaatggaaaacagctttcctttaagcttgttacatacccttatcgtccagaactgcctttaatgtcacaaatgcttcagtcagaagcaaaaaagattggtgtgaaaatagacattcaacaagtggaaaatatggacgagtatatgacaacaaaaaatgattggggaatcgttacatatagtctagtaaccgcgccgcgaggagatgcaggatatttctttaatgctctttacatggagggaggagcatttaatgtaggtcattttcatgaaccagcattaacttccattattaataaactcaataaaaccgttgatcaaaaacagcgcaataagttagcaagacaagccggagaaatagcagaaaaggaaacgctgcattcttcgattgttcatccgaataattttgtggcttatagagacaatgtgaaaaattggctcacaaccaaaagtgaatactatgtgataacaaaggatttagatgtgaaatagatatgaaattaattggtaaaagaataatagaattactcatttttttagttatcctatcgtttctcagctttgttttgatgaagctggctccaggagacccagttaagcaaatgcttcgcgtagatgacgtggcagtttctgaggaacaaatgaataatttgagaacagagctagggtttaatgaacctgtatatattcaatatgtaaagtggctgaagcgcttttttcagtttgatttagggtcttcgtatatgacaaaagagcctgtcatcgatgaattagccgagaagtttccggctacgctgcgcttgacggctgcatctttggttgtgatgctgttaatagctgtgccactcggcacgctgtcagcactgtatccgaacaagtggattgattatctcagcagaagtatttccttaattggagcgtctgttccaagcttttggctcggccttttgtttatacagctgttctctgtacgtcttcaatggcttccttcaatgggtacaggcacagcagcccatcttgtgctgccttctttaacccttggttttgccatgtccgctgtgtatatgcgaatgattagagctagtctgctagaaggactgaaacaagattttgtacgatccgctcgagcaagaggaataagtgaaagtcgaatttttatttttcacgcgttccggtatagcttaacgccgcttcttactattttagggacgagcttaggcagtttgcttggaggaacggtcattattgaagtcctttttgcttatcctggaattggaaaattagttattgatgcgattatgaatcgtgattatcctgtcattcaagggtatattttgtggatgggcctgtttgttgttttagttaattcacttgtggatttgagctacaaatatgtaaatccccagctctatgtaaagggaggggataaaacgtgaaaaagccgcagcttccttttgtagtgataagcgtgtgtggtattgcgcttgttttattttgtctgtttggaagtcatctaacaccaatggatcccacacaagtcaatatgcaagatcggcttcaaaaatccaccagtgatcactggctagggactgatcatttaggcagagatctcttttcacgaatcgtagctggagctcagactacgattggaactagctttcttgtcttagctctttctcttttaattggagtcccggttggtttaatttcagcgtatattggagggaaaatagaccgatttttaatgagaattgtagacgcttttttagcttttcctgattatattgcagccatcgtcttaagcggactgttagggcctggattatttaacttaattgctgcgatggttattgtaaagtgggttggttatgcaagggtagtgcgcagtattgtgcttcaagaaaagtcaaaagaatatgtgctggtcgctaaattaaacggagtgggaacactacctttaatcctgcgccactttcttcctcatgtgggaggacatcttcttgttcttgctacgctggatatagggaaaattattttaatgatggcttcattatcctatattggactagggactcagccgcctactccggaatggggaacgatgctaaatgaaggcagggcctacttttacaatgctccgcagttaatgttaataccaggcgtggccattattttatttgtgctagcgtttacagctttaggtgaatatattcgagggaaatagcaagttaatcagtaaaagaggtgatcgtcatcgttttagaagtaaagcatctagccattcataataaaacaaaacaaatcgtaaaagacgtttcttttacaatcgagcaaggacagtggatggcactcgttggagaaagcggaagcggtaaaagtatcactgctgcttcgataggaggactgctgccttcaggtgtaacgcttaaaggaggatctattatctttaagcagaaaggagaggcgcctatccttggaaaagatatttcgtatatttttcaagattatcgaagcgcctttactccttttttaacaattggaaagcagtttgatgaaacggttcgtacacatagtgagctgtctaaaaaagacaggactgctgccatttttcaggctctaaaagctgtaaatttacctaatgaacgcgtgtataaaagctatgcttctcagctgagcggaggacagcttcagcgagcagcgattgctttagcactggtgatggagcctgccttgattattgcagatgaaccaaccacagctttagatagcgtgtcagcagctgaagttcttcagctgctgcataagctgaaagaagaaacaggctgtgccattttgtttattacccatgatttgcgtcatgtgcggaaatatgcagaccgagcagccattatgttagcaggagagatcgtggaagaaaacagtatcgaatctctatttcacgctccgcgtcacttttatacaaaaaaactgtttaacgccattccttctttacagaaaacgcctgatcgattgttagatacgcagaaaaaagtattgatataggagtgagatatgaaagaaaaaagtatattacgcgtcatgcaactggtgaaacagtataaagacgttaaagcgctaaacaatgtttccctgcatatcgataaaggggaatgtgtagggattgttggagaaagtggaagcggaaaaagtacgcttgtaaaaagtgtgctaaggttaacagagattcagcagggagaagtatggtttgccgagcagcctcttcataggttaaaaggaaaaaagcttcagcaagctcgtttaggcatgcaagttgtatttcaaaacccggctgcttcttttaatccgaaagtaaaaatcatcgattctttgcttgagcctttgcgtcagcagcgcactgttccttcatttttatctcacgtgagccacagtgaaaaagaaatcgctatttatctgttgggaaaagttgggataagcgcagaatatgcactgagttatcctcatgaactcagtggaggacagcttcagcgtgtagcgattgcgcgtgccattagcgtaggaccgtctttggtgctgctggacgaaccaacagcgagccttgatgttacggtacaagcaaaggttttaaacttattaaaagatttgcaggagtcgtttcagctatcttatttgtttatttcgcatgatttagcagcagtaaactttatgagcacccgcatgatagtaatgcagcaaggtgaggttattgatcgatttgaccgtacaaagctatttgataaaaacaggcatccttatacaaaaaagcttgtgcgtttatttgaatagggagtaaagctcttcgtttaatataataaatgaagagcttttttataagaaagtaagtaagctcaaggacgcggcggtggagtatgcatatgtataaaatgatagcctgcttggcagagcatgataaaactaatgctgagtaccacgagaggaattagcttgttttttcctcgttcttcatatagtccggctgcgcttaaaaggaagccaatagcagctaaaggaggagagacgcgaaagaatagatctgcagcggtaaacccttggtttgtatatttataataaaaaaatagacctgtaatcaataaaaatagtccaatccaaaacagcgtaagttttccaaaaagggttttaggcactgcgatttcactccttttgtcagtcaagtaccataaaatactagcataaaatgttctagtttgcattagagaaaaagaacgtgaattatacaatatgtgtaaaaaacaggtttgaagtaggaggagatgaagtattcaaagcgcttcatgtaaaaaaatacatatcgttggatctgttggaagtggaaaaacaactctagcccgtttattatcccatgaattaaaagttcctcactacgaacttgataatattatgtgggaacgaacatatgaaggagataaaagaagaagtgaagcggatagaaaaaagtgtttacatcatattgcagcttcaaaagaatggattatagaaggcgtacactatacgtgggtgaatgaaagttttaatagagctgaccccattatttttctcgatacgcattatttaaaaagagtctggtttattctaagaaggtatgttctgcaaaaggctaaaatagaaaaagcgaattatgaacccacgctttctatttttattaaaatgtttcagtggaattcagacttcgaaaagtaaagtaaacctgaaattttgcatatccttcgtatgtcatatcacgataaactgatagtcgtgaaaaagagagaagagatagagcactttatatcgtaaaaaacgccgctcagtgaatgaacggcgtttttgtttttattctatcagcatggaaacatattttttctcacaagcttttgcaaggtttttgaggagctgattgagaaactctttgtccattttaagccactcttctttttgaagcccttctacgatataggaaggaaacacccatacatcgtttttgattgcagagcgatttgtttcagcaattacggttaatgccttaatgacagcagacatcactgaaacatcttctttcccataatggcgaatttgatagaaatctcccgtaccatgatttaataagttcggacttcttttaacaaggagaaaaaagtttagtcatacttatcctcctattattacccgcatctgcatgtgcaaaacttctctaaggaaagtttcatcattcgtttgtaaagggtagagaccaaaaaggagggaagagccatggcatttgattattcacttgattttgagcatatcgatttcagaaaacatcctgaaaaatatagagtaggaaaaggtgaacaaggagttctccttgttgagccatataaaagtgaaattcttcctcattggcgttttcgaacaccagaaattgctgaggaatccgcggacgctatctatcagatttttttgacctacaaagaaaaaaacgattttgttggaatggacatggcccggaaatttctccaaatgggatacacgcgatccaggcgctatgcgaactacaaaggcggaaagaaatacagcaaagacggagagcgtaacgaacggaaaattgatgaacaaaaagcagaatcggcggctatttttatgaaaaaatggaaggaggtacgagagaataaggagtacttgaaatttaaaaaagagcatcaaaaaaagtacggataatcagctgttatccgtacttttttcctttgttatttcgattcgtttaatatggtgatgttcaatatcaatgactttaaatgaaaaactttcgtttgtgatactatcacctttagcaagatcaaacttttcggtcagcatccagccgccaatggtatcaacatcttcttgttcaatatttgttccgagtaaatcatttacttcttcaatcaacaccttcgcatcgagtacgtagtgattttcattaattttgtgtacgtccggtatttcatcatcatcaaattcatcacgaatttcaccaacaatttcttctaaaatgtcttctaccgttacaagccctgttgttcctccgtactcgtctattaagatggccatgtgaattctgtctttttgaattttaagcaataagtcgtaaatggcgatggaatcaatgacttgaatgatgggtttcatatacgtttgcacggtacgtggtttaatatcatcttcttttatgtaatctgctaatatttctttaatattaactaatcccaccacttgatctttgtttccatctagaactactggatagcgagtatattgctctactctagccatttttaagaattcttcaatcgtttcatctgctgatatgctaacaatctctgtacgaggcaccatgatttctttagccgttcggttgtcaaactcaaaaatattattcatgaacttaaattccgattgattaatctcgccgctttcatagctttcagataaaataattctaagttcttcttcactatgggccacttcattttcagaagctggcttcaggccgaataatccaacaacgcctcttgctgaatggtttaaaagccaaataaacggataaagtaacttagaaaaaagaataagagggcgagaaaataacagcgtcacttgttcagctttttgaatcgccacggttttgggtgcaagttccccagctactacatttaaaaatgtgacaatcgaaaaagcaagtacaaacgataccacatgcgaaagtgatgcagaaaaaggaagcatgtcaataagcggctctaataaatgacctaccgtaggttcacctatccagcctagacccagtgcggtaaccgtaatgcccagctgtgtggctgaaagataaccatctaaatttgatactactttttttgctgctaaagcgttccggtttccttcttcaattaactggtcgattctagtcgaccgtaccctaatgacggcaaattccgttgcaacaaaaaaggctgttaatatgattaatacgatgaataaaataacatttactgtttccaaatttatctccttaccccgttggaacggataagggaacacctcccttataaaagtttgatgagctgatttatatggtaaataaagaatatcatgtatactgttcccttaatgtccgtagaaataaacttaccgaaaagaaagagcattttttaataaaccgcaacattttttggcagaaaaagcgtaaactaaacactataaaatgaacgaaaagagataacgtgatacctttaaaaggatgtaaatagaagtaggagtcgattgtttttatggaatttttcctgacgatattagtcttattggctttgattggtctatctaatatcattaatcattttgtaccatttattcctgttccattagttcaaatagctttgggagcagggcttgctatcttaccatttggcggagaagtacatttagagcctgagttattttttattttatttattgccccgctattattcaatgatgggaaaaacgtgtcaagagctgctctttggaagcttcgtacacctattttattactagcgctgggactggtttttgtaacggtggcagtagggggatatctaatcaattggctcatcccttccattccgttaccggcggcatttgcactagccgctattttgtccccaacagatgtagtggctgttggagctatggcgagccgagtaaagctccctaaacgaattatgcatttgcttgaaggcgaagggctgatgaatgatgcctctggtcttgtagcgtttcaagtagcagtagccgctaccgtaacgggcgtcttttcgatagtagatgctacatttcagttcctttgggtagcgctgggcggtttgtttgtaggagcatttatcgcttttttgattattagactgcgcgtacttgttcgacgtttaggaatggaagatattacgattcatatgttaatacaaattctaactccatttgttgtcttctacattgctgaacattttcatttatcaggaatcttggcagttgtagcaggcggcattgtgcatgcgattgagcgagaccgagaggaatcacctaaccagcagcttaaagtagtatcaaaaagtacttggacggttattttatatttgttaaatggcttggtgtttgtactgcttggtctgcaaataccaaaagtggcgaaagcaattattcaagatccaaactttaataatggacaagtgcttctttatattttgattattactgtctttttgtttgtactacgatttatttgggtgatggtatcatggtcagtaggctggtattacaaaaataacaagcatctaaaacctgagcctcggtctattggcattattacggtttcaggtgtacgaggagctgttacgttagccggagcgttttcgattccatatacgcttgataacggcagtgattttccggaacgctctctgattatttttctagcagcaggcgttatattgttaaccttagttgcggcaagtattcttttacctgttattgcgaaaacagaaaaggcgccgaagaagcctgagcgcaatacaaaagaggttaaagcacgcattaaagtgcacaaagctgctattcagcggttaaaaagagaaatgaccgaggaaaatcgtggagcagccctttcattaatttcaacgtataatacaacgatcaataacatcatcgttaaaactcatcctttagaagcctctgaaaacaaacagtatgaagaagaaattcgattgctggctcttcaggccaaggggaaattggtggaaaagctattaaaagaggaaaaaatagaccgtgagacagcgtatatttgtttggaacatacgcacaagcttgaaatggctgtaaccaatcgtgtaaggtacaaattattggtgagctggacgaggtttaaaaaagttttattattactcgtccgaattttttcaccgaataagcaggcgttaagaaaacaaagcttgcgaagaagaagcaaagtgaacaaagtacgtattcaaatgatcgaagaagcgataaaggtcattaaagaaaatatgaacgaagaaaatcgaatgatttcacttgctattattagtgaataccatagatccatggcgagacttagaaaagagagtacggagtataattcacgcaaacgtaaaaaagcaacgagagatttatgttataaagcgtttcataccgagcgggaaacggtgcaagaactgtatgaaaaaggagaaatcacgcgtgaaatcgctcataatatccgaaaagatatcgccttgcgtgaagcattaacaattgaagaaaatggttattaaaaagtcgcagagagtagtctctgcgactttttttagtaagcttcattctattgcttttcaaaaagataaagctttccgttaacagcaatatcaaaccgaggccctttaaagccgcgttttataagttctttacgcataaacttcataatgcctccgtggctgacaatcagcaaatcgtcttctgactcggaaatagcgcgatctagcactgctgcgacttttctcttagcctcagccatatctttacgagcttgtttgttgatgattccggacaagcgaaacagtaatacccataggataaaaggaagtttgaattttactggaataataggcataggtatttctctaagttccggaagaagagtgatctcttgtttataaatatgctttgctgttttatgtgcacgcggcatatcgcttgaaaaacagcgtttccattcaatattattcaaatcagtctctccatacgtaatatctgattcatcatattcctgaaaccaagttactagttcatcggtggataagcggtgattttctggaagccctttgtttactttgtaatgacgtactaatgctactttcattgtgaaatctccttaaaatctaagcgccaaaaacacttattcggcgcagcttgattttcttatttaacgttattttcatcatgctgcacctcctttcaaatatttgtaaaataattataaaatggattgagaaaattgtaaatacggcatagaagaagatcttgagatagaataaatggaaaatgaaacctttttataacataaaacgtattacttatagataattcaaacaaattgaaatacatataaaagggtggattacaatgatggatacagagagaaaagtgaacatcagagaagagtttggaactttatttgcacaagaggattttaagaagctttatgattgtgtaagcgaagaatttaaacgtcaagtttcgcttcagcaatttttggagcagagcaaattgtttaatcaaggagaacagttctatagactagaaacaaatcttcatttaactcctcaaattgagcagtttatttggatgaatcataagcaaacaaaagcaatcagcgttatgtttgatgaacatagcattattcaagcacttgtgcttgctcctatagaatcattttcagagagagatcgatggagtacaaacaaatatacgatgccgattcaaagtgaatggtttgtctattggggaggaaagaatgaggtattgaactatcactatccagtcgaaaaccaaaggtatgcgtatgatttagtcgtgcgaaaaagaaagcaaagctataaaaatgatggaatgaaaaacgaagattactatgcctatggaaaaaaagttgtagcgccgcttgaaggagtcgttatcacagcagttgatggccaagaagataatgaaattggatacacgaataaaaaaaatcctttaggaaatcacgtcatcattgagcatgaaggaaaagaatacagtgtgcttgcacatttgaagaaagggtcggtttctgtgaaaaaaggagacgtggttcgtaaaggaacgctgcttggaaggtgtggaaattcggggaattcatccgagccccacattcattttcacgttatggatgcccctgacatcgaaacgtcaaaaagtttgcgaattcagtttcatgcggccgttgagccgattcgaggagatacggtcattccatttttctattaattaaaaagccacagcgtttgctgtggctttttatgaatggttttcctcaaatataaagtcaagcagccgttgaaacaagtaaaggataatggctacggtagtcatgacaaggaaaagcccaaaatgactgatatcatacagattataaagcccgattttagcgagaaaaggaacaatgatataaccatgaatcaaatccaaaataatgttaacaattatgtacaagataaacccgggatacgtaaggtaaaagacaaagatcgtaatcacaatatgaaggcaataaatcgttgctcccatgctagtaagaaaaaatacgttttcttgaactgtccaccagtgcattttttccgctacttgataggcaattgtcatcattaatgcagcaaataaccctacagtaaaaaatcgtttaacacgctgtttatcaagcagcagcagtagaaaccatggaataacaagaatcccccataatataatttgattcattcatcgtcccaccttttatttatcagtagttcttagtgtaagaaagtattgtaaaaatatacatttccaaaagagaaaacgtttataatagagcttcttatcgatatactagttcttgaatacttgtatacaagttggctaaggaagtgatgacacattaatatggcatctttgctttcttaccaaggaggtattaccgttccggcctatgctgcagcaaaaggcggagttgctcagcttacaaaggctttatctaatgaatgggcagcaaaaggcgtaaatgttaatggagttgtaccagggtatattgctactgatatgaatgaagcgcttattaacgatgaaacgcgcagcagacaaatcattgaacgcattccagcaggcagatgggggcaagcagatgattttaaaggggcggttgtctttttagcatctgatgcatctgcttatattcatgggcacttactcgctgtagacggaggatggctaggaagataacgcatgaatgaacgaattttttcatatcatgaacaaacttaattgaaaggagcgttcgtggtatgaaaaggtggatgttaaatgtgggtattgttgtcacagtgcttataactgcttgggcggtgtatacaaagcctgaagagaaagaggtttcgctattttcttacgatcagccttctatagttgttcaaaaagaaagcacagactttgaaaaagcgttaaaagcttttttgacgcagcatggctttcaagaagttagggtgctgaataactatgcggaagctcaaattctggttcttctgcccagcgaacacctttctgaccataagaagagagaaattcagcaaatggtaaatcaacttgccaagcagtatcacgttgatcctgatgtagttaatgttcagttatatgaaaaaaagtaaaaagccttttatcaagggaaatctcccttggcaaaaggctttttttactcttttttcttctcttgttcagctagttcttcttgtcttttaaaatgtgattttcctaatgcatacacaaaactaaaaaacaaaggaagtaaaatagtcagcagcacaaggcgggtaagcatatcgcccagatcatttcttgttaagtaaatattaatagctgcaatgacaatataaataaaaataccgaggtttcgtaaaaatctctttagcatagatgcattcatttttttcaccttacttttatatactcacatttaaggtaaaggaaacgattcataaaagcaacctatttactacaaagcaagaaggaatataggaatttatgatgaatgtttataggttgcctgaaaatcatgggaataaaaatcctaacatgacgctgttttataaagcagcccgttccgaggacactgaatgcatcgagtcagctattaacagttgccttctcttcaatcagctttatttcttaaaaaggtaaggtgataagatgaaaagagtactggtaatgggcgtttctccaggagtaggaaagtctacatttgccaagaaattaggggaaaagcttgatctagaagtatatcatttagacagcctgtattggcagcctggctggacggaaagagacaatgatagctttagagaattgcaggagcacattgtaaaaaaagacagctggatcatcgacgggaactacagcaattcgtatgacctgcgagtgaagcgtgcagataccattatttatttagagctgccgctaatcgtttgtgtgtaccgagtaataaagcggagaatcgtatatgcaagaaaaactcgtgaagatatggcaaaaggatgccctgaaaaagtagattggtcattttttacgtttattcttactacgtatcgagagcggcaaaaaaagatgagaaaccggtttaaaaagcttaaaaatgatgagaattgtaaggtttttatgctgatgaacagaaaggacatcgagaactatatacaaaacctatagggggagtatgagctgaattttgaacaaaaatagccacgtaacaagttcgcttgttacgtggctttattaaaaaaaacaatcattcttgcgtaatcttcaacattcctttttcgtcgagcgcaaccgttagagaatgattgacctttaccattaatggatgaacttcagagtcgcggttcgaaaaaaaccaccgtcttttaggcgtccctacaagaaaaaacgcactgccgcttcctaaaaagttaaaggtctcgtttaatatcctgttgttgcgcacggtgataccggagttaataagctgtgtccctacagagtggacatgaggagttgtcaagttgatttctcctatgcttaaaagcgacttagaagaaaagggggccttggatgacgggcagtccgaatgtcttgaaatgtattcaacaatattatgagcagggtcttcaaaataaaacgaatgagcatcaaatgcttcaaaataaatctcatctttcttctcttctgtattgaggaagactctctgagtaacccattgctttgcttccataaagcggtttgctggaacattaaaagcaaaatgataaaagggctttgtatgtagagaactttctttaaaggtgatctcactttcaccgaccttgatggaaaaagaacgcggtgaagcggcggttaatggaaaatcgagagaatttacataaaaatccttcattgtgtccaataagtgggtgtacaggacagcttgattaataatcataaaccattcctcctcgtttaagcgttgtctaaaatggtattacacaaatctttcgctctctttttgattactgcttttccagtgaagctgaaaagagcctttatgctcggagcctacaaaattaatacgatatcttctcgttttttcaggtgttaaataaagagagttattagtcatttcaaaaaatcgtgtctgttttggatcttctacgtacagggacaggtctccgcttttggtgtttttagatagcgtaaaagcgtaggttacgccttttttgagtttaatgctccgagagtagcggcccgtaaagctgtcgtattcgccaaagaaaacctcacttcgttctttttttattttgcctcctacaatttgattttcctgaccgttaaagttaataagtaaaaaagcgataagaacaataagaaaactatatttaaacataaaaacctccatctactaaattatagatagttttggatttcgtcaaatagtgttatagtttaaaagggaaaaattaacaaaaacgaattatctttttgcatgttacgtctaacagaaaggagaaaagaattgactcagcgtttttatcttttagcagcaagtcaagtaaccgcaaatgtaggttttgttctttatacaatggctgtcacttcctatataaaggaaaacaccggttcaacagctcttgcgtcgatggttacgatgacgagcttacttgcacggctccttagcggccttagcgtacctttactagccgatacgtataaatctattcacattatgcggtctgttcaagtgatgcagatagggatgcttgttggattgtatgtgctgcttacaggagaatttacagtcacagtactaacgatgtgttttatcattgttggaatcatttctttttttaacggctttttttccatttttaaaacgtcagttgtacgcagcttagtagatgacagtcaaagaatgcaggcgaatagcttgctttcaacaattgatcaaacttttctgtttgcagggtggtcgcttggtggtttcgttttgtccttaacgggatctactcagtctctatttataacggcaggtcttctatcgatctcatttgtttgcttactgtttataaaagaagcccatacatacaaacaaacacaaaagcgaagaacggcaaaactaatggaaggatggtgctttttatggatgcataaacgcatcagagccctcgttataatggacatcatcgagtcgctttttggaaccatttggattggagctattactctttcttttgtgaaagaagtgcttggaaaaagagaagcgtggtggggatatataaacggcgcgtattattttggaagcatagttggaggaattattgtgtaccgaatgtcttctatggtaaaaggaaggcttttgctttttatgttcgcaggctcaattggttatgctgttttaaccggtttttacggtctagtaacgaacccgtatctagctttagtacttttgataatgatgggtcctgcctatcagcttcgagacgtagctcaggaaaccatctatcaaaatacctgcagcaatgggatgcttcctaaagtaatggcggcaaaatcaactcttgtacaggctgtgtttatactttccatcgcatttgtcgggacagtagccgatctgtgtggggtaaggtttgtatatctattttcaagcttcattttgctgatgacagctctgacaggcatgacagcattaatgtataacaagcattctatcgaaataggcaagacacctgctgaacggagagaaggtatatgagaatcatcaggctaacgtatcttatggagcatgatataaaagagctgttaatagaaagccaggaggaaggctttttctttcttacaaagctactagcggagtataaaaacaggcaaaacgtatttaacaaaacaggcgaaagattgtagggagtttacggtgaacaaaacaaattaattggcgtagccggccttaatcaaaatccttacagccagtatgctaacgttggaggagtaaggaggttttatgtttcagctcaatttcgcagaaagggtataggcaagcgacttttaaaagaagtcattcactatgcggagaattattacgacagcctcgttctctatacagatatggacaaagcgaagttattttatgaacgaaatggttttaaacgcgtatacaaccaccataaaatcaactcatgaatataaactaaaaaatgttcattcatcaacctaacgggtgtttaatacaattagggcattaaaatagtatactaataacgctcagaaaaaatctgagcgctattagttaccatgcatcaaccgaacccgttactctttttagtttgcttttttaagtttaagagctgttttaggagcagggctttttttgacaatatacaaaccgctaaaaataataagtcctccaagcagctgcatagcattgatggtctctccaatggctacagcagcaaaaacaacggcaaacaaaggaataacatacatgtagaccattacttttgtagagccaatttttccaattcctacataccacatcaccagcccgtagaccgtcacgaacaaaacagagtatgccagagagctccagctgcctatatctgttggccagataagcgtttgataggtgaaaagacagtagacagtaagcggaatagcgccgattaaagcagaccaggcagtcacgcgcaaagcagaatattttacgactaaaggttttgctaaaatcgggtaccagccccaagcaatggctgccacaatccccatgatgtttccgaaccatgcaagctgcgacagcgcatgactagagtgaccaaacagcagtacaaacgcagccccgaaaaaagcaagcatagagcctagctgtgtttttaacgaaaaagcttcatgcttatataatatagctaagattcctgtgaaaataggagacatcgaaataagtaaagaagcatttgtagctgtcgtatacttaacagataccataaacagcgtttgatagagcgtaacgcctactatactgaccgctattaaacgtccccagtcttttttttcgatacgaatgcctcgctctattattcctgtaataagtaaaagaataggagcaaccattataaaacgcagtgcgctaaattgaatggaagacatatgagcaactccaaattttccgattgtataattagctccccaaattaacgcaacggataataatatccattccagccagccttttttcatgtaatcacctcgagtaagtatagaaactaaataagtgcgaatatccttagttacaaagtatacaggaagaaattatgtaaaaggccagccaattcagctatttttatctcatccacttgtttttaatacaaacaaaaaagcagcttcattagctgcgttcatgaccgttatccacattgttctatctcatctaatcgcacaagttcgactttaaaagcatgatcaatcggtcggatttcacagtatcctgaatcatatacgtgaatcagtacaaagcgttttcctttatataacacttctttgtaggctgtcatgggatacaccctttcttttcatagatttgtttttcattctatgaacaaaaaacggcgtagttgcctaatataaaaagaatttttacggttgataaaattgcttggcaaaacgagttcgcttatactgtactgtgattctatttgcttataagttctgattactagaacagctttagcatatggacaacgaaaccaaacagcagtacataaggagcagcacatggatattaattatttatatacatttaaagaagtagcgaagtggggaagctatacacgaacgggcgaggagttagggtatgctcagtcaagcgttaccactcatataaaaaaattagagggtcattacggtcaaaaactatttgaacgaacaggacaaagaatgaagctgactcagcctggtgaagaattgctttattatgtgaatcaagtaaccgagttattaaatgaagcaaaagagcgccttactaagaacgaagatgctagaggaactgtttcaataggaaccgtggagtcgctggccgcctattttattacaccgtatattcgtgaattaaaaaagcagcacccttctctaaagattatgctagaagcgggtttatgtccaaatttaacacaaggaattattgacggaaagtatgatgtagccgttttgcttgatcgccttcaaacatcttcaagtttagaagtgattcctattcgaaaagaaaacatggttatgattgcttcgtcttcccattcttttagtaaaagaaacagcgttctaatggaagagtttgagggagagaccatcattttaactgagagcggctgcccttatcgcacgcttttagaagagatgatgcgcagcagcggtattcatatgcaatcggtcatctcgtttagcagtcttgaagcgattaaacagtgcgtagcggataatttaggtattgctcttgtaccggaaatagcggtaaaacaagagatggaaagtggaaaactgattaaagtcccgtttgatcacgaagaattttatctttattcacagctcatattcaaaaagaaaaaatggctgacggcacctattcaacaatttatttcacttgttcaagaagattatcaaaaatattgataataaatatagagaatcttcaataatgatgaagttgttttcgtgctacactttttataagacatgaaactagaggtgtagaacatgaatatatttttgcagcacaatcctacaaaattatactttggaaaaaatcaaattacgaagctatcgcaagagcttgcttcttattataaacaagtaaacgttctgttagtatacggaggaggaagtatcaaacgaaatggcgtatacgacgaggtgaaagctgaacttcagtctattaacgcggttgttcacgagctggctggtgtagaacctaaccctcgtttgactacggtagctaaaggcgtggacatatgtaaaaaagaaaacattgattttctcttagccgttgggggaggaagtgtaatcgattgtacaaaagctattgcagctggagctgtgtatgaaggaaatatatgggatttaattacacgtaaaaaagagattacagatgctcttccttttggaacggtattaacacttgcagcaacaggatctgaaatgaattcaacttctgttataacaaattgggaaacaaaagaaaagctcggatggacgtcttctcacgtatttcccgtcttttctatcttagatccggcgtacacattttcagtgccgcgcgatcaaaccgtctatggaattgttgacagtatgtcgcatgcgcttgaacactattttcatcgcacggaaaatacgccgatgatcgacggctttattgaatctttactaagaacggctgtacaagaaggtcctaagcttcttgaagacctgacttcttataagtatcgtgaaacgatgatgtatatcagcacgacggcgtttaacggaagcttagcaaacggaacggacgggggagactgggctactcaccgtatcgaacatgctctgtcggccgtatatgatattccccacggaggcggtcttgctatcttgttccctaactggctggagcatgtactaaaagaagatccttctcgtgtaaaacaactggctgtaaacgtatttggcattgatccagcaggaaaaagcgataaagaaacagcaatggaaggagcaaaagcgcttcgcactttctggaatgacttaggagccccgaactgcttgcgtgactatggtattgatgatcgtgaatttgatgcgattgttgaaaagacctttgtaaaaccaggtgttggcacttataaagagcttgactatacaagcgttcgagatattctagaaagatccaaataaaaaaaacgagctgcctgctcgtcttttttatatgtactcaataatccattagaaaataaagaaaaagaaaaaagcacagcacgatgcatcctgctcctaccgttatttcggaaaatccttgaataaacgtacttttaggactgcctccttcattttgcagctgaaatacacgttttcttttgcgctcatgtacgattaccaacgaaccaaaagcaactgataataatgtaaagagcggcaccgcgattaaaaacagcttaatagaatacgtccagtacgatatgtacagcatataatacattgcgccagtactcagggcaaagaatgttaaagaaaatagaaaccacttagtaaaagggtttttgctcatgaattgttcacttccttatatcaagttcttctatgatttagataataaaagccgtctaccattttaccaaaactttttagtgcgttctattttaaagggaaaatagggtttgcaaatttcttaaaagtggtatagttcctagaactatccatgtgtacatacaacaaactgatgataaatgagggagaagatgaactatggggtgcgacgcgtgtctgccaattaggacaggatatacggtttcttttcagaaatcaaacgatgtaaagaagttggaaaaatactttaaagatatttctcaaaatcaatggaagactcttggagaagatatgttctggatgaaggaagagatcttttgaggttttacggattatgttcatcagcatttagaccctcggtacgtgtgggctgtagaagccaagcagcggagcccgtttgaaaacctgcggcgtatggagccaatcaccgttttttaaaaaatgaaagatgccttgtggattgatgagctcattgaagacaagcgaatttgctcatattatcagccgattgtatcggttgatcacgaacgcgtgcataccgttggccacgaaattttatcaagaggattagaagaagacggaagtattataccgctttttaaaatgtttgaagctgctcaaataagaaataaaaccttcgctcttgaccgagcctgccgcttagaagctgtaaaaaatgctagtattattgatcgtcagctgatttttattaactttattcctacagcaatatataatcctgagcattgcttggcatctacatttgcgttaatccaagaattgaatataaaacccgagcaaatagtgtttgaatttattgaaacggaggatgttcaagatattgagcatttaaaaaacattttgaattattatcgttcccacggatttaaatatgctttggatgacgtaggggttggttataacacgctgaagaggcttttagaagtggagcctgacgtggtgaagttagcatttgaattcacaaacggagttagtaaaaatgagaaacagaaaaaagtggcccaagagatgttagctatcacccataaaatgggggcaaaggctcttgcggaaggggtagagacagaagatgatctaaaatgcctgatagagatgggatatgatttgtttcaagggtattattttgcaaagcctcatcctactccggtaaaagagattcattctatttacgtttagcagcgaaaagcagaagaatagaaacttctgctttttgtatgactaaaggtaagaaaatttaaaaaataaacaattcactttcattttgctaaacagtttacaagagaagggaagtgctataagatgataaatattaattcttagtatttctatcagaaaaggagtggatgatgtggcacaaacgttgcactcatcatataaatcaaagcctactactgttgtaacagaattaagctctatgcaaaagccattatttgcaggaggggttatagcagcagttattttatttcttgcgattgtgctcacgactaattggacgcaaggtgttttatttattatcggcctagcgttaggaatgacgcttctatacgcacgttttggctttacatcagcatttcgccgccttgtatctgttggcaatgttcaaggcttgcaagcgcatatgcttatgcttgcgattgcttcaacattgtttgctattattttaagtacaggctttagctttacaggcgtaacgccaaaaggatatgtttcacctgtaggagtaagcgtgatagttggttcgtttatgtttggaattggcatgcagctaggaaatggatgtgcgtcagggacgctgtattcgttaggcggcggctcttcttccatgattttaacgcttttagcctttattgtaggctctatgttcggggcatatcatttgccgttttggcaaaaacaaccttcgcttccccctatctcattagctgaatcgacaggtcttggttattttggagcttggattgtacagcttatcgcgttcgcagcgatttactggattgcgattcaaattgccaaaaagaaaaatccgcctatgatgaaacagcttcctactacaaaagggtggaaaaagattattcgcggctcttggcctctatttacagcagcgattgtgctggccgtattaaatgcattgacgcttgctgtaagaggaaacccttggggaatcacttctgcttttgctttatggggcggaaaagcgatgatggcagccgggatagatgtatcaagctggggatttttccaaggtgcgaatggagaagccctaacgcaaagtgtgctagcggactctaccagcgtgttaaactttgggattatactaggggcctttatttcagcgacggcgcaagggacgttcaaaccaggaaagattaagcccggagttgcaggagcagctgttgttggcggccttttaatgggatatggtgcgcgacttgcttttggctgtaacattggcgcttactttggcggcattgcttcatttagtcttcatggatgggtatggatggttatggcgatgcttggcacaggcttagcgctatttatccgaccgatatttggactcaaaaaccctaaatctaatgattcgatttgttaagtttagataaaaccttctttgcatgagcaaaggaggttttttattttaggtgatgtttgaaaatctctatatttttgtaaattccttgacgtttatcaaaaatcattagctttcttcatagcgcttgtattacaaaaacctcttattttaactcaaaaagaagatgggaatttcctttttttataaaaatttcacttattttgccgatataacaggaagattgtatgtatttggcgaaatgtacattaaacaccatgtccaaacacagttattaaaacgtaaaaaggggttttaacgttacatgaacaagtatttaaaaaaagctgttatttatggaagtttgtgttttttactgggagcatgcggaggagcaggagaacaaacatcttctgaaccgcagaaaaaagaagaagctgtaaaatctaaagaagaagcggcaaaaaaagaaaaaaaagagggcattaatacaaccattaaaattagcgcagcgggagattttactttaggaaatgatgaaagcttcagctatgattctacttttaatgacgtagcggcaagaaatggccttccgtattttacgcaaaatgtaaagtcgatttttgaacaagatgatttaacaacggttaacttagaaacgacgctgacaaatgcgaccgaaaaagcaagtaaaacatttcgttttaaaggtgatccttcttttgtgaatattttaaaacaaggaagtattgaaaccgttaacttagctaataatcatacacgtgattatttacagcaaggatatgatgatacaagagagaacttaaagaaaagcggaataggctattttggctatgaagatacatacatcacaacggtaaaaggagtcaaagtaggattgcttggatatccgggctgggatgacaccaaagaaataagaagtcagattaaagacggaattaagtctttaaaagaaaaaggcgctaaaattatcattgtgcattttcactggggatctgaacgccactatgttcctgatacagcgcaacaagcattggcaaagtatacaattgataacggagcagatttaattttagggcatcatcctcatgttgttcaaggaatcgaagagtacaaaaataaatttattgtctatagcttaggaaactttatgtttggcggaaacaaaaatccaagtgataaagatacatttgtatttcagcagacgtttacgattaaagatggaaagctaacgactaataaagacatcaacgtcattccattccgtatttcttccacaacggcgcgaaacgactaccggcctacgcctttaacaggagcggaaaaggaccgtgtgaaaaataaactgattgatgtttccaatcaaatcaaacaagaaaaatggacggtttacgatgaagatagtaaatgaagctctcagcactgagagctttttttataaaataaagcgctgtacatccaaaaaaatgatataatgtaaaaaaatagattaaaggtggaactatggttaatataggtgatattatttttcaaattcttatgctgctgattctcataggcggagcaggaataattattgcatttattataggcttaaagaggctgattcaaaagcagggggcaaatgaaaaaaggcttcagcgtatggagcaaaagttagatgatatgctgaaaaataaagagtcttgactatacagaagcactgtcaatacatcagtgcttctgtacttgacattttataaaaaagcagtaagatatgtatacatcatttatatagggaggaagttacatggcaaagtcaaaagcaaaaaaaatgcgtgataaaatgacgcgtgaaggaaagcgaaatccagaattaaaccgcagcctgtttgtatttgcagacatggaaacgcgcaaaaccaaaacaaagaaggaaaaacttcaacatcagcaaacaaaacataaaaaacgattatcagacggagcgtacagtaccggagatgatcgtttttttattgtgtttcatacatctataaaatgaaaaaagagctttttgactatccatcttcactttgctcaaacatttttactgtaaactctcacaaaaaacccttatgattaggaaaagaaggggatgaactaagaatgcttacgattgaaaaagtacctaaaaaccaagcgggcgttttgcaaaatttgtattctctttatctccacgatttatctgcgtatacaccttctttagatattcgcgaagatggagctttccattttgaagagctgcctctgttttggaaagtagaaggcctctcgccatactttattaaagtagatgataagctgacgggcttttttttacttcttgaacagcccgcacttcagcaagaagcagattactgtatcaatgatttttttatcttaaacaaataccgagggcagggcatcgcttccaaaacagtaaaagacattttctctcatcgaaaaggaacatatatgattattgagcttgcaggcaacaagcccgctatttcattttggaaacatatttataaaagtttacatatttcttttgaagaaaagaaaattgaaattgacggagagccaactcttattcaaacatttagtgtgtgaaacccttctgaaaaacagaagggtttttattaaactaaatattaacaattttcaacaaattatgtataattaaagatgcttgtcgacatttattcacaggagtattcctgtaaaggaggagtaaaatgaaagcgttatctaattttttcacggcgcttgtgcagcgttttttacctgatccgtttgtatttgctttaatcctgacgctgattttatttgtatcaggtattgtttttactcctcatgggccgattgaaatggttcagttttggggaagtggattttggaaccttttggcatttgcgatgcaaatgagtttagtgcttgttacgggacatgcgcttgctcgctcgccgcttgtaaagaagtggcttgtgaacatagcactgttagccaaaactccggcgcaaggggtaattcttgtcacgctcggcgcagctatggcctgtatgattaactgggggtttggcttaattgtaggtgcgctgtttgcgaaagaagtagcgaaacgcgtgccgggatctgattaccggtttttaattgcctgtgcttatatagggtttttaacatggcacggaggcttgtcaggttcgattcctcttgtcgctgctacacctggaaacccaatggaaaaaaccgctggacttattccgctgtcagacacgatttttacaggatacaacttatttattaccctcggattattaattgtccttcctattatgacaagactgatgatgccgacgggaaaagaagtggtagaaattgatccaagactgttggcagaagatgaaatggctccggctacagttgttgagacaacttcttctaagccaacatttgctgtacgcatggagaacagcaggtttttaagtctgacgattgcgcttcttgggtattcatatttaatttattattttgctacaaacggttttaaaatggatattaacacagtgaatttattgttttttacgacgggtattttgcttcatcgcacgcctttatcctatatgaatgccgtttctaatgctgcgaaaggaaccgctgggattgtgattcagtttccattctacgcaggtattcaaggcatgatggagctatcaggcttaggcggtaagctaacaaacgcctttatctcgatttcaaatgaaacgacatttccatttctcgcgtttttaagttccggcgttgtgaacttttttgttccgtcgggaggaggacactgggttgtccaaggaccttttattatgccggcagctgaacagctcggcgtagatccgggagtcgccgcgatggccattgcttacggagaagcgtggatgaatatggcgcagccgttttgggcactgcctgcactagctatcgcagggcttggagcacgcgatataatgggctactgcgtgacaaccttaattgtatcaggctttatttttgctataggactaacgtttttctaataagaaaaggtcagctgaaaagctgaccttttttcattattttcttcttttccaagcgtatctatctactttataagccaacctcgcgctcactccagtcccaaaattcttctgcgagccgctcatcttttgctcttgaagaagggggagtcacgcgttttttataaaaataagcaccgctaatatgcgttacttcagggctgtctgctaaataaatagctgtttcggcaccttcaagaggcgttaaaaagaaagggcgaagcacggcgtgaacgctttttccaaaccccgtttgacggttaacgccgatagcggtagaaactgctcccgggtgaaggcaatttacggttatagaagtgtcttttagctttttacttaaatggaccgtaaataagttatttgctaatttagactgagagtatcctcgccatattccgaaccctgtttttaagtgaggattgttgaagtctatttttccagacttatgagcaccggagccaacatttataatgcgtccttgctgagctttttttaacggatctaaaagtaaattagttaataaaaagtgacccaaatgattgacaccaagcatcatttcgaatccgtcttgtgttgtttcacgcttgattgtcacaatgcccgcgttattaatcagcacatcaagcacgctgtagcgagacgtaaagtattcagtgaaagctcggatactatcgagagaagctaagtcacaggtcataagagatacggaatccgagccgctttgacgctttgcttcttctaaagcggtatttcctctttcttcatttcggcacaccataatgacttcgaagcctttttttgctaattcaatcgttgtagctagtcccattcctgaattggcgcccgtaattaacgctcgttttgctgtcatgagtatgttcctcccaactacatcttttttctagtgtataggataagaagatacgtcgtccacttctagctttttcttttatttctttcatgctttagaaaagtatgtaaaatgtgcacaggggagaaaatgttgcacaaaggtcaatattttacaccctactcgtcaattaaagcggtttcataaataacgaatttcgctaaaataagacatagggaggtgctagtaagatgaatagccaaagtaaattacaggagacggaatatgttcctttagagcaagaacttaaaagagaaccatccattaatacgaaaaaacgtaaaaatttaaaaaatgtaggtttatttgcactatttgtaggacccgcactattagcattttgtgtgattgtacttataccattttttacagggatttattattcatttacagactggaacggagtaaatggtacgattaactgggtgggacttgataactttaagtacttattcactgaagataagcagtttcagcaatcgttttggattacaacgaaatacacggtcgttgcgattatcttaacgaatgtggtcggattcgtattagcgattctggttactcaaatgttaaaaacacgaaacattttacgtacagttttctttatgccgaatttaattggcggacttttactaggatttgtatggcagttcatttttgtaaaaggatttgcatctatcggacaaattacgggaatttcgctttttgaacttccttggttgggagacgcaaaaacagcattttggggcatcgtgattgtaagtgtatggcaaggagcaggctatatcatgcttatttacacagcagcacttcaaaacgtaccgcaagagctgattgaagcagcaaaaattgacggagcaagcagatggcaaattcttcgtcacattacaattccaatggtagcaccggcagtaacggtttgtttattcttaacaatttcatggtcattcaaagtatttgatgtcaacttatcattaacaaacgggggaccatttaaatcaacagaaatgttagcgcttaacatttatacagaagcatttgttaataacagatacggtctaggtgaagcaaaagccttaattttcttcatcgtcgtagcagcgattacaattattcaagtaacatacaccaagaagaaggaggttgaatcgtgatgggaaacaaatatacgagcaaaacctttattgttgaaattttagcggtcctgcttggactggtgttcttggtaccattttattacgtactttcaaactcgttgaagtcatttgcagaaattttatcaaacacatcggcactgccgacaacgattcagtttcaaaactttgtaaatgcattcaaccaaatgaattacttaaaggtgcttagcaactcgctaatcattacagtcatcagtaacgcagttctagtaatcttctgttcaatggcagcttacatgctggttcgaacaaagaaaaaaatcagcagcattatctttatggcattcgtagcggcaatggttattccgtttcaatccatcatgattccgcttgtaaaagtagcaggaaacttaaatctgttaaacagcatttggggtatcgtgatcatgtacttagggttcggttcaggtatgacgattttcttataccacggatttattaaaggaattccagtcgagctagaagaagcggcaatcatcgacggatgctcacgtctaggagtattctggagaattgtattcccgttattaaagccaattacagtaaccgtagttatcttaaacagcctgtggatttggaatgacttcttacttccgtctcttgttctgcaagatcctgaactaagaacgattccgcttgcgacattcttcttctttggtcagtatacaaagcagtgggatttagcattagcagcacttgtaatcagtattatcccgctattaatcttcttctttgcaatgcaaaaacacattgttaaaggaattacaagcggttcaattaaataatagaagcggcaacagggctggttttgaggctgaggcatcaaaaccagcagcaaatagggaggaacagaaaatggcattcaaaatgaaaaaatggcctttagcagcaggtgttttatcggctacacttttattttcaaccgcatgttcaaacgaaagcgcatctggtaataaaaaaagcggcggagatcaagtagtagtagatgtatttcaaggaaaagtagaaattgcagaccagctaaaagctctaactgatcaatatacgaaagaacatccaaacgtgaagttcaatatccaaacggttggtggaggagctgacggtgcagcagctttaaaagcgcagtttgcgtcgggcaatgcacctgaccttttcacaaacggcggatatcaagaggcgaaaacgtggaaaaataaattagaagatttatcggatcagccttggattgatgacgcgtatgaaaacacacttacacccatgacgatggacggtaaagtatatggacagccaatcagtcttgaaggctatggatttacatataacaaaaaactgttcaaaaaagcaggcattaaagaacttccaaaaacatattcagaattagaagcagcggctaaaaagctaaaagctgccggcattacgccattttctatcggctacggcgagtggtgggtgcttggaaaccacggcttaaacattccatttgccagtcaaaaagatccggatgcatttattaaaggattaaatgacggcagtgcgaaaattgcaggaaacgagcagttcaaacagtatgtaaagctgcttgatttaacagtgaaatatggaaacaaaaatccgttaacgacggactacaacacacaagtaacgaaatttgcgaccggtgaagcagcgatgattcagcaaggaaactggattcagccaatgcttgataaaattacgccgaacatggatgtagggattctacctatgccgttaagcgatgacgcggctgtatctgacaaacttgcaattgacgttccaagcaactgggttattcacaaacaagcaccagcggcagataaaaaagcagcaaaagacttcttaaactggatggttacatctaaagaaggccaaaaagcgctagtagaagactttaagtacattccagcctttaagtcaatcgaagcaaaagacattggacctttaggcgaagaacttcttaaatattctaaggatcaaaaaacgattccttgggaatggacaaagttccctgaaggcgtaacgcaaaaattcggagcggatgtacaagaatacatcggcggccaaacatctgaagatgagctattaaaatcattagataaaagatgggctgagttgaagtaatggaaaagacaacataactgtatctatataaaaaataaaaggcggcagaatctataggttctgccgctttctgtgttatcacttaacttcttggccaaagcataaccgctacgccaatcagacaaacaagtccaccaatccagtcatatgtatcaggcatttttttatcaacccaccacgcccaaaacaggcttaaaacaataaaaataccgccgtaagctgcatatacacgtccaaagtccgggaacgactgccacgtagcaataacgccgtacagcaccaaagcaataccgcccagcagccctaaccagcttgatgctccttcgcgcagccactgccaaatcaaatagcctccgccaatttcagcaagacccgctaagataaaaagaaaaatcgctttaatcataaactatactccttatatcatcatttcgtttctttattctatcttacttttttcgtttgatgaaccacttgttcgttttaaataagtgtactggaaagcattcctttatcaatttgtcttcaaacctgctaaactattaatagtatgaattcattataaaacgtttgtaagagtacaaagagtcatccaattattgatgctcagcgcatttttacaaaaggtaaaagttagtagtgaagggactatataaaagaatgaaacgtttaatagtataaagccgtaaaaagaatgcagatataggggtttggtaaaatgagtttagatcataaagtgatacgcattgagctgcctacaccatttccaattggaccagtgaatgtgtttttattaaaagcagacaagttaacgttaattgatgcagggatgaaaaccaaagaagcgtggaatgtttttgaagaggcgctttgtaaagaaggatataaagtaacagatattgaacaagttattcttactcatcagcatccggatcacactggatttttagaatggctgccgagtgatataccggtttacggtcataagcttgtggagccttggatttaccaagataaagaatttgttcagcagcataatgagttataccgtaatttccttattgagtttggagtcagtgatgatgtaatggaagaatggcttcgtaaagcaacagctgcaattcaagtatattcacctaaagggcaaaagctaaccgggtatttaaaagaaggagatacacttccctatgcgagtgagtgggaagtaattgaagcaccgggacattccttgagtcagctgatgttttacaatcgcaaagaaaagatcgcgtttggcggagatcatattttgccaaaagtaccgtcaaatccatatttagagccaaccattcaaaatcctaagccaaccccgctattggactacttggcgtctcttgaaaaaacgttgaactacgacattgatttgatttacagcggtcacggtgaaccgcttagcgacattcattctttaattatggaacgtattcaaaagcagcataaatgggcgctgcgcgtgttacaagcgatgggggaaggaaagaaaacaacgcttgaagtcagcgctgcttttttcccggatatgtatcaaaaagcacctgactttattttttcagaagtgtacggccagcttacgtatctagagaaagaaggctacgttgaattaacaaaaaatgaagacggcgtcttactgtgggaggctacacgtgtgcttgctcctcagtcataacataaaaaaccagcttctttatggaagctggttttttatgtttatagtgaatgcaagcgctcaatgcgtttttcaagcggcgggtgagtagaaaataagcgtgagaacttttctttgccgctaattttaaaagcagcaatggatttttgacggtcatctactaatgaagtagtatgacgaagcgattctaacgcataaatcattttttctttacctccgagtttagctgcaagctcatcggctttgaattcacgtcttcttgaatgccagaaaataatcggactgcttaagatactaaagagaatctcaaatacaatcgatgtaaggaaataaacaaccatcgcaaactcttctcgcacaaagtttgacaccgctttggccactaaacgagagaagaaaataacgaatgtatttaatactccttgcagaagcgtagttgtgaccatatcaccgcttttaatatgcgctatttcgtgagcgataacgccgctgattgcatcgcggtccattcgttcaagcattccgcttgaaacagcaacaagtgagcgtcttttacttggccctgttgcaaaagcgttaacttccgctgaatgataaattccgacctgaggcatttttcttaatcctgcaacagatgcaagtcggtgcgtttcttctagaacaaatcgttcgtattcaccttgaggagaacgttcatcaataacttgaacacccatcatccactttgccattacgcgggacatcataagagaaataatcgcgccgctgaatccggcaattacgctaaatgccagcaggccgccgtaaccgctgcttcccatatagctttgaacacctaataaagatgtaatcgttgtgattgtaattaatactaaaatattaacgaaaataaacagtgaaattcgttttagcacaagtcttcctcctttaactgatacgtgcatgataggtatacggctggaggagagaaaaggtttcatttatttattgaaagttattaaaaaggttattatgctaagttattaaatagtaaatatcaaattacaaaatgagatacaagaagtagcggaatgtatgattcactttataaccaagagcgtttgttaaaaggaattttataatttacgtctatcttcggacgagacgtactaaaataataaaaaaaggtgttcaaattatgaacacctttttggtaaaaatatttaaagattaatagtaaataactttatttcgtttaaaaattaacctttggttctgtacctaacttaatgcgcttgaagttttttatatgcttccacgtaatgaaaacaaaaataacggctgcaaataccattaatactacatcgcctacataaattgatgttaaaaaggcaaccactgcgccaataggtgaagataaggatacgtatttagaaattttgagagaaattaaaaaagcaagaatccctagaatgaaagctaatggtgaaaatgcaaggaatacaccagcggcagtcgctacagattttcctcctttaaattttgcaaaaatcggatagctatgtccaagaatagcgataaatccagggacaagcatatgcaagtgactattcatcataagcggtaaacagacagctagcgaaccttttgctatatcgccgatcaatactataatacctgctttctttcctaaagtacgaaaggtattagtggctcctaagttaccgcttccgtgcttgcgaacatcggttttgtaaaagccctttccaatcactaaagcaaaaggaattgatccaattaaataagctaataagataattatagcgtttgttaatacgttcatcgttggcacctcaaattgtgttgttattatttattaaaatataaatgcggtaaaagcagccttttatgtgactaaaggtttctcgttttttcgacggaggttctataaattcaattggatttttagtgggccaatccaataacttttagtatgttaagatgtttcgaaactttcaagccttgctacgtattagtatagattaatatgtctattataaatatgtaaaaaagagaaaaggcaaaaataaaaaactttctacaaaagcagcgaagttttttgcaaataagcaattccgctttcttttcacaaaaatcgaaaaactcgtagtgcaattttaaaaatataacataaatatttaaacattaaaagatattttgggtatattgtattacgaaaaaagtgttcccagcattttttatgaaaataagataaaagaattaacaaatcaaaagaaatataataaaatgtaaaacggtgtttcgaaatattaacttcttaaagttgaaaggggttctgcacttgttgtggacagatatcaaagaacgagaagtagttatgtacaaaaactgccaggcgaaaattttagaaaaaaaggtgccgaataaaatagtcgtgcgcaatctagaattcccggaaaaaggcgattggatatcagccgagcttgattttgaagctgttgaaaaatttgagaagagtcgagaacactaatacaaaaaacattttacaataattctatttatcatataagaaaaagccgagcttaaattttcagttcggcttttttgtttatatctaattcgctctctttacgaagagctcctcgttattacatttaaaacaacgccttttcctctcattcattttccactattacactagtcccatataaaaacttatctttatacgggactatcgatttatttttagtacacgtatttttgccgcttttttcatatacaaacgttcagaaacaaaacctctgtgcatacattgaagacaaagggggaggatacattggggaaaacaagtcgtatattgaaatgggtcagcggaggattagaggctctttgggggattcccctcctaggcggcaccttggttataagcctagcctacacgccgcttattctaatgctcgcattgcacgtcgtaggtttagtatttgcaattaaaacaaacaaagttcggacagggcatatcatgggaattgtctgttctgctattgcgtggattccaattgtcggcatgatcatgcatatcttaacggctattttcttactgatagaagcagccaaagataacgagctatctgaagacgcagcataaaagaaaagccgcctgatttttaggtggttttttgtatttactaccacagacttggaggctatattgttttggaaaatcctttttatgttagagtattagaagtattttctaaaaaagggggtaaacataatagacaaagccaatcaaaaaaacaaaagactttttacagcaggactcacattagtcgctcttgtaagctttatatttttactatggagtaaaggatgggtaattcctaatgcgataagtgccaaccgctatgatgtaaaaggcgtagacgtatcttcttatcaaggggagattgattggagcgtgctgagtaaacaagatattcagtttgcttttatcaaagcaacggaaggaagttcatttcaagatcctttatttaaacaaaactgggaacaagcaaatcggaaaaacatgcggatcggagcttatcacttttttagctacgatagcaaaggttccacacaagcggctaattttatcaaagcggtctctcttaaaaataacgatttgcctccagtgattgatgtagaattttacggagataaaaaacaaaaccttccttctcagaaacatgtatacaaggagctttctagcatgattaaacgtcttaaatctcattatgacaagcgcgtcattctttatacgacgcctaaagcgtatgacttgtatattaaaaacagatatcccgagtgtgatatttggattcgcgacgttgtgaaaaagcctactcttgaagaacagaagaaatgggcgttttggcagtatacggacaaagggcggttaagcggctataaaggtaaagaaacgtttattgatttaaatgtgtttaacggaaacaaagcagaatttgaaagatactagtttactagaaaggtaagagatggaggggaaaataatgcctgcttataacaagttagtgcgagataaaattcccacgattattgaacaaagcggaaaaaccttcaaatcacgcgtgctccagcgagaggaatatcaagatgagctgacgaaaaaggcaaaagaagagcttcaagagtacatagaagcccaaacgcatcaagaagctattgaagagctcgcggatttactagaagttatgcacgcgctagcagctgtgcacgggtccacgccagaacaacttgagaaagtgcgtgaggagaaggccaaggagcgcgggaagtttgatgatcgggtttatttagtggaaacagaggatgtataactcggtggttttttagcttaaattggtcaccatcacgccttagtatttctcttttcatctccgttataaaatcccctcttgaaattttgttcactcaccaagtaaactaaagacataagtttggtaaaatagggataagaaattcatgaggtaagggagaacaagtcgatggagatggatcaagagaaatttaataaggtgattgaagcggcaaggatgtattatattcttgattataatcaaagtgaaattgcaaaaaagcttggtgtatcaaggcctacggtttctcgattgctgcagacagcaaaggaagaaggcattgttcaaattaaaattgtggattcatctatcaatagtgaaaaattgtcttctcagcttgaacaaaaattcaatttaaaaaaagcaatcgtcaccccggtgcctcaatatgaaaatcacattattaaaagtcatctaggcgtggcagcagctgactatctctatgacatcgtaaaagacggagacattattggggtgacgtggggaacaactctttatcaagtggccatcgatttaaaacaaaagtatgtgaatgacgtgcaggttgtgcagttaaaaggcggagtaagccattcggaaacgagcacgtatgcttctgaaattatgtacttatttggaaaggcatacaatacgcctcctatgcatcttcctttgcctgtaattgtcgatcacgtggtagtcaaaaaagcaatggaaacggatcgtcatattaagcgtattttagatttaggcaaacaagccaatattgccgtctttactacgggacccattaaaacggattcgctgctttttcagcttggctacttttccgaacaagatgtagagatgatttcctcccgagcagtgggagacatttgttcacgtttttttgataaagatggacaaatttgcaatgaaagcctggatgaacggacgcttgggcttgatttggaagaactaaagaagaaagagtacgccattttagtagccggcggggatcagaaaattgacagcatttacggagcgctgcaagggaaatttgcaaatgtgctcgttactgatcagttcacggcgcgctttttgttagataaacaagagtaagggagatgaagacgctgttttttcaagagcaaaagcttcatcggattgaaatagtagaagatattgtatcttattcggcgtcatctctgcaggcacagcgaaaccggtatctttttcaaacagacgtctcaaaagacggagtgattgccaaagggaccacaggctatatcattaaagggtggggaagaatgtatttctctccggatgctaatcaaaaaggaattgaacggtttacgccgcctgatcagccacatgtattaattccttataaaaaggtaaagaataagtaccgaatcatgttgtcatttgtgataaaaactgaaaaataagggaagacttccgagtgcggaagtctttttttattcactaaaacagcggctataaatatttttgaacaaatgtaaatatatctgtttacaattgttcaaagctattatatagtaagggtgtaagttgttgaaaacgttttagtggatgcacaatatgcagatacttttagggggaaaacgtcatgagaatggttgacttaattgaaaaaaaacgtaatggacatgaattaaataaagctgaaatcgattttattatcgaaggttatacaaaaggggatttacctgattatcagctatcggcatttgcgatggcaatttactttcaaggaatgactcaggaagaacgcgtaaatttaacgcaagcaatggttgaatcaggcgatcaaatcgacttatcaaaaattgaaggtattaaagtagacaaacacagcacaggcggcgtaggtgatacaacaacacttgtattaggacctttagtagctgcggttgatgtaccggttgccaaaatgtctggccgcggcttaggacacactggcggtacgattgataaacttgaagcagtgcctggattccacgttgaaattacaaacgaagaattcattcgtttagtaaatacaaataaaattgccgttatcggtcaaagcggagacttaacgccggcagataaaaaactttatgcacttcgtgatgtaacagcaacggttgattcgattccgttaattgcaagctcgattatgagtaagaaaattgcagctggagcagatgccatttgcttggatgtaaaaacggggaacggcgcatttatgaaaaagcttgaagacgctgaagaattagcaaaagcaatggttgaaatcggaaaaggcgtaggccgaaacacaaaagcaatcatctcagatatgagccagcctctaggatttgcggttggtaatgcgcttgaagtgaaagaagctatcgacacgttaaaaggcgaaggtcctgaagatttaacagagctttgcttaacattaggaagtcacatggttgtacttgctgaaaaagcaagcagcttagatgaagcgcgtgcaatgcttcaagaagtaattaaaaacggaaaagcattagaatcatttaaaacattcttaagcgcacaaggcggagacgcttctgttgcagacgatccgtctaaattaccggatgcagcgcacaaaattgaagtgccagcaaaagaagatggctacatttcagaaatcgttgcagaaaaaatcggcgtagcagcaatgaagctaggtgcaggacgtgcaacaaaagaatctgaaatcgacttagcagttggtatcatgcttaataaaaaagttggcgaccaagtgaaaaaaggtgactctcttgttacaatccacagcaacagcgaagatgtacaggaagtaatggatatcgtttatgattcttacagcacagtcgctgaaaaagtggaagctccaacgttaatttataaagaaattcattaagaaagagagaggaagaacaaaatgagtcaaaacattacgggtattattgatcatacattattaaaagcagatgcaacagaagagcaaattacggttttagcacaagaagcaaaagaatattcattcgcttcggtttgtgtaaatccaacgtgggtaaaaacagcagctgagttattaaaagatgctccagaagtgaaggtatgtacggtaatcggtttccctcttggagctactacttcagcagtaaaagcattcgaaacaacaaatgcaatcgaaaatggtgcagatgaagtagatatggtaatcaacatcggcgcgttaaaagataaaaactatgacttagtgcaaagcgatattcaagcagtagtagatgctgcaaaaagcaaagcgctagtaaaagtaattattgaaacagctcttttaacagacgaagaaaaagcaaaagtttctgagctagctgtaaaagctggagccgattttgttaaaacatcaacgggcttctctacaggaggcgcaacggtagaagacgtagcgcttatgagaaaaacggttggaccagatgtaggtgtaaaagcttctggaggagttcgaggcttagaagatgcaaaagcaatgattgaagctggtgcaacacgtattggtgcaagctctggcgtatcaattgcaaaaggtcaattaagcaactctgattattaataaatgacagcaggttagtactaactaacctgctgtaaactaagcaaaggatgatgactgtggagccaaaacaattaatagatgaagcaatcgcagcaagtaaacaagcacatgtaccatattctcatttccatgttggtgcagctcttttaacaaccggtgggaagatttatcgtggatgcaatattgaaaacgcttcctatggattgacgaactgcgctgagcgaacagcaatctttaaagctgtttcagaaggggacaagcagttttcagctattgcagttgtaggagatacggacggaccaatttctccttgcggcgcatgcagacaagtattagctgagttctgtgatgaccacacacaaattatcttagcaaacctaaaaggagattttatgattaccaacatcaacgaaatcttaccgggctatttttcatcaaaagacttacaaaaataagtaagcagtggaggatactatgaagtatttaattggcatcttagggttactcgttgtctttggattagcgtatcttgcaagtaataaccgtaaagaaatcaaatataaaccaatcgttattatggttgtgattcaagttcttttatcagctttacttcttaatacaaagtttggcttgattattatcaatgcgattgccagcgtttttggaaagctgctttcatatgcaaatgaaggcgtagagttcgtatttggcggaatcgcgaataaaggatcaatgccgtttttcttaaacgtgctgcttcctatcgtttttatctctgtcttgattgggattttacagcactttaaaattcttcctttcattatgaaatggattggtttagttctcagcaagattaacggaatgggaaaattagagtcttataacgcagtagcttctgcgattgtaggtcagtcagaagtatttattactgttaaaaagcaactagacaaactgccgccaaaccgtttatatacgctttgtgcatcagctatgtcgactgtttcaatgtcaattgtcggtgcttatatgacaatgattgaaccaaaatacgtagtaacagcaattgtcattaacttatttggcggatttattatttcttctatcattaacccttacacagtaacggatcaagaagatattttagaagtacaaacaggtcataagcaaacgttcttcgaaatgcttggcgaatatattatggatggatttaaagtagcgattatcgtaggtgcgatgctgattggtttcgttgcgcttatggctgcgattgataacgtgtttgaaatgttatttggtctgtcgttccagcatctgcttggctatgtgtttgcgccgtttgcattcatcatgggtgttcctgcttcagaagttgtggcagcgggcggaattatggcaacaaaacttgtaacaaatgaatttgtggcaatgatgagcctgtcggatatggcttcaacattcagtgctaaaacgcttggaattgtatccgtattcttagtatcatttgctaacttctcatcaattggaatcgtgtcaggagctgttaaaggcttaagcgaaaagcaaggaaatacagtagcgcgctttggtcttcgtttactgtacggagctacgcttgtaagcatactgtcagcaattgttgtcagcttcattttataagtgtaatagaaacagaaagaaaagcagtttccttttcaaaaggaattgctttttcttttttacatgtaaaccgcaactccgcacatcctaaaaaacatcgacgcagaggaggacaagaaaagctgggggcttttcttactgaaaaatggatcaaattggactgttgctgtcaggtgcagctttatttttaaacggactcatgctgcttggaaaagcagatgaaaaaaacgtaggcgtatttaacttatttgttggagcttttcaagttattgttccgttttatttaattattacgtcagatcaaagcaactggattttgtatgaaagaacggcgatttttttatttggccttacgtatttatatgtaggcgtgacggtattaaaaggaatgcagggaacagggcttggctattactcactttgggtatcgattattgctttagtgtacgttacggtttctcttgttcactatcatgacgtagtgaacgccattacatggattctttggtcgtttttatggtttttattttacgtgcttaatacgagcaaaaaagatgtatctgcatatgtggggaaagtggcgattgtccagtcgtgggtgacgttaacgattccagcgctgttttcactaacaggcgtatggggaaataaggatatgtacaatatgtggggaatcgtgctggtggcgtctatcatttattttgtatatctagggtatcgactattcttttctcagccgcaaaaaatgattttaaaataaagtatttacaaaaaatagataataatggtaagatgttagaaattaaatgccgtgaagagaaaagtaggcagcgcgtattcttagcagagagctccggaagctgaaaaggagcaagagagacgctgttgaaacaagcctctgagcagcgcattggatctaacgtgatagtgcgacggctgcttccgttacagagctagagtataagcaaaagccgtactcgataaggtttatatggcgacatatgaacaaactagggtggcaccgcgattaatgatctcgcccctaagacagatgtcttgggggtggggtttttttattgactgtaatcaataatggagcggaggcctttcttttatgaaaaataagctgttatcttggaaatacccgtttttattgctgttcggaattggcactagcaatatcggcgactggatttatttaatttctttaaatgtaatgatgcttgatatgacgaattcgccgcttgcagtttcagggctatacatgataaagccgcttgctgcgctatgtacaaatatatggtctggaagcttaattgaccgcatcaacaaacggaagcttatgatgtttttagattggatgcgcgccgggattattgtttgccttccgtttttctcatccatactgatcatttatgtgctggtatttatcatcagtatggcaagttcgatgtttcggccggcatcgatggtctatatcacaaagcttattccaactgaaaagcgaaagagatttaattcactgcgcagtttgattgattcaggcggttttcttcttggtccagccgcagcaggcgcgctatttatggttggaacgcctgcgtttgccatttatgccaatgctgcagcgctggtattgtcaggggtggttactttgtttatgccgaacctggatacaaaaacagaagttaaagaaaataagctgtctgtaaacaccattcgagaagattgggaagcggtgtttcgtttcagtagagccaacagatacattatcaccatttatgtattattcagtttcttaatggtcatggccacggcaattgattctcttgaagtttcatttgcaacaaaagtcattcatttgtccgaaagcgaatacggatttttattaagcgtagcaggtgcaggcattatgattggcgcagttgtgaatacactgtttgctaagaagatgtcgacgaattttctaataggggccggcagtgtaggagtatcgtttggctatttactgtatgcgtgttcgttttcttttcaagccatcggcgcagggttttttagcttatcctttgcgttagcttttgcaagtgctggttttcaaaccttttatcaaaacagtattcccgttgacatgatgggtcgagtaggaagcatatatggactgcttgagtcactcctgatcattatcatgacttttttatgcggcatggctgcgcatatcttttcgattcaaggagctgtaattgctggaagcctgatcatgcttttaagtacaattgtattgtttttgtgcatgttaaagcctacgttttataaagtgaatttggtcaaaaagcaaagaatctaacgcacggatactagtggacaaataagctaagaagccgataaaaagaaatgaatacaggataaaggatggaaaagcacagtgaaaatgaaagatgcgttaaagaaaaaaggaatgtttgttaaaaaattatcgaatcaaggtgaactctttcgaaagcggtgggaaaatgaatttgcaagtgctttaagcgtatcgtaaaaaaagaaaatttatatggaccagttcctgtggcatgcatttagctatgaaaagctcccttgtttacaaggagaacaagcgattcaagcgttcgaacagcaaataaagaacgactgttatttgttgtttgagcatgatgaacgggtgctgcagctatctaaatgtaagcatctaacaacccgcaggagcgcaagcgacgaggaggctcaggcgcccgcccgcggaaagcgaagtcttgcacggaaatcaacgacggtgtcataagcggttcagctcatgtatctgatttgttcgtctttagattggattgatttcattatgtctcaatctcttttttttcatttacccatacgccgctgggaatttcttttcgaagaacaggtgcaatatcacttgcaaaatgctctagctgttcgcgctgttctgcttcgcttagagcgtctacgctgatactcagcacttcgtttcgataagcgcggtgatagtctattattttttcaataatttgctccgggcttcctactaaagcaggaccgtgttgaacgatatcttctagcgacgtgaacggcgattgattatgtttggctgcttccgtattgctaaaggcgttatagtacgggcgatagcgacgaatcgcttcttccgctgtattagaaatatataggctgctcgcccccgaaccgacgatggccttgcgtgggtcatggccataataagccaaacgttcgcggtagtggtcaatcagcgctttatatttagcctgagggtggaaggaattagatgaaaatagcggctctccgtatttagccgccagttctgtagacagcgggcttgacgcgcttccatgccaaacgggaatagaaggctgaaacggtcgaggctgagtcgtaacgttagttaaaggcggacgataaccgccgctccacgtgacattttcttctgtccaaagctgtttcaaaagagcatatctttcatcaagagattcccattgttcttcttctgcaatgccaaaaagcggataatgacgcgggtcgttgccttttccaataatcagttcaaggcgtccacctgacaggtgatcaagcgttgcataatcttcagctactcgtacaggatctaaaatgcttagaacagtaacggcagtaaggagacgaatgtgtgacgttttagcagcgattgcacttaaaacaacgggaggagaagaagacaaaaaaggagctccgtgtctttcgccgactccgtaagcatcaaaacctaatttttctgccagcactgcttgatttaacacatgctgaaatttttcttgagcagttaacgtttctccagtaaccggattcggtatgttttgaataagactaaataaagcaaatttcatacgttttacctccaaaagataaaatagtggacgacaataaaaaaagcaaacgtacacttattgtcgtgtccatttgcctccagttgactggtagatatgtagttttattgttttattagttgtatcttaagcggtagacaccgggctgtcaagataatctttttctaaaaacctacttgatttatcggttaactagtattatgatgtgaataatcttacacgaagtaagcccactggttaaccagaggctcttgatgaagtagcttcttcatcaagagcctctttttattacataatatagggatttaggggagggacgtatgaaaaaatattggctgtttttactttcaattgtagtagctgtgagcgtggcaggctgcggaacaaacgtatcttcaagtgcaggagaaaagaatgaaaaagatgttcaaaccattgttgttggaacaggcactcagtttcctaatatttgctttattgatgataaaggcaaactgaccggctatgatgtagaagtagtaagagcaatcgacaaagagttaaaggattataaatttgaatttaaaacgatggaattttcaaatctgcttctcagcttagaaagtaataaaattgatatgattgctcataatatggctcagaacgctgagcgaaagaaaaagtttttatttaatgatgaaacatataattattctccgctttatgtaacagttcctaaaaatcgaaatgatattcattcattaaaagatttagaaggtaaaaaaatgattgtaggagctacaagcaatgcggctgtttatctagacaaatacaatcaaaaacacggcaataaaatcgatgtagtttacgccggtcaaggtgcggatgatgctaccactcaattaaaaacaggccgggcagatgctacgcttgcgacaccattttccatcgactttagcaatcaagcactgaaatttcagcaaaaaacggttggagatattgtgattaattcaaaagtgtattttatgtttaacaaaaaagacaaaaagttaaagtcggaagtcgatcaggcgattgaaaagctgaaaaaagacggtacgttaaaaaaactcagcacaaaatggctagcagaagactatacggtgcaaaattgactatagcaaaaaagcagctgcccatacagctgcttttttgtatgatataaacccaatagatagaagaaacgatctgcaaagaaaacaaaaattagtgtatagtagagctataagtactataaaagcaggatcgcagtgggaggcaattcattgattacggatttacagcgcggagatttctttcaaaaaggacatcgttatcgcagaaaacaaattcacaagctttataaaggacaggaacaaagcgaaatatcaacgccaaaagcgcatccatatatttttattttcacaaaagaaagcggaagtgaatacggtacagggcacggatggaatggagataaaacttcttttttctatacgggagaaggtcaaagaggatcgatgcagctcattaaaggcaataaagcgcttcgtgaacattttttatcaggaaaagccgtttacttgtttcactacgtggagccgggagtagtcgagtttattgaggaagtgacgtatattaatcatcaattagaaattatgtgggactcagacggagagcttcgtgaagccattatttttgaacttgaacgaaatcctgtgatcgaggaaaaagcagcaaaattagatgtttcagcttactcaactgaacaacttcgtcatatagcgttaggggaagacaaaaagacaaatgtttatgagcaaaccgcagctcttacacaatatgttcacaaacgcgcagctggtatttgtgaagcctgcggagaaagcgcgccgtttatcgcaaaagatggaagctcgtttttgcaaatgtattatctttcaaagctgtcagagagcggacttgctaagccaaaggacgctgtggcactatgtcctaactgttatagtcgtctacgctacgggaaagatagtgaagtatataaagaagagctgattactaaaattaatgaaaaagaagcaggaaagaaaaatgagtaatagcgtctttttcattttataaaaaaccgtctctaggcagggcagctgccgaggcggtttttttgtatgtagaatgacttcaaaaaataaaggcaataaagcgtataaaaataatggaaaaacagataatgaaaaactgaagctttcgtttagaaaatagtaaaagctggggtgatgtgctgtggcagataagtatgactgcgtcattataggtggaggaattgccggacttcaagccgctattcagcttggaagatataagcgcagtgtattggttattgattcaaacgatggacgttccaatctttgcaaaagttatcaaaatatattgggatggcctgagggaataagcgggcaaactctaagagaaacgggaaggcagcaagcaaaaagctacggcattcaatttgcagaagagcgtgtccttcagtgtgaaaaagaaatagaagggtttaacgtcattacaaactctgcgaactacgaagcagctactttactgtttgcgacgggagtagtagaccgggttccgcctgaacttcagcaagagctatatccgtgtatgggaaaaaccgtatatgtatgtcccgactgcgacgggtatgaagtaaataatagaagggtattagtactagggtcgggaaaagcaggagccagtttatctcttacgttaacatattggacaaatgacattacgtacattaatcatgacaaaaaagagattggacctttagcagataccttgatgcaaaagggaattacctataaagaagcggcaataaaaaaagtcatagctgaagcagaaatgttaaaaggagtcatccttgaaaccaatgaatttatctatggagaaagaggttttttagcgttcggaggaaataaagtccgaacagaattagcgcatgagctcggagcagaacttctagaaaatcagcacattatcgtaaatccgcgtacaaaagaaacaaatgtttcaaacgtgtgggcagcaggagacattgtggctcattctgaacaagttacggtagcgatgggagaaggtttacaagccgctatttggatacacaaacgcttgttagagctttatgaaaaataattgtttttttataaaaaaagttaagattgcatgttttgtttcctttttgttagggaaatggaaataaaagaaagataaaaaatgattaaaaatgaggagaaggagtggcaaaaaagtggtatatagtcaagcagtaagaaaacctgagtttcaacaagcggaatcggaagggttaaatgaagccattcgcgagtacataactcgtcgtacacgtcacaatgcaccggttgtggatgcgcttcgatatattatgaccattgaacataaacatgaacgcatgcaggtagcagcagaactgtttggatcagctattcagcgtgtaaaagatcaagatattattcaatatctaaaaaaatgcggaagctacaaaagaatttctgatacgatggaataaaaacgttttctttgaaaaagcgcctttaataagaagggggctttttttgtttcctccatttaaaagcgagggtaaatacatagaattcttccagcttgtgcatagtaaatgaagcagaattaaacggaggaagcgacagagttttgtatctgactgcggggacgaatgttaaggtctagaataaagtcttcattacagatacccactcttgaataaatggagctctacgtatgtatccctagcaggaggtttagtatatgagtcaagaaataccgttaagctcaagtgaaattgccactctttggatgacctatcagcaaaagacaatgatccaaaggattttagaatattttattgttcagacagaagatgaccaggcgaaagaaattatgcaagatacgcatatgcaagtggtgaactatatcgaggacattaaaacaattctacaaaatgaaggggcagctataccagtaggatacacagaaaaagacgtaaatgtcggtgttcctaagctttatgataagatgtttgatattatgtttcttcgtcttttaaaagaaattagcatggggctacatacattgcacttaacgatgtcctacagaaaagatatgattcgttttcacaaagagcttacggctttcacgcaagatgtgtacgataaatgtgtagattatcttcaagaaaaaaacgtgcttccaagacctccagctgtttcagtacctaagacagcgaagtttgctgaaggcacagattacatgaatggaattcatttgttttcgaataaacgtgcattaaatactgtagaggtagcacatatttattacgctattgaaagtaacgttcttgggatgcaaatgatcacagggtttgctcaagtagcaagtgagcctgaagtaaagaagtacttcgtaaaaggaaaagagctggctaaaaaagttgtaagtaattatagcaaaattcttttagagagcgatattcagacgcctgcaacatggggagcgaaagcgaccgagtcaaaagtagcacctttttcagataagctaatgatgtactgcgtgagtttgttctgcagttttgggctgggaagcaatgctctaggcactgcgtttagtttacgtggagatcttcctcttactcttgtcagtacggccaaagacattttaacatacgggcaagacgggggaaaaatcatggccaaaaacgggtggcttgaggaaccgccaagtatggaagaccgaaatgatttgattaaatagaaaagcataatacattaagaaaacttcttttttgaaagaagttttttcttttgcataaaaaatgtcgttatttgttcgtttaacggtttgttttttgaataaaaaggatatataaactataaatttacaattttatactaaaaaaggaggatgttgcatatgaagtggtacataaaagtgttgaaaaattacgggacgttttctggcagagcaagccgaactgaatactggatgtttgtgttagttaactttgttatttcatttattctttcgttcattcagttcgttattgataagcctctttttctgccggtaatctactcgttattggttgcagtcccttcgttagctgtaggagcaagaaggctccacgatacgggaaaaagcggatggtggcagctcattacattggttccactgattggcggtatttggctgattgttttattctgccagcctagtgacccaaaagaaaatcctttcggtacaacggcaaaagcagcataaatagaactcccccttacataagggggagttttttagtgcacaggttctactatagcaccatcatacgccgattggtaaatagctcggatgtctttttcataaagaggcaaaggactgcgagcgagaattcgtttttgctggacgccatcttctgtcagcttttgaagggcactttctggaatatcaaatccacgaagagtttgaggaatgcccacgtctttgacaagtgactgcagctgttttacacactgataagaagcttcttcttctgataaagagctagcgtttccgcccagtgctgcaaaaatatcacgcatcttttccacgcagctgctgcgtatgtaacccatcacatatggaagtagtacggcgtttgattcaccgtgtgaaatatgaaactgtccgcctaacgggtaagcaagtgcatgaacaccggctacgcctgcgttaaaaaaagcaagtcccgctaaatagcttccgtagctcatctgagttcgcgcttctttatctttgccgttttctacagctgttcttaaagaagagctaatcatgcgtatagcctttagtgctaaggcatcggttgctggatttgcatttactgatacataagcctcaatagcatgagttaatgcatcaacccctgtagccgccgttactttaggaggcacgctaagcctaagcgtaagctcgggatctacaatcgcagcgtccgcaagcaaatagtcgtgggtcacaacatccttggtgctttcaagagacagcacagaaatattcgttacttctgaacccgtgccggaagtagtgggaattaaaatttttggaagacctttttttgaaatttgttttgtgccagttaagttcaagtattcttctacagcgccgtcgtgaacggctaaaacggccgtaagttttgctaaatctaacgcgctgccgccgccaacaccaatgactaaatcaaactttcggctttttgcgtaggatacgagtttttcaccgagtgctaaaggcggttctggtgctgtatctgcatatacatctacttcgtatccgtttttgataaggggagaactcactttatctacaagtccaatatcttttaaaacaggatctgtgacaattaaaatatgagcagggtgatatttttttacttccggaagcagttgctgaagtgatccccatcctgtatagctaagaggggtaaaaactagttttgacacagtcattcttttatcctcctataggcactgttttgttggcggtttcaaagatgtggttttgcttctacgtatattataatgaagtatcgcaaatttttcattgaatgcaaattagctttcacgaaaaaattgagcttcacttcatagaggcaaaggatggggaaatgttgagatacgtaacaaaagaattagctcagaaaattgtgtgtagaacgatggagattattggttgcaacattaacgtgatgaacgaaaaaggagtcattattggttcgggtgacaaaaagcgaatgaatcaaatccacgaaggagcgttgatggtattaaaaagcggcagttcctacgaaattactcaacagcaggctgactcgctgcgcggggccaaaccgggcgtgaatttgcctattttctttaacggggaaattgttggagtcgtgggattaacaggactgccagaacagattcgtaattacggggagcttgtgcgcatggcggctgaaatgatttttcaagaaatgattttaatagaggaaattcaatgggatgaacgattaaaagaagagctggttcatcagcttcttcaacaagaagatccgcttgactccttattttttgaccgggcgaatcgctttgatattaacttataccttccacgagtgtcactgattgttacagcggacaatcgccatgaagttatgaagcttgtaaagaaatacatagctaataatgacctatacgctatgcttccagacggagtggtcatattaaaatctacagaagcaggcagcgctagcagctatgcggaacagctggaaaaacagcttcgggcgtctggtatggtgtgtaagttagcggcaggatctgttcaaactgactttaaaggccttcatgtatcttatcagcaggcaaaagatacgcttgccgtcggttctaagcttcacccagaagctgttttctactcctattcggattatcaaattcccgtgctgttacgtcaacgcgccggttttcaagaaaatcatgatctgttgcatcactatgaaaagcttaaggaatacgataagaaaaaagaacttatcgaaacgttaacggtctacatagaagaaaatggcgaaggaagcacagtagctaaaaagctttttatccatcgaaatacgctaagctaccgtctagataaaattcaaagcattacgggaaaagatccaagaaaagtcaaagaccttcttgaactgtatgtagcgctactgctatctaaaatttcataattgtgcacgtgcataaaagatcttgcgatagtgaggtctttttctgttgaagtgactaatgaaagaatataagatagcgcttacaattaacgttaggaacaagagaaacaagaaaggggatggctttatggacgttcaagtaagcgcgttaggcgctatttgtgcattagtaattgctattatattaatcttaaagaaagtggctcccgcatacggaatgatagccggagctttaattggaggattgattggcggagttaatattgctgataccgttaatttaatgattgaaggagcgcaaggcatcattcccgcagtgctgaggattcttgcagccggtatattagccggggtattaatagaatcaggtgctgcagcggttatagcagagaccattgtaaaaaaactaggggaaacaaaagcgcttttagctctagcgttagccacactcattcttacgacagtaggtgtgtttgttgatgtggctgtgatcacagtggcgcctattgctttagccattgctaaacgtacgggtatgtcaaagcctgctattttattagcgatgattggaggaggaaaggcaggaaatttaatgtctcctaatcctaacgctattgctgcttcggatgcattcaatattccgcttacatccgtgatggctgcaggaattattcccgctgtatttggcgtagcggtcacttatctagtagccaaacgattagtgaaaaaaggaacaatggttcaagctgaagaaatagatacagtggatgcaagcagcttgccgctgtttttaacggctatcatagcaccaattgttaccatcgtgctgctggcgctgcgaccgctttttgatcttaatattgatccaatggttgcgcttcctgcaggaggaattgttggtgccattgtgatgaaaaaaggaaaacagcttaatacatatgctatttctggattagggaaaatgtcaggtgtagccattatgcttctcggaacggggacattagcaggaattattgctaactcccagctaaaagacgttattattcaaggcttgtctgccattgggttgccagcttacgttttagctccggtttcaggtatttttatgtcagctgcaaccgcgtccacaactgcaggaacagcagtagcaagccaagtttttggatcgacgattttagagctaggcgtatctgctttagccggagctgctatggttcatgccggagcgaccgtgcttgatcacctcccgcacggaagctttttccacgcaacgggcggaagtgtaaacatgaaaataaaagaacgtttaaaattaatcccttacgaatcgcttattggactcattatggcaattgtatccacgcttatatttggtgtattaaagctatatggctaaaaataaaaaggagtgtttgcgcatgaaaattgtgattgcaccggattcgtttaaagaaagcttaacggctttgcgcgtttgtgaagccgtggaaaaaggaataagaattcattttcccaatgcggaaattagtaaagtacctatggcagacggtggagaaggaaccgttcagtcgcttgtggacgcgacgggcggacaaattatacaagctaaggtaaccggacctttaggtaaagaggtggaagctttttacggaattcttggagatggcaaaacggctgttattgaaatggcagccgcttcaggccttcatcatgtttcgatggataaacgcaatccgcttatcacaacaacgcgaggaaccggcgagctgattcttaaagcgttagatcataaagtgaagcatatcatcattggcataggaggaagtgctacaaatgatggaggagccggcatggcaaaagctttaggggcaaaacttcttgatgctaacggagcagaaatgaaagaaggaggcggcagcttagatcagttagcttctattgatctgacaaacttggattctaggcttgctgaagtcaaagtagaagtggcttgcgacgtagacaatccgttaacgggtgaaaccggagcatccgcggtgtttggtcctcaaaaaggcgcaactcctgatatggttaaacagcttgactgtaatctagctcattacgcagcagttattgaaaaagaaatggatattcatattcaagacgttccaggtgctggagcggcaggaggactaggaggcggcctgctggcatttttatctgcggagttaaagccaggtgtagacattgtcattgaagcaactcagttagaaaactatatcaagaatgctgatcttgtcattacgggcgaaggaagaatagatggtcaaaccatttacggaaaaacacccattggcgtagcgaaaatagcaaaaaagcatagcgttcccgtgatagcgatagcagggagcattggagcgggaagcgaagctgtttatgaacacggtatttctgctttattcagcgttgtgcccggggcagtcgatctgtcagaagcgctggaaaaagccgatgaaaacattgaaagaacggctaaaaatgtagcgtcagttataagtttagcaataaaataaagggcttaaagtttttattgtttttttcagtcaatgttagaaggtctctttcatcacaagagacctttttttcttgtacagggaagaattcaatatagtttattagttttatagttaaaaattttataattaaccaatcattgaatcaagttacacataaaggaggcaaatcatgattaaagccgttatttttgatttagatgggacattattagaccgagacagttcattgaaactttttgttcaagatcagtacaagcgttatagtaaagagctagcacacataccgaagcaagaatacatatctagatttattgagttagatcacaaaggctacgtatggaaagataaagtatatcagcagcttttggctgaatatgatctttcgaatctaacgtgggaaaggaatgctagacgattatcttcactattttccagctcactgcgttccgtttttacatatggaggatgtactaaaagagctaaagaaaaaagggctgttactaggcatgatcacaaacggttttacggactttcagtggatgaatattaaagcgcttgatgtgtcggctgaagaaagtgtatatatattggggatcatccagaaaatgatgtgcttggtgcaagaggagcgggcatgcatgctgtatggaaaaaagacgctttctttgacggaagttttacagattcatatgtaatagaggatttaaaagagctgttgattgtaattaatgagtttcaagagaactgatgtgaaaaggagaaacacgatgaaaaccaaagttcgtctattgactgatgaagatctcaaagaagcagcaatcatctatacaaacgtttttagtgcctcaccgtggaatgagccttggagcatgaacactgcttatgctcgtttatacaatatcagtaaaactccagggtacgtaggaataggttacttccatagtgaaaataataaactcataggatttatagtaggaaatgaagaacagtgggcgaactataagatgttttatgtaaatgaaatttgtgtgttaagcaacactcagcaggttggcataggaacgagtcttttatctttccttaaagagctacttatacaaaaagaagtaaaagaagtctatgtgtctactgaaagaggccaaggcaaaccagaacgtttctttgaaaagaacggttttgtcactcatgaatctcgtatactaatggcggtaaatgtagattgagtataagtgaatgaacgtagggtatccgctttgttatttcaggaggcacggttcataaagcaggaggaaataatttatgactttttcgctactagttttagttgctattttaacggtgagtattccgctgctgattattattgttaaaacagtttggcaccgaaagcttcctcgtaattactatacgccatttgactatcttgctgcacaaacagaagaagagtttcatgaagaacaaaatgaacgagaaatagaagaaagagaaggagatgccaaaagaagaaaaagctaaagtgatgtgtgcatccttctttggaatactaaaaataaacaggctataaactgtgttaaagagcggaactgctcattttcatcatcgtataaaagagggttattatattcgtctaaatttgttaatataaaagctggcctccgtgtaggcgtatttttacataattatagcaaataaggttcctaatgttcttacaaccatagagaaatggagtgggaaataacttggagtatctatattcttttatgattagaaaaatagcggtgggatttgtcgtcgtgaaggtttggattttctgcgtattcttagctgctgtgtctattattttcagctatatagatcggtggctgcatttggatcttaacctgccagtatttgatattcctactcgatttggtgattttagttggatgggtaaagtaatagcactgctcattttgctttccaccgtgattgaattagccgtgaaaaaacaagtgaaaaacgtgaacctatgttttcagcgctctaccatttaattgctgtatgctcattggtgttcacgttaggaagactagtcgctttattttttatcgctgcttttatttcagagcgaatctttatgcgggcaggcctgggtagtaaggcgtcaaatatcgcccgaaacaaagaggcgaaagaggcgtaaaaaaagaaagagctaaaaataattttcagctctttctttttacagcccatccctccacaatttccgtgaattcatctaggtgttcttcaaatatccgttttcgatgtccgtttgctccggatggatgtggaaagccaaataaatacgtatgctgagaaaacgaagatacacttgaaagttttcttaaaacattttcaactgcttttcctagcggaacgattaagcacggattctttatttcgttcaattcctgtggaaacacttcaaaagcatagcgagaaagaagcgctgagcgttcaattggcggctgatgtccggtatagttttttcctttataaaacacgggatatttcagtacagacgttgtatgcagtaaatctcgctgtgaagcaaataactcagcggcactgtccataccgatcgctttttgaacgccgcatcgatctaacatgtctattagatttactctcatcgttccgctaaagctagcggctttttttgtttcgtacaggacttgttcaagcggatgatgatgagactggctggaaacgcattgtttaaaagcagttttcatttgaaaccaccctggtgtgatgcctgcaataataatatgagcgtccggatttatgtagtcgttatgaggcgagtagtacatgcttagttcattttcttgccgaattaaaaagtctttttgcaacagctgttctttagtgaaatttgtatggatatgtaattgttgaacgaaaggcagacattgttggaaataagaatgttggctaatcataggctctctctttccttatcagtatttcttcttttattttccccaacaaaccgttttatatcaaatatgaacaaattcttatgaaaattaatatttactaaaagtttacttaagttttagtgcggtgtgataaaaacaaagtagtaatagcagtgattttgtcattttaaaggcggaaccaacaaaataaatgagaattttggagaattttttgataaatttactgaaattttaaaattatttattgaaagcgttttattaatgtgctattcttccaatatgagagataaatatttagtaaaaatagaagattataatagagaggtaaaaagatggcaactttaaaagatatagcggcgtacgctaatgtttccagttcaaccgtatcgagagtactaaataatgatcatacgctttctgtatctgaggttactcgtgaacgcattctgcatgcagccaaggagctgcaatatacgcccgtgaagatacgaaaagaaacggcaaacggaaaggatatagaagctcctcgaataggcattatttttgctcagtcccttgaagaagagctagtagacccttttttctcctctattcgccatggaatagaaagtgaatgcgcagaaaaagaaatttttacagtaaagtcatttaggctaaaaggcatgaagcaagaagagctgctgcaggatcttgatggagtaattgtagtgggaagagttagtccagaaacggttcaagaagtgagcaatcatttagatactattgtttttatcaatcacaaagcggatgaggatttgtacgattcggtcatgattgattttgagacagctactaaacatgcattaaatcatttatttgacctcggttataaaagaattggctatatcggagggacagaaagagaacattatatgaatggaagttctattattgaagatcagcgtcaaacggtttttgaacgcgttatgtatgaaaaaggactgcttgattctgagaaagtttatgtcggcgaatattcaatgaatgaaggatatgagctgatgggacaagcgattaagcaaggaaatcttcctcaggcattttttatcgcaagtgatgcaatggcaataggagcaatgcgtgccttgcagcaattaaatataaaggttcctgaagacgtagcgattgtaagctttgatgatgtggatatcgcagcatttgcgagcacgccgctcaccacggttaaagtatatactgaagaaatgggaaggcaggctgttaaaatgctagtagatcggctaagcggcagatccgttcctttaaaagtcatggtgccgactaaattaatttaccgtgaaagctgcggagccttactcaaaaaacagtagcctaaaagttataacttgaaggggggtgataaaaaagaagaattcatacataaagagtgataagggggaagaaaaatagaaaaaatcatagaaaaagcaggttaaaaagccctagaacctacatacttattggcagataagtatgtaaatgaaaaagctttttcatctctaggactctttgaacctttgtaaaagtataggactaaattataagtgactttatttcgttgtgcaatgaatttgtctacgtataaataactgaatattcagttgtttgtgtcttggtagagtataaggaggaaaaaagataaatgaaaaagcttacgtatcttttcgttctattactagtcttttctgttgtggcagcaggctgcggaaataaagaagcgacaacaggaggaaatgaaaaaacaacgttaacgcttttttctacgatgagtaataaaggtgagagaaaagcgcttcaaaacgcgattgcagaatttgaaaaacaaaatccagatattaaaattgatgcgaattttccgggtaacggctatgaagatatgcttcgtgtgaaaatgggtgcaaatgatatgccggatttatttgatacgcacggctggtctcagcttcgctacggggagtatgtagcagatttaaaagatatggattgggttcagcatttagatcccgcgctgaatcaaattttaaaagataaaagcggcaaagtgtatgcgtatcctttaaatcaagcaaaagacggaattagctataatgcgacgctattagaaaaatacggaataaagcctcctaacacaatggatgaatttataacagcgttagaaacagtaaagaagaaaagtaaaggagaagtagctcctttatggattccaggaggagaaaacggcaatattgctcaagtgtttgatcagctggctacacctcagcttattacagcaaaaaataagaactacgctaagcagttggaaaaaggaacatttaattggtcaaactacacgccgctagcggaaacaatggcagaaatgaagaaaaaagggttattgaatgaagatgtattaaccgcaaaagtatctcaagcaacggaattaatggctcaaaataaaattgcttttacatttgtgggtggatctcttggaccggatgcaacagaattaaatcctgaagtaaaagtaggaacggtaccggtgccggctattcataaaggcggtacgcaaagctggatcggcggagagcgctttacccttgctgcgtggaaagattctaagcaccttaaagaagcgaagaaatttattgaatttgtgtcacagccggaagttgccaaaaagattgcagaaggaacgtcttcagcatcggctctgacaaacaataaaacacaaaactactactctgcatactacgataagtatagcgatatcaaagttgagccatacttcgaccgaaagtatttaccgagcggcatgtgggcagtgatgtcttctacaggtcaagaattgctagcgggaagtttaacgccaaagcaattatcaaatgagatggaaaaagagtacaagcgtctcagtaaacaatagaatagtgcgcaaaagttccttgttcgccgagaagcagggagataggcttctgcttcttttcaacacaagctgaaataggagtgaacacgatgaatgaattagtcaggaaagagccggtttctgtagtaagagatacggaaaaacgaaagaaaaaattaaaaacagaatcctctttatggtggatgtaccttcccggcttagtaattatcaccgtttttattatctatccttttattaacggaattagactttcctttactaattggaacggattttcacaaacgtacgattggattgggatccagcagtataaacgtttgcttgcagatccaacgacttggcttgtgataaaaaatacgctgctctacggaataggcagtacaatttttcaaaatattattggcttgtcatatgctttgcttcttaatcaaagcattaaaatgaaagctgtaacaagaacaattgtctaccttccggttattatcagcccaattattatggggtatatctggtacttcttttttgcctaccaaggaggcgctttaaatgaccttcttgtatttttaggctttgagaagattaatgctttgggaactccggagcttaactcttggattatcgtgttcgtcaatacgtatcaattcgttggaattgccatgattatttatttagcggggctgcaaagtatttcaaaagattactacgaggcagcgcagcttgacggagcatctgctcttcagcagtttaaaaacatcactcttccattgcttatgccttctattacaattaacgtcgttttaaatattatcgggggtttaaaactgtttgacgtaattgttgcgctgacaggaggaggacctggagatgcatcacagtcgatgtctacttttatgtatgacttatattttagaagacaagacgccggctatgcagcaactcaaggtgtgtgcatggcgcttatcattttagtcattagcttatcagcacttgtgtactttaaacgaaaggagacagaagcgtgatggactatacaaataaacggaaaaaacgattttttacctttctagctctttgtataacgctcgttcatattgtccctttttatattctagttacgacttctttaaaagcaaccggggattttagttccaaatgggtatttccaaaaagcatacattttgaaaatttcacaacagcttgggagcaagctaatttaggaaactctttcatgaatacgtttatcattacgttcatttcggcaattttgcttatttttttaggatcaatggctgcgtatcctttagcgcgccgacaaacgaaattaaataagtacgtctattttatctttattgccgtgatggtaataccgcctttaacagcgctagttccgctgtacaaaatggttgtgaatatgggaatgatgaatacgtaccaaattgccattttaaacaatgtcgcagcatttttgccgctaacgatctttttgtatgcggtcttcattcgctccactatttctaaagagctcgaggaagcagcaagaattgacggtgccggtacgttaacgattttctttagaatcgtatttccactgttaaagcccgtcacagcgtctattttaattattgccagcgtctatatttggaacgactatcagtttgcaattttcttccttcaagataaggaaatgcatacattaaccgttacgttagcaagcttttttgccggaaatcaaaataatcttagcttagtaggagcagctgcgattattgcgatgcttccaatgactattttatttttagtactacaaaaatattttattgcagggctttcatcaggatctgtaaaaggataaaaccaatacgaggaaggaagatgacgatgtctaaaatcacatttatcggagcgggaagtacagtttttgcaaaaaatattttaggagactgcatgtttgtgcctgctttagctggctttgaatttgcgctatacgatatagatgctaagcgtttaagagattcagaaaatatgctaaacaatttaaaagaaaactataaagtgaatattacggttaaagcctatttaaaccgaagagaagctttaacaggagcgaagtatgtgattaacgcgattcaagtaggcggatacaaaccaagcaccgttattgattttgaaattcctaaaaaatacggcttgcgccagacaattggagatacagtaggaattggaggaatcttcagatcactgcgcacgattccagtgctgtttgattttgctaaggacattgaagaagtatgtccagatgcgctgtttttaaattataccaatccaatggcaacactaacgggtgcaatgctgcgctataccaatgtaaagacggtaggcctttgtcacagtgttcaagtatgtacaaaagatttatttgattctctcggaatggatcatgaaggaatacaagagaaaatcgcaggcattaaccatatggcatggctgctagaagtaaaaagagatggacaagacttatacccagaaatcaagcgtctagcaaaagaaaagcaaaagacaaagcatcacgatatggtacgttttgagctaatggataagttcggttattatattaccgaatcgtctgagcataacgcagagtatcatccatactttattaaacataaatatccaaatcttgttgatcagtttaacattcctcttgatgaatatccgcgccgatgcgaagagcaaatcagcaattgggaatcgatgagagaagaaatggtcaacaacagtcagttaactcatacgcgttcacatgagtacggctctagaattattgaagcgatagagacaaacgtgccatttaaatttgccggtaacgtattaaataccggaggcttaattagtaacctgccgacaaaagcttgcgtagaagttccatgtgttgtagaccgaagcggcattatgccgacttatgtaggagacttacctgagcagcttgcggcgttaaatcgtacgaatattaatacgcaattattgacaattgaagcagctgtcactagaaaaagagagcacatctatcaagctgcgatgctagatcctcatacaaatgcggaattatccatggatgacatcattcgtatgtgcgatgatttaattgaagctcacggtgagtggctgcctgattttgcgggtaaagtgaatcaatacgtgtaacaaaggaatcctcggctgctattggctgagaattcttttgtgcgtagaaaaataagggaatatcatccaaatcgatattgacatttaaaaaacttcatcatacactgtaagaagcaagtcattttatactaagaaaggaaaggtaccgtagacaatggataagtaatcctatttttttagacattcttttaaaactttattttaaatgaacatttgtctagataggattagtctgtacatttttaggtgccatttctatatgtcttatatgaagtgatttctcccttttttcactctataaaaagggtgcatatttgcgtatgcctaattatgacctctaatcctctctagaaatcctagggaggtttttttatgttattgttagaagctataaatattgaaaaaagctatggagaccgcctgctgtttcaagcagagaagctccaagtacatcgcggagagcgaattggaattgttgggaaaaatggagaaggcaaatcgacgttgcttcatattttaatgaaaaaaatgagtccggatcaaggaaatgttcaaacatatggccgttcctcattgattccgcagcttgatgttcaaactacatcagccgtttctcctgagatgaaaagtcagtggaacgtgccaactgaagcggactttcttagcggaggagaagaaacaagaaagaaaattgctgctgctctttcatcgggcgcggaactgcttgcagccgatgagccaacgagccacttagatgtaaaaggcgtagaaaaatttgaagaagaaatgaaatcttttacaggcagtctgctgctgatttcacacgaccgagaattattaaaccgcctttgtacgtccatttgggaagtagaagacggcaaaattaactgctacgaaggcaattatcaagaatatgtgacgcaaaaaaaacacgcggttgaaagacagcagtttgaatatgaacagtatgtaaaagaaaagcagcggcttgaactggcttctgaagaaaaaagccaaaaatcaaagtcgcttaaaaaagcaccgagccgcatggggaactctgaagccagactccataagcgagcggtcggaaaacaaaaagcgaagctagacagaagcgcaaaagcgattgaaacaagaattgaaaagctggagaaaaaagaaaagccaaaagaaatggaagaaattcattttgacctatcgcagtttcaccaagtacacagcaagcaggtactaagctttgacaaagtctcggcatcagctggcgaccgtatcttgtttcaaaatctaaaaggcggtgtaaagccaggtgcgaaagtagcgattgtcggcaaaaacggtgccggtaaatctacgctgctgaatatgattaagcagcaaacagaaggcatcacggttgcgaagcctgtaaaactcggctttttccatcagcgccttgaaaatctagatcccgctaaaagcattttagaaaacattaaagaagacagcccgtacaccgagcagtttattcgtacggtactatcgcgcttactttttaaacgtgaagacgtatataaaaaagtagagatgctaagcggaggagaacgagtaaaaacggcattagcaaaagtctttttaggaaactataacgttcttcttttagatgaaccgaccaactatcttgatcttcatacaaaagaagcgcttcaagaagtattaaaagcttatccagggacgattttatttgtgacgcacgaccgctactttgttaaaaagcttgcgacgcatgttttgacgttaaaacagtctaaagcggagctcgcggcgattgaagatatgggtaaaagcaaaaaagcgtcacagcagcaaaatgaagccgagaaacttgcgcttcaattagaattaacaaaagtgattagcgagctttctatcatgccagaaggaaaagaaaagcagcggcttgaaaaaagatatgaagagctgttagaggaaagaaaacgattaaatagaaaggaaggataatatcacttcgcctaacaatgaatacaatgatgttactgaacatcaaaagcgtattgaaggaaaactaacggatatgaatgtaaaaggaacgaccaaaagaataaaatggattgggtacggaatcattattttctttgtgattcttattctaatgatgatcgttggcgtatttatcaattaaaataaaaaacagccgcttcaatgttgaagcggctgctttttatttacctactttggtgacaatggcatctccgttttttccaactcgtacagtagcaaaacgagcttcgctttccactttgctgccggttccttctggaataaagtaatgctcaatgccgtactgaattccccagtcgtgatacttccccgtaatgacaacgtctttctttttagaagtatacggcttattccattcatcatccgcttggtagatttttgcgtattcatacacgccttgtttgttaggacgaagaacgagcttcactttttcaccgtcttttacatgaggtaatgtaacgtgcgcaatgtcgtaattcagctcaacgtaatcgccttgcagcagcgagcgcggatcaatcggctgtaaagcgagcttaatttcttttccgctttgaagaagcacttcgtttttagtgaaaatgccgcccagaataatgagctgaacaagaacgatgacccacacagaggttcggctgcggtcaagaaacgatggctgcggctgatcaggcgttgacaggtcccatttcctgcttaggaaaagaaagatcagacctaaaataacaagcacaagtgatttattaaataaatcccacacaaagtcgtaatatttcatcgctaaaaaaacaaaccagaagatcatgccgacaataaaatcatattttggctcttttcgtaccgtcataaataaaaagacagtcgaaatcacaaaaaacaccgtgcagtaaatgatatttaaaaaagacggttcgcttaattcagtcagcgacagtaaaaagataaaagcaagaagcagcgctgcttttttaaacgcgtggtgtacgtttatcgtgtacacagcggcatttaatagaaacaaagcgagcagcacataatctattttgatagcgtcatagtaagcagtcggaacctttattaacagaagcccttgcactagcacaaaaagcaacaggcgaacgggcgtatgtttagtgaatactaaaagcgctacaagtgagatgacgtagataaaaaacaaaaagtcgtgcacaaaaaaagaagcgccgccgctgattaatacgcccatcattaaaagcgtatattttaccgttggaatatctgctttaatcaaataacatgccacaatcagcaaaacgccaatcacaagcattccgtttgttgggtacgttcctgtaataagtgtgatgagtcctcctaaagagctgctgccgattaccgatgcaatggccgtaaccccaattaccgctatacgtttaatcacgcgcagcgaagttttttgtgctgaagtgttggcagtgagccatttaacaaaccacacgcttgcaccaataaataaaatcacgaatcctaaagctaagaacagtgaccattcagcgtagtgtttaaaaataaaagagaaaaactgttcaataacaaataaagcaaatgccacaatggaaatccctaaaaacgacttttgcggctccacttttgaaaaataaaaaaaggagcttagtaaaaacagcaaataaaaaataataagaccaattcgtaaactagagctccctgtaaaatacggcagggaaagagttaaaaaaatgtagtgaaacaaaccaaacgctgcgtacatgaccacaggagacgagaggtgtttcttttttataatccaaaaaataatcaagttcacaaacgccattcctgcgtaaagtaaaagcgtcccgtgttcgcctcgctgtgaaactgcgcctgttggtgaaatgaaaaaagccatggcgaattgaaataaaacaaacgataacacataaaacggctgatactttgtaaaaaggctaaacagaataaccggcacaagccaaattaaaaatagccagtatgattcagcgtgcgtgttgtaaatttgagaaagaagcgcgatgcttaatccaaatgaaagagcgccggccaaaagcgtccagtgacttaaaaatgcctgctgaggaagcagctttcgcaccgcaaatgcacttccgtaaaacagcagcatcagccccacgctcagcgcaattttagtatagcggtcaaagccttgccagttcgatgcaaagaaatataaaatgccggacaaaacaagagccaaccccagtaaataaccgagtcttacgagcttttctctcatattcaacctcctctttatattatgtatatactagcgcatgtttaaatatttggaaatagaaagaatgaatgcgttttaacaaaaaaattgtgtaaaaaggtcttttattggcgtggaaacgttccgcgtgtacctgcccataaagcaaccaaaacattaagtgacatgcggaatgccgtcagcccaaaagcagcaagcaattggtcggaaaaggtgtatgaaccgtttcaaaagcagatcaaacctttactagatgctgagatgccgactttacgtcctcgacctcaactgtcaggagtaggagaggcgttacctggaaagacctttggtgaagcgttacatgggttaacgacgtataagattggacgtgtttcaaaaggccagtcgaacacgttggagaaagtcgaaaagcctggtggtaaggcaaatgttgaagggggttatggtcagggggctgttgctaggggtacgggtaatcctagcaacagccgggagttgcaacggaaagctttaattttagaaatagtctaggtacacagaaaaaactaatgtatcaaaatggagatataggtattatacctcaagaggtcagagataagttagcaggtagagaatttagaagttttgatgattttagaggtgagctatggaaagagatagggaattcaagttttgcaaagagctttaataaggcgaaccaatcgctaataaataaggggtttgctccaagggcaccgaaaaatggacattacaaaagcttgaatacttatattctacatcataaacagccaattgaaaaaggtgtaagtttacgaaatcattattataggaggtaagagttaagatgaaagaaacaagaattagaaaactagtcgaggaaataatggaacaaagataccttttgaagcctgatgataaactaattacggaacttcaatcgcttgtaacttttcctgatgtgggtgatttattctatattgatcgggattatgaatatattagtaatagaataatcgattacgagaacagaaaaaaagataacctatctaaaaaagagttgattgatatggttacaaagataatagatgtttctgagaaggagtatgaaattgataatcttttactaatagtagaaaatgcagtgaagaataaagacatctcagattacatttactattcagatgaagatttaacagctgaacagattatagaaaaagcactttctagtaaatagtttaacaatgaattaaaggtaatcaagatgttgcaatataaaattggctgttaaaaaagtaaatactcatactggttgtaccatcatagaaattatgtgcaatgatagaatagaaaagaagtacgagcttaggtgagatgacattttactgggtgatgaatataaacacacggaatggatactaaattaacgaactcgtacaaacccgtaagctttaaggtagtgattgtcacgacacataaaaagtgtcatattgttactacaaaacttacaagtttatgctacttaaaaatagatgaacttcaagcacttgattgtcgattaaaggcaacaagtgctttttattgtaaaataaaaatgtatattggactaaaatgttaatttaaccgattaagttggaaaagtagttcagacagtggaagtggcgaagtagtcttaaaaacaacaaagtatagagagaactacggtaaaatcaaaatggatgacttctttgaaagtcaaacctatacaagaattagtgatgatcgtgtattaacgttggatcaaaaaatggttaaaggaatagatggtgtatatgaaaatacatctccaccacctaagtatgtaatagcggaggctaagtataatacatccaggttgggaaaaacaaacgatggaaagcaaatgagtaaaaattggattcttggaagtgaaaggttagatagcactttgtcaaaggaaaaagcagacgaaattgtgacggaaatgttgctcaatccagaaaatgttcaaaggattgttatacaggttatgcctaatggaaaagtagtgaagaaaattcttgaagaataaaaggtgggagagagattatgatagctactgcaataagcatgaacttgagattctattttcattgctccgtgttgaagatgaagagctatttgaaatatgtattgatactttaaggagctttacaaacttagaaaataaaagaatgataagagacaatccatatattatagagagaataaatgagttcatcccaaaatcaggagcggcagttgaaaaaatttttgaagatttcctgttaaacattaaaaaatagcccaaaattattaatttatagtctatgtaaaagtcaacatacatgttaggttttataacataaatttctgaataatcgtttacttattcacttatttcatggtatgttatatgacatagatattgtaacttgcaatatgagctgaaaattagctgttgtaatatgtacttatttttctaaatatgcacctgaacgaactggtgctctatacatatatacgtctacgtataactagtcaaaaagaatgaaggcatttctatttccagtgctgtttgttcattcgagtgagtatagttatagtaagtgaaattttcaagacagttattttggtttttaagctgaatttttggaatagtttgttattttatcaatcaatgctttgccacttagaggtaggtataaaagtttactaataaaagaaaatgcagacggaatttaatattttttttgggatttgtgggcgattttctcacttttttatcatttttgaatagtttataatcatcagacaattatactgtgatatagttataagtgagacagaaaaaggtgtgttcttaggtcgcacctgaatttttttactacgtaagcaggagcgcctacatctttttacaaatataggggatgaggaaggttataatgagcaacgtacagaaaaaaacagacgttatcttaattggtgccggagtcatgagcgcaactttgggatcattactcaaagagttagcacctgaatgggacattaaagtatttgaaaaactcgcagacgcaggggaagaaagctcgaacgaatggaataatgcagggacgggccattctgcgctgtgcgaactaaactatacatcagaaaaagctgatggatctatagatataacaaaagcgatccgaattaacgagcagtttcagctgtcaagacagttttggtcttatctggtaagcagcaagttgattcgcaatccgcaagattttatcatgccaattccgcatatgagtttggtacaaggggaaaaaaatgtatcgtttctgaaaaagcgttttgaagcgctgtcaaacaatccgttgtttcaaggaatggagtattccgacagtcctgacaaactaaaagaatggattccgctaatcatgaaggagcgcacgtcaaatgaaccgattgccgcaactaaaattgattcgggaacagacgtaaacttcggtgctttaacacgcatgttgtttgaccatctgaagaataaaggggttcaagttcactacaaacgaagtgtaaaagatattaaacgtaaaagtgacggtatgtgggaagtgaaagtcgcagatgtagacagcggcaaagttgagtaccacacggcaaagttcatctttatcggtggtggaggcggaagcttgcctttacttcaaaaaacaggtattcctgaatccaagcatattggaggattcccggtaagcggattatttatggtatgtaataatcctgaagtaattgcgcagcatcacgggaaagtatatggaaaagccaaagtcggagctccgccaatgtcggttccgcaccttgatacacgttatattgataacaaaaagacgctgttgtttggcccgtttgccggcttttcaccaaagttcttaaaaacaggttcaaacttggatttaatcagttccgtaaagccgaataatattttaaccatgctagcagcaggcgtcaaagaaatggcgttaacaaaatatttaattcagcaagtgctgttatcaaatgaaaaacgtgtagaagaactgcgtgagtttatcccgaacgctaaaagcgaagactgggatattgttgtagcaggccagcgtgtgcaagtaatcaaagatacggaagctggagggaaaggaacgcttcagtttggtacagaagttgtaagtgccgctgatggttctgttgctgcacttcttggcgcttctcctggtgcatcaacagcggttcacgttatgcttgaagtattggaaaaatgcttcccagaaaacatgaacaagtgggagccaaaaataaaagaaatgattccttcctatggcatgtcgctagttgatcatccagacttctttaacgaaattcatgcgtccacttcacagacgcttggtttaattaaaaaagagtctgtttatagctgaagattttacgccgtaacaaacagcacatgtgtatgtgaagaaatctacaggcgtgcacaaacaccaccttttcttgaggtggtgttttaatggtctttatatgtagagtttgatttaagggcggtattgattgcttccaggctgaagttttaaattcttccacgctgcaatcgcatcatcgcggccttttccattgtttgtcagatcattaaaaaagtcgcagataaagcggttgtactcaaactgaggcgcaatttctttttgataagaaggctgcttttttcgttcttcttcttcataccacgcttttaccacatctcgataggtctttcctgtattttctttaaaatagttttgaatatacgtggaaaaatgaaacgtaggatgaatggcttctttaaaaaaaacccgtacttcttgactgcatcgatgattttccgtaatgacggtatctaatgttagcggcgcttgtgttttagaggacgagcgtcttttagacggtgctcctgagtgttgagtgtcaccggtcgttaaagagacttcaattctttttgaaagttccattttagatagggactgttatgtaccttttgttagaaaaattcaaatggcttagaaaatcggcaatgtcaggtctatgtgcagaagagagcgcttgaagcttttcaagcgtatcgtgttcttcaaaagaaagcacgttatcttgtttaccttggatggcgcgtatccagctgtcttccacattaataatatgaaaaagagtttgtaaaatgctgcccactcctccaatacgctccttcaacagttcttctcttgaaagttgataacaccagctaaaccattcatctctcacttgccaattatattcaaaaaaatgaatcatctaccgcacctcacatgttttttacctcttatttaaattagatgaacgctggtaaattcctttttataaagaagaaaaagcgtctaggcagggtgtctcttgcaaattccaaaatcaaacaattacaataagaaaaaaggagttgatcacatgacgctacataacaaagtcctttctacgattctaggaggagctgttggagacgctttaggcgttccagttgagtttaaaaagcgaaattcatttcggattacgactatgaccggctacggtacatataaccagcctaaaggaacgtggtcagatgatacatctctgacgatgtgcttaattgataatttaatagacaaacaagatgaatatgatttaatgcaaaaatttgcgaactattggtcggacggctactggacgccgtacggagagatgtttgatatattggcatcgcaacaagcgaagcgattcgccgctataaaagcggacttcctaaagaagagtggggaggaagcgctgaatacgacaacggaaacggagcgcttatgcgtattgcaccgcttgcgtttacactatgtgacgaaccgagctttacaaaaagaaaagaagaaatagaaagaattgcgcacgtcacgcacccccatgtgcgctctacgcttggctgcattatatatgtagagctgcttattcgtcttcttgacggggacgagccttttgaagcatatgaaaacgcggtaaatctctgtcaaaagcatttaacaggtacggagtatgaagcagagttttcttcgtacgaacgagtgttaaacctaagcttgccgcaagcagggagaaatgaaatccagtcaaccggatacgttgtcagctcgctagaagcatcgctttggtcttttctgcaaagtgatgactacgaagaagctgtacttactgctgtgaatcttggagaagacacagatacaataggctttattacaggtactctagcaggaatgtattatcaactggatggtattcctgaagagtgggtttgtcagcttgctaaaaaagaagagttagagaaagcgtgtaagaagtttgcggatatatgttagtggataataaaaattactttaaagagcggaggagataaaatgaaattttctatggattttggcgataccaattttatcggagtggcaaacgcaaaagagtaccaatcatttatcgatgaggattgggagctagaccagcttctgaatcacttcggtagtgaaatgaaaaagagaaatatcctagtatgtcaaatgacagaagaaggaattgaacactcttggaacgtagaagtgaagattggaatagagtcggatgtagatacatactttaggaaagcaacaggttatataaatgtaaccaatcatcagctttatctcgtagattatgactgccttacgatggccgcccagtttgaagatcagttagtgcctgatgaaaactgttctaagtatagaattgatattaaaaatggtatgtacaagctcgagcttattcaattttataatgttgacaaaaatgagtatacaggaaatgaccgaactgaccttttattgaactttattaaggtggagcatgttgaagaaacagtcgatgaggtattttggtgtacgtattaagtagtaaacgtaccgtaggctactaacttagaggtggggtgtgccgttctaaggcaccctatcttatttatatattcactgaaaccctctggctttgcgtcagagggtttttatggtcaaaatcatttatagtatacttttacataacttacaaactacacgttaaagaaaggtgagtacaatgccaaatgcatgggatgcagaacaaatcgtatccgtaccgcttgccaacacgctaatcgagacgcagttcccagaacttgcgcccgctgcgatttcgctgcttggctacggctttgacaatacggtctatcaagtgaacggccgctttgtgttccgatttccaagaagagaactcgcagtaggactattaaaaacagaaaatcagcttttaccaagtcttgcttctcaattaccgctatccattgcagagcccctttttttcggtaagccgaaggcaggctatccttggccttttacgggctatcactacgttcaaggaactccgcctgcgagattaactgaagaagagcgcatacaatctgcttctgtactagcaaggtttcttcgcacgttacatcactatccttactcaaaagcgcaagagctcggtgtcccgtttgatgagttaaatcggcttgatatgatgaagcgaaagccggcgttagaaaagtatgttaagcaaatgaagaagtgtaacctctattcaaaacagtctattcttgaaagctatgtagatagcatacaagaaattaagtatcaagaaaaacatgtactagttcacggagatcttcatattaaaaatatgattgctgaccaaaataatattgtttcaggcatcattgactggggagatgttcatattggccatccggcagttgacctagcgattgcctacggctttttacctcctaaaggaagagcacgttttttcaaagaatacggagaagtagacgaagaaacgcacaggctggcaaaatggaaagccgtatttacaaccgtagtgcttatagcacacagctacgatcaaggagacaaacaaacgttagaaacggctctagaaagcttgaaccttatctttcaagagtaataaaactgtaatagaatttctgttaaattcctgtatagttaaaaaaggataaaaataaaaacaacaggtgaagcaaacgatgaatacaagccactggaatgaatcagcagcacagctgctagaagcatggatacagctctataaagaaaaaacatctcttatccgagaaatggattctttaaacatgctaaaagaagaagtagacggggtggacaaagaaaaatttctctccatagtaaaacgtcatctgcagaaagtgtatgacgagctggaaaaagaacgtacagagtctaacataaatcacatggaatatacgatgttaacgtttctatcaagcgattatccggaatacataaaaaagcgtcaaagcaatatgagacagattgaacagttaacaagcatacataggaatgtgacagagcttttcagaaaagaactcatttctgaagcggatatggtagcgtttagaaacgacttttttcaactaacagaaaaacacgctaacacgtcatcgctaaaagaaatcaaggaaagctggaatacgtatttgtcggcgttcgttgactttcaaaaaaagcatgaacatgtaaaacaagcgacagccaaagtacttgaagaagacaagagcttaaagcaggaatggaagcaattaagcaaaaataaagtagtggccaaacaaaaagtgaccgcctttcgcacaaagcagcatgagctaaatgaaagtattcgaaaagcaacaaatgcacaaaaacaattactcgaacttcactggcctgatatccacagccagtttaatgcgctgcaagaaaaaatgagcggaagtctttctacagtgctgaaagaaacggaacgcagtatggaagtcattagccaaaacgatgcaaatgaacacgccaagttaaagcaatcatttaccgacctaaatggagtccatgaagttgaagttcatcaaacgtggttagcagcttttattaaagagtcacgaccattttttaacgaactgagtgaagatataaaggatactcggtgtcgagaactgtggaatcgaatttacggcatgtataaaggaatagcagtaaatgaatttattgttacctacgaagaatttttagcacttcagccgattggcagtgtaaaaagcacggaaataccaaggccattagctcggttaaagctagatataaaccctgttaaactgccagtctacgcagactttcccgtgctcaaaaagcagcaatcatcacgacgcacttttcctattttaatcggaactgttattgggattgttttattactgacgattgtatatataaaccgtgataatcaaacgctagaaacaagctcagacgtaaaagccacgaccaacacgaagccgttaaaaaatgaagaggtcaaaccagctgctgtaagcaaaccggatcttgaaaacttttttatctcctataaagctgcttatttttcaagcttaaacagcggagactttagtgggatggcgccctacattgactcgaatcagccggtttataaccagctgaaaagctacatcacatcacttgctggaaaaaatgtatcgtttgctaacgatcagtttcttgtgacaaaaacagagtcacacgacgatggaacctatgacatttatacaaacgaagtatatacgttcaccgactcgtatgacgcgagcacacagtttaaaaaagaacgaatttatcatgtgaaagctgctggtaaagacaaacttcaaattacgaagattgatacattaacagatgagcagacgccggtggaagagtgaatggtttttgagagattatgaataaccgctagttccttttgggggctagctgttgttggtgttggaggcgttgaaagtggttagggtgacctctacgctgccagcgtggatatcttgttatataaaattttaaatacttccattaagtacttccaatagaaacaagaaattaatctcaagtacaatcatattaattccagtttttctcgataaaatgaaacgtcggtcgtaaattcgttttattagcaattgaaataagagcgggaacaaccgaaggatctgttttagagaaattaggaatccgcggattcaaccggaaaaactgatccccaagaagctcagagctaaccattgattcatagtagctcgatccaccggagataatctgaagaaacggcagtaacggttcattaggagaccggtctaaaagcactccccaatttggcggcaggtcctccatatcctcagggcgtatgttatcggcactaaccattccccatcccttcgtatctcttcttaattgagttggctgctcacctgttccgatggataatacggcaatttgctccaacggctgctttgcttttcccactgcaaaggcgatactagctgtactggtgttcgttgctactgtatacccatccacgtagttttgataagctctttgcgtcgcgggagcaccgctgctccgtaggattacgtcactcgctttttcattaagataaggggagccaggaaagttgtgaaataacacaggattccaacgattcagctccggtgaaaataagtgaaaggcaggcacaaccattcgtttttttaagtctctaaggcggaggtctcgagggaaaaacgttcgtatggctttaataaaaccagaatagggtagttgctggttaaagacaggtccgcccggtcgggaaacgctgaacgctggtaagatgtgatctttgaaaaactgaaacgtctcctctggtgatcttccgcttgctaatgcaagagcagtaaatgaaccaatcgaatttcctgaaaaaacatcggtttcactaattaacttggggttttgataagccaatctattcaaaagctgtaaacttaaagcgcctaaagtaccgcctccatcaaaggtcataatccgatattttgtcaaaggtgatttctcctttcgaatctcatgagaggtattattctgtatatgtttatttgatgtgttggataggtatgagtaatctcttttatcagttcttcaggaagcttataggatgcgagtttagtgttaggagaggcttatgtcttttagttttgtcttaactttttacttatcttaaaataagtttagacttcataaaattccatttttttgatatactctgtaaaattcttttttataattataaaaaatatttttcggaaattaagaaaagggataggaggaatattttgaataaacaaaaggcacctttagaaaatttgaaaattataagagatgaattaaaaaaacgaaattgggctgtagacgtttttctatttcattacaaaaagcaagaatatattgttctagtgaaagtttattcagaacgcgaaaagaaagacagtaagtatgcaattgtaaagcttgagtttattaaaaagagggggaggaacgaaaatttttgtacctatgcagatttgtataagatacatatctctgatatgaaatcatttagaaaattttttgggattgaatataaagaaaacttgggagatgttattcaacaatttacacagcagttctccacttttattccaaaccaattaatagttgataaagagatagatttaaagagttctataacagagtacttgaataaaacggacacggattcttctaagggcatttattgtattggtgtaaagagaaatggaaccaaaaaagatggtacatcaggacaacggagtcctgagaataatcaaaaagcagcaatattcagaccagaattatttgagaaactaaaggatgatactacaataagtttttgtttttctgaggatccttcaagacaaaaaacagatgaggatattcttttgcgctggaaagaaaagaaaaataattcataaataagaatttttactttttatattagcttttccttagttataaaaggtgtcttataatttatattgtaaacttcgcgatgcttatggaagtagtgtattagaaagcaaagatgtgtgatatgtacttgtacaagactatgttttctgtaccgtctcagccgcagccatatttattacacagcgaagaagcagtggaacttctgaatggaaagataagaacgggataacagcgcgtaataaaatcgaccaaatgttaagtgcagaaacaaaataacctagatctaaaccttttgatctcaataagtatttcaaaacattgacattcccttccaaaacgcatacaatagctactaataaaagcacacaaattcgttgaagagaatcagtacgctgcaagtttgttccacagagagccggttatagctgaaagccggtgttcaagctgcaggggaatatcctctctgagaagtcaaactgaacctataagtaagtttgaacggtagtctaccgttaaaaagaacgcgtatgattgtacgttgctgagtgctattgatgaacggatcaatagaagccagggtggtaccgcggttaaaacccgtccctagtcatagggacgggtttctttgtgtgcttttaactttaaaaggagtggtatcacatgaaagaagtgaatgtaagggagtcttcgcaagagcgcgaacagcgtatccagaagcagtggcaaaaagaaagtgtgtttcagcagtcggttcaaaatcgagaagggcatccttcgtttgtgttttatgaagggcctccgacagcaaacggtttgcctcacgttgggcacgcgctaggccggacgattaaagatgtggtggctcgttataagacgatgacagggcatcaagtaatccgaaaagcaggctgggatacgcacggactgccggtagagctcggtgtcgaaaagcagctcggaatttcagggaagcatgacattgaaaaatacggcgtagaagcttttatcaacaaatgtaaggaaagtgtgtttgtgtatgaaaagcagtggcgcacgttcacggagcagcttggctattgggttgatatggaagatccttacatcaccttagagaattcatacattgaaagcgtatggaacgtgcttggtacgattcatgataaaggacttctttataaaggccaccgcgtatcaccttactgcccgagctgtcaaacgtcgctgagttcgcatgaagtagcgcaagggtataaagatgtaaaagatttaacggtaacggtgaaatttaaagtgaaaaaccgcgataatgagtattttctaggctggacaacaacaccttggacgctgccgtcaaacgtggcgcttgcggtgcatgaagaaatgaactacgttcgcgctgagcaaggcggcagcgtgtatatagtggcagaagcgctcgcagacaaagtgttaaaaggagagtataccgttttatctcaacataaaggaaatgagttaaaagggatggcgtatgagcccccgtttaattttgtggaagtggaaaaagggcatgaagtggtaacggctgattatgtaacggaccaaagcggaacgggcgttgttcatttagcacctgcttacggtgaagatgattacagagttgtaaaagaaaacggcttttcatttgtgaacgtggtggatgaaaaaggacagtacacatctgaagtgccgccgtttcaaggacgttttgtaaaagactgcgacgttgatatcgtgcgttatttagcaaatcaagacgtgctgtatcataaagaaaagcatgagcacagctatccgttttgctggcgatgcgactcgccgcttctttattacgcaaatgaaagctggtttatccaaacgacggcgttaaaagaacaatttttgaaaaacaatgaaagcgtgacgtggtacccggatcatatcaagcacggccgctttggcaactttttagaaaatatggtggactggaacatcagcagaaagcgctactggggaactccactgaacgtatgggaatgcggggaatgtcagcatcaagtagctccaaaaagcatcaaagagcttcagaaacatgcgtctcattctgtggacgacagcattgaacttcataagccttatgtagatgacgtgcagctaacgtgtccggtctgcagcggagaaatgaagcgaacgccggaagtcattgacgtttggtttgacagcgggtcaatgccgtttgcccagtatcactatccgtttgaaaacaacgagttgtttcaaaagcagtttccagcagacgttatcgcagaaggaattgatcaaacgcgcggttggttttacagcttgatggcagtttcaacgctctttacaggaaaagcaccttataagcgcgttttatctcttgggcacgtgttagatgaaaacggtcaaaagatgtctaaaagtaaaggaaatgcgctagaccctgttgatcttattcatacatttggtgccgatgcgcttagatgggcgcttttagcagacagtgcgccttggaatccgaagaaattttcagagcgcgtcgtgcaagaagcgaagtcaaaagtgattgatacacttgtgaacgtgtacggcttttacgttctgtacgccaagcttgacggctatgacccgaagcagacgtatgaattgaaaaaaacaaaattggatgaatggattctttcacgtttgcacagcaccgttaagcgagcaacagcacatcttgaagattacgggtttacaagtgccgctcgtgaaatcgcagcatttattgaagagctaagcaactggtatgtacgacgttctcgcgatcgtttttggtcagaagggatggacggcgaaaaagcagcggcttacgatacgcttcatgaagtactagtgacgttaagtcagctattagcgccgtttaccccgtttgttgcggatgatattcatgaaaatctgacaggaaaaagcgttcatttggcagactatcctgtgtatgatcaaaccaaagtgaacgaaaagctggaaaaagaaatggcagcagtgcttcaagtagtggaactaggccgaagcatccgaaatacgcattcgttaaaagtaaagcagcctctgcaaagtctttcgcttgtggtaacggaagaaaatgtagaatgggaagcatatcgtgatgtaatcaaagatgagcttaatgtaaagaactttaacgtggagcaagacgacgacaaacttgtttcctatgtattaaaactcgattttaaacaggctggaccaaagtttggaaaacgagtaaatgaggtcaaccaagcgttaaaaaacttttcagaagatcaaggaaaagagtttgttgaacaaggcgagctaagtgttacgcttgcttcaggagaaaacctaacgcttgaaacggcagacgtacttgttgaaaaagtgccaaaagaaggctttgcagttgcatcgaacggcacgtataccgccatgttagatacgactttaaccgaagaattcgtgcaggaaggagtcgctcgtgaagtaattcgagcggttcaagattatcgcaaaaagctagatttacccgtaaacttacgtattgatttggagcttggcggggacgaagaagtgcagaaagccgtggcgaagtttgaaacgctgcttcaagaaaatcttctgctgcacagtctcagtgtgaaagaaactatcaaaaacggagaaacggtaaaagtcggaacaaagcaaattacgcttcgtgttttaaatcagaactgataaaaagcacttacctcataatgggtaagtgcttttttacctttaattaaactgcccgagaacgttcttaagactcggccaggcaatttcacaaggagccgctaatacatactcttttccattttcatctttaaagtgctgaacaaaacggtattttcctaccttgtagttaggagttgcgatatcttgtttgaatgatttccctggcttcagcgtgacagttttatctggaaactctaatccgtttagcacaactttgtaccactttccgtcttttgagtgatccgccgtattttcataaggaattgttaaggtatgcgtcgaattgttttgaataacaaaaaagccaaactgcgttttatcgtatttttcacttacagcagatagcgtaatagtatctccctctgtgttaatggaagacggaatgttttttgcttgtttagcccctagctccattttttgaccgttataatcaatatagccaaagatgcaaaacaagataataaaaatacctagtattagtataagtgttcgtactattttccaaagctttgcaccgcctttgtatcactcttccattatacggaaagtcatctatgagaaatagtatgaatttaccttttatctatgacctttttgaaaggaaggatggaaatgagacaaattatagccatgggcggcggaggcttttcaatggagccggataacctgctgttggatcaatacatactttcacaagctcatacggacgtaccgaagatctgttttatccctacagcaagcggagatgcggataattatatagaaagattttatgaagcgtttgagaagttggtatgcaaaccgtctcatttatcgctgttttctcaaaactttatgaatttaaaagcatatatgctgcagcaggatattttgtatgtaggcggcggtaatacaaggaatatgcttcttttatggaaagaatggggactggatacgattttaaaagaggcttataaaaaaggaattatcttggcaggaataagcgcaggtgctatttgctggtttgaagaaggcgtcaccgattcaatgaacaacaacctgtctaaaatcgactgtttagggtttttaaccggcagcaactgtcctcactacgacggagaaagcaatcgaagaccatcgtatcatgagctaattgcaagcggggaaattaaagaaggctacgctgtagatgacggagtcgcgctgcattttaaagatgagaatctatcagtatcagttagttcaagacctatagcaaaagcgtatgctgttaatcgaaaagaggaagaagtaactgaacgtgagcttccggtgacctatttaggtaaccgcaaggaataaatagacctttccatgtttctctgtataaaatggagcttattcgtacatacataagcagagattctatataggagggtacttcagtgagctataaacaatactggggaaacatacatgaacaaagcgataagctgcagaagttattatcgtcgtattggcatcagtattcagattttggaaactggcagttttgggtggtgcttgcttcgctcgttcttcctcttgtgttgttgtattttaccgcagaccggacgcggatctttgaggtgtttttctttgggtatacggtgcatgtgctttgggcatatactgatattgcactgggaagaaccggttatttaacacacacatttttcttaacaccgcagcttccaaacgcaacgaacattacagcttctattttgccagtagcctttctgctgctatatcaatattgcacgaatcaccaaaagaatttttatctgtatacgattctgttgagcgctgttttttcatttggattggcgcctcttgaacactattttgggtttattgattcaggaaaaggaatgagtttgttttatatttttcttattgatataggaataacgttagtagcgtactggtttacaaggctgcttgtaaaagcaaaagccgcggtctatcgtaaaacggaaaaagaacgttgaaaaaatgtttgaaggttattagttaggggtatacgtatacttaagataaattgaggtgaaaaaattgtattactaccgcatttcagaaggacaagatgaaacatactctgagacaattgttgttcatgaagaacaatttgatcaaggtacatttgaaaaaatggtgaaagaagcgatggtcgataagcctggcaaaattgatcaagtggacattgtgaaatatttaattggacattatcatttccaagttgcatatattgaagcagcctttcatagtacatatacagactaataatgttatgtattcaataaaaaaaccgttgcgttggcagcggttttttgtttctaccagtaccgatagtgataggggctttgagggtgatagtagggattctgaggcggaggatacgtataaggagacgtgtggtggtaggctgggccagcttgttttttctttttatagtgttctttttctccgcatttgtccgttggtccaatcactatggtttgattttttaatggagccagcgttttctttagttgctccgggtctaagcaatacgtgtgagcaagtacttcaataggcgttttatttaaaatatcagatccaaaaatgtattccggatacggagcgtcaaaaatagcgagtaaatgcgtattgtcttcagacgcaatttcccagtgccaccagccctgagggatattagccacttgacctggagtaatcggaatatttgtgacttcgttgttaaacggattgattaatgaaacgatggctgagcctgaaatgcagtaaacaagctcagcggcattttgatggtagtgcggttcgactatgcggcttttgcttaagtaaatatcgagtaacgacacatttcctaatgtattgagcacatctcgacctaatcggttaatgtaattttgatcgtttcgcgtgttaagtctgtttttattcacatctgagaagtattgtacgtttggattgttgtaatccatataggacgttgacaacggtcttcagctccgatccttgaattttttatgatgctgtatcgtatgtgaagcgttttatttcgtgacagaagcctaggaggaaatgtaggtaagggcctgtttttgatgagatgtacaatcatttattcgctaattctcatacactgtaacaggttctttttttcacagagccatgatcaatgtcagacccatacgacagatcattttaaggaaagtgagttgcagagctgttgcttgatcagtatgagaaaataaatagtacgtatgagaaggtagatgaacttcagctgccgtttgataagccggttttagtaggagttgagtggaacggagtgctgtttgagtttttagtaaggctgaaaaaagagtcttctcatttacttgtattgggctcaggaggaggggcaagtcaggaaatgccggcaggtcctccatattttcagcggcattcgtggataaatgaattccaagattcgattatttattacaacgaccccacgctttatttaggaaaagtgtcacttgcatggggacaagggacaagcgaccgtttttatttaaaagacattgcggttttaattgaaaagttcatgaaaaaagtgcaggtaaattcgtctaacgtgctattttacggatcatcgggcggcggctttatgtcgatgtttttagcggggtacgtaaaaggagcaaaagcgcttgtcaataatccgcagacttgtttaactaagtggctgaaaacgccggttcggcaagtgtttaatttatcttatcccgacctgactgaagaggaagtgatagcctcatacggtgagcgaattaacgtagtgaagtttttccgccatattaactatgtgccaaaggtgtattacttgcaaaacggggcgttccaatatgatatgagcaatcacttgctgccgtttttaacggatttgcaggatatgccagacgaatgtgaaattaataatataaaagtggagctctattataacccaaagctgaagcatgcagctgttagtaagcaagaaacgattgactatgtgaatatggcgaaaaagatataagaaaaaaggcaagagtttatcctttaagaagctcttgcttttttatgtcgaattttctaactcgatagatacaagtaggaagttatgttgctttttcttttgaatatgatagtgaagatgaggtgtaaggagggaaagtatggccgatcaagatgagagaaaaagatacttgatggaagttcagacctggcttgaacaagtatgtgatcctgtatttgaagaagccattacagaagtagatataacgtcatatataacccgcacgcaagaagacgttcttgaatatttaagtgaagaagatgtcaacgaatatacgttagaagaaatcaataatgcagtgcggcatattgataaagtcttaaaagagcggcttggagacgatggcagggagcgagaatcgatagcgccaggacagcacgagctgccgccgcttggctatagctattcagctcttgaaccgtatattaaccgggaaattatgcgtcttcatcacagcaagcaccatcaaagctatgtagatggattaaataaagcagagctcatgttgcagcaagcccgtaacacaaacaattttgacctcataaaacattgggaacgggaagcttcttttcatggctcaggtcattacttgcatacaatcttttgggaaattatgagtccagaaggaggaggaagaccgagacgacagctgctgcagcagcttcaaaaagactttggcagctatgagaaattcatgatgcacttttctcaagctgcaaaaaaagtggaaggtgtgggctgggctatcttagtatggtcgccgcgttcgcgaaagcttgaagtcttgcaagctgagcgccatcagcttctcacgcagtgggatacgattccgctgctcgtattagacgtatgggaacacgcctattatttacagtacaaaaatgaacgtgatccgtacgttgataattggtggaaaatagtttactggcccaatgtagaaaaaaggtttgaggcagctaaaatgcttcagtggcagccatattaacaagtaatgcaggcatcttaatttcaaataaaaaggctatgataaaagtattttagttgaagaaagatccgaacgatgaattgagattcttgatggagaatccaactcgttcggatttttttattgttatggcgatcatatatgtatgcgcgtctagctgttgattggagagaaagacgaagactcctgaggaaatagcggaacagaggagacctctcagaagcgcaagcgacgaggaggctcatcggtcgcacgcggaaagcgaagtcttgcacggaaataaacagcggtgtaaaaaatgatttatattaagtttcttaagctactttaacgctttattaattttaaataaactatgttctaaataattaatataaaataaaagtataagcctctagaatcagtgaaatgttacaaatgaaataatccagtataaaagtgtgtaaaagcaccgtcatatacctaaatatgtatgtttttgaagagtaaaggtgattaatttactagtttaaaaggaagaatctttatttttgctgtaactaaactatcaaactattgacatgctactgaaatataactgtaatattcatgtgttattttttatgtattggtagataaaggagaaatcaattacatgaaaaagacaatgattacgttcagtttagttctaatgtcactgttcggagtggcaagtggtgcatcagctgcaacaaatacatatacagtaaaaagcggagattcgctatacaaaattgcaaagacatataaagtatcggttagtcagctgaaacagtggaataacttaaagtcagacagtattcatccgaaacaagtattaaaagtatctcaagcaaaatcaagcacgcctgctaaagcagcgcctgcgaagtcttcaaacgttgtgaaagaatttaaagtaacagcaacagcgtatacagcgaactgcaaaggctgcagcggaaaaacagcgattggaattgacttgaaaaagaatccgaatcaaaaagttatttctgtcgatccaaaagtgattaaacttggttcaaaagtatacgtagaaggttacggcacggcaatcgcagctgatacaggcggtgcgattaaaggaaataaaattgacgttcttcttccttctcaaaaagaagcgttaaaatggggaagaaaaacagtaaaagttcaaatcttaaaataagtatttcttaaggaaatgagagccttcgctgaagggctctcatttttttcttcattaaagggtatgctactttatatatactgatggaaaagttttacgaaaatgatcatatttgttgacaaatatttcggaaacggatatatttatccggtatataattaagttcattaaatattcgtgacataaattaatagaatgaacacataaaatatattcttaacctgtttgtcatctgaagatttacatacagataattttaaagggaaaggtcttgttaaaatgaatacacaaacacaacagtccgatcaagcccgaactcggtctatttttggcgtaatgataatgggggcgctcgtcgcttttttaaatcaaacgctgattaacattgcgcttccgcaaatgatggatcatttccatgtaacggcggctacgggcaactggttaacaaccatctttatgttagtaaacggaattgttattccaattacagcatttttaatgaatcgatttactacaaggcagctgtatattacagcaatggggctgtttacagtaggaacactgctttgcggtattgcaccgacattttccgttattttagtgggacgcgtcgtgcaagcagctggagcagggattttatttccgttaattaccaacgttatctttacgttattcccgcctgaccgacgcggttttgcgatggggatttttggtgtagcgatgaacttcgcaccggcagtaggtccgacgctttctggtttaatagttgagcactactcatggcgcgttttattctttatgatgtttccaattgcacttattaacgtaattgcggcgattattttagtgaaaaacgtgacagaaacaagccgcccgaagctagacgtgcttggcgttattttatcaacaattggatttggcggcttgctgtatgcgttcgctacgggcggtacaaagggatggaccagcaccgaagtgttagccatgttcattgtaggcggtatttcaattctgttctttattttccgtcagttaaaaatcgatcagccgcttcttgaattccgtattttccgttaccgtatgttcactttaacaacaatcattaacgtgattgtgacaatggcaatgttttcaggtatgattttaatgccgatttatatgcaaaacgtacgcggtttttcaccgtttctttcaggcttgctgttactgccagggggaattgtaatggggattatgtctccgattacaggacgtctgtttgataagtttggcgcaaggtggcttgctgttattggtttagcgattaccgttgtgacaacatatgaactaacaaaacttgaaacgacaacaacatttatgtatgtgatgattgtctatactgttcgtatgtttggtatgtcgctgctcatgatgccaatctttacagcaggattaaatgaacttgcgcttagcttaaataaatacggcacggcgatggttaatacgcttcggatggttgctggagcggtaggaatggcgttttttgtctccattatgatgaatcaaggtgaaaaacacgtgaaaaacatcgtaatgaatcagcaaattttgccgacagataaaggcagtatggctgtagccgtgaatcaaggtacggcaatgggcattaacgatgcgtttatgatcgcaacgattttaagtgtgatcgcgtttgttttagccttctttattcgcaaaacatcaccaaaagaagataccattacgaatcgtgtaaaaaaagcaagttaataaaaaatccgtaccttttggtacggatttttttacgagttaaacttgtcttttttatagtcaatataaagcgatccgtctgactgaacttcagcataaaacacttcatcaattgatttgactccagctttttcgatctgcttatgaagccaattgttatctacatgcaggtccttcaacgcatcttcattcgcttttccgtcgtaaataacgccggttgaagtgggaaataaaagcatttttgaccacgagttcggctttttatcttgtttttgcataacggaaaggtttccgttgatttctaatatggcgtactcgacatcttttatggaaaatacgttttgctgcctcagcatgcctaaaagagattcaatatctagccgtacttgttttaatgccttttccattacttttccttgcttaatcacaattttaggttcaccggtaataagatgccgtgcttttttcgatttcattccaagatagcccatagcgatcgttaaaaatgtccatcctagcagtgaataaacccctttatcaatctctactcgctcatcagtggagagggaagaagcgatattaccaatcgtaattgccgtaataaatgtaaatacatttaactggctgatttctgtttttcccatgagccgcgttaaaagaagcagcacaaaaaatgaacaggcgattcgaaacgtcgattcagcatagcccatacatttcacccttccttcagttcattgttttatgttgtgaaaaaatagaaattttatgcagttgaaaagataaattccatgcttctttcccactcgcttttgcttttgcgctacaataaagaagcagcgtgtttgactagacaaaagaaggtgaaaaaatgaaaccatttaaagcttcagcattattagacgttatcagcgaattgttctctgatgaagcgtcgattgccgtttcagatctagagacgtacgtgtattaccgggcaagcaaacgaattaatttaaaaatcagccctggagatcaaatcaaaaaaggaacgattacatataaagcattagaacgaaagcaaaaagtatcggaatttattcaccgagacgtgtttggcacgccttactacggcatggccgtgcctttcttagatgaaggagaggttcaagggtgcgtgacggcgatttttcctgcgttaacgagcggaaagtcagttgtgacgttaaaggtgaacgagggatggataccggttcctttctcaaaaattatctacgtggaagcgcgtgaccgaaaaacatatgtgtacgcacagaagtatacgggtacgcataaatacacgttaaatgaatttgattatgtgcttccaaaagaagagtttgtgcgctgtcatcgttcctttatcgtcaatgtgacgcaaattcaagaaatttatcctgatacacattcaacttttttattagtaatgagcaacggagaaaaaatttccgtcagtcagtcgtacgccagctattttcgaaaactgcttgggttttaaccgtcattgtgcttaattatcatcaaatatgctgttttatcgctatttttgtccatttcattccaaaaactcttgtgaacgctctctttacagtaaaatggtaaaaaagagcaaaaacaaggagtgaacagaatgaaaaacgtttgcagtcgaattaagcatgaagcactacagaatcgcgttgtctctgctgaagaagcagcgtcttggattcaagatggaatgactcttggtctaagcggttttacacgcgcgggagatgtcaaagctgtaccgtttgcgctagcgaaacgagcggaaacagaaccgataaaagtaagcgtgtataccggtgcttcacttgggtcagatgtggataagctatttgcagaaaaaggcatgttaaacaagcgtctgccgtttcaagctgatccgacgatgcgtaaaaaaattaatgaaggtgaatttcagtttattgaccagcatttatcgcatacttctgaatgggtgcgttcaggcgtgttagattcaatagatttcgctattttggaagcggtttctatcacagaggacggaatgatgattccaacaacgtcaattggcaattcaatggtgtttgccgagcatgcaaaatcgattattattgaaattaacacagcgcagccagagctgttagaaggtattcacgacctgtatgatccgggcgttcaaggacagcgagatgcaattcctttgaaaaaatctgatgaccggattggttcgttaggcataccaattgatttagataaagtaaagggcattgtgtttacaaatcagctagattcaccgtctacgattgtagcacctgacgaagaaacggttgtgatggctcaaaatttgatttcatttttacgcgaagaaattaaagaagggcgattaactgaatcgcttgctcctttacaatctggaattggatctgtggcaaatgccgttttccacggtttgttagattcagagtttcatgatttagaagtgtattctgaagtattgcaagacgccgtgtttgatttgtttgacgcaggaaaagttacgtttgcttcctgctgctcaattacgctttcagcggataaaatggaacaagttttctctaattttgaagcctatcgagataaactgattcttcgtccgcaggaaatttcaaaccatccagaggtcattcgtcgcttaggactgatttcaattaatactgcgctagaactagacatttacggaaacgttaattcaacgcatgtgatgggaacaaaaatgatgaacggaatcggaggttcaggggattttgcccgaaatgcgcgccttggtatttttgtaacaaaatcaattgccaaaaacggcgatatttcaagcatagttccgtttgtttcacacgttgatcatacggaacacgatgtggatgtgattgtaacagagcaaggatacgcagacttgcgcggactcgctccaagagaacgggcaaaatgcatcattgaaaattgtgcccactcaatgtaccgcgaccagcttatggcgtattacgaagaagcgctcacgcgaggcggacaaacaccgcacgttcttgaaaaagccttttcttttcatacgtcttatcaaaaaaatggaacgatgcgagaaatcgcagcgcaaacaaattaaaaaaacgccttgtctcatcaagagacaaggcgtttttctgctgagtaagaaacttgtgtttgttatctctttgaattacgatgaaagggaatacataaagaaaacgaggtaacttatatatgaaagcattagtatttgaaaagtttggaggacctgacgttcttcactatcaagatataccgaacccctctattggaccaacagacgtactagtaagaacaaaagcaattggacttaactttgctgatgtgtaccgaagaaaagggaactaccacttaacgggtacacctccgtatattttaggatatgaaggagcaggtgtggtagaagaagtaggagcagaagtaagtcacgttaacgtaggagaccgtattgcttttgctgacgtcccttttgcaaatgcagagcttgttgccgtgccacaagataaaatcattgccgtacctgacgatatttcgtttgatgcagctgcttctgtgcttttacaagggttaacggcgcactatttaacacaagacagctacagcattcagcctggcgattatgtacttgttcacgcagctgctggaggcgtagggcagcttttagttcaaattgccaagctattaggcggacaagtcattggcttaacatcatcttctgaaaaagcaaaagcagcggctcaagcaggcgctgactatatctttttatatgaggataactgggtggaacaagtgaaagaagtaacgaagcgaggcgcagatgttgcctacgaatctgtaggggttacgctagaaaaaagctttgaagccgtaaaaacaggcggaaccgtggtattttacggaatggcaggaggcgatccagccccggtcgacccgcgtatgctgatggatacctctaaaacgcttacaggcggagacttgtggaacgtgcttgtatcttatgaagaacgtaaagcacgttcacagcagctgtttgagtggatcagtaaaggtcagcttgtgctaactgatcccgtggtgtttgatttaaaagacggagcaaaagcacatgagctgcttgaaagccggaaaagtacagggaaaattttgttaagaccgtaaaagaaaggccctttagtcaagggcttttttctgttagtaaaggagaaactaaggagctgtctaatatatatagtagataagtagagtgaaagaggtgaaggtagatgaaacatgcattgattacagcgggtcataaaggtattggcaagaaggtaacagaacggtttttaaacaagcagtattccgttaccgtccattttcgaagtgataaaaataaagtgcgagaactgcaagaagaatggcatcaatataaagacaacgtacagtttgtagaaggagatataacgaataaagcagatattgaacatgtcgttgcgcaggctatggagcaatttggacgtattgatgttttaattaataatgcaggtccgtatgtatttgaaagaaaaaaattaatagagtacacagacagtgaatggtatgaaatgctggaagggaatttaagctccgtttttcattttgtaaaagctgttgttcctattatgaaaaaacagcagtttggaaggattattacatacggttttcaagatgtagagcatacccctggatggatgtaccgtgcggcttttagtgccgctaagtcagggctagcttctctgaccaaatcgcttgctctagaagtagccgaatacgggattacggccaatatggtctgtcccggagatattgtaggagacatgaaagaaaatgatatcataaaagcaagattgctagaagacaaggaaacgcctgtcggtcgatcaggtacgggagaagacattgcgcgcattattgagtttctttgtgatgaaaactcagatatgattacaggcagcattatatctgcttcgggtggggtagacgttgttcataaaagcaaaaaacaagcccctggcagataatgcaggggcttgtacgttacagcagcgattctccgccgtcaataaacatttcacttccggtaatatgtttagacgcgtcagaagctaaaaagaagattaaatctgctacttcttcgggcttagccgagcgtttagcaagcggctgattgccatttggatattcaattggaatcgcgacttcttttaatttgtcttcttgacggaatgtattgctttcaatatttgtatcaactgctcctggacaaatgacgtttacccgtattccgtatgtagaaagttcaagagctgccattttgccgaaggccatttggccagcctttgaggaactgtatgcgctcatgccgatatttgaaaatgtacggttgccgttaatcgagctagtaataataatgcttcctccctgagctttcaaataaggaatagaatgcttcacggttaaaaaagtacttgttaaatttgtatcaattgtttttgtccaatcttctggtgatagttcttcaatagaagagaacgtaccgttgatgcctgcgttaatagaaacaatatgtaattgactccataagctgctgatagtttcgatactctcttttatactttcagagtcagatacgtctgttttaatggctatacactctccgccgctcgacatgatggtctcttttacttcttgcaatttttcttcctctaaatctaaaagagcaacgcgcgctccttgttcagctaatgtaatggctgaagcacgtccaattccagacgccgctcccgtcacaagcgcaactttcccagttaatgcaatcatttgtaacccctccatataaaaatgttgtttcctttctttagcctatacgaaggaaataaaaacctcttttaaaatatttgtgtttaaatttgctaaaagatgccaaaaggaaaagagaaaacagcggcgaattattaatatgacgccagaacatgaaaaagctaatgtcaaatgagcctacttgagtagctaaagatataccctgtcttttcagaagaatgtttatataaaattttacatcagagggacttgcaaatcgttccttgaaagcttacactagtaaagcacagaaaaaggacggtgttttatgaagaagaaagataatgtgattccattcccgcaaagaagggaagcggctgcttatgttcccgcttctattagcttagataaggatattgtggaatttttagaaattatgaattttgaagatcgcaatgattttttaaacgaaatgattgattcattttttaaatatgtaaaaggtgaagaagacgaagtaagataaaagataacgtaaagacatccaaagagatgttttttattttgtgaccaattgcttaaaaggcatgcttaagcctcgtatagttatttatggtatagtatacattagatactatctagcaggtgcaaatgcgaggagtgataagatgagtggatttaaaaaagacattcgtgccggatctgaagaaccacactcactagaacaattaaagcatgaaatggagcaaagcctgtggaatttgagaaaagatttgagaaatgaaaatcgctcagaaacggaaatggcaatgattaaaatttcgctgctctcactatttgaggaacaggcaaataaattgagtgaaactgagctttctgactaccttgccgattaccacaaaagagtcgagcagttattcgacaggtatagctataaataagacaagcatccttgcggggatgcttgtttttatttgagcaaaattcgcttgtattcattacgcttcagaggtttggacacatacccgtcggcttctagctgataaataatggtggcagctgcatacacgctaaaggcatgatcaagaccaaagtagtcttgcaaagcggcgacgctcacttcctcttgaaagattttactgcgattcgataagacaataggatagacgtttttaacgatttgctttgaaatttcgagtgttaacatattaaatccctcccgtgtgagtgtacataactaaaggtattcagcacgatgtacattcatgaaaaagggagcgattacaattttaaaagataaagaaaagaggagtaaatgcccataaaatcaaatgttttatctctttgtggggtgtgtttgaaaaacgcagtatttttagtgtatgacaaacattttcaaaagttctatggaattattaggagcaatttaactaaatccacatatcttaaagtatagcaaatggaggtgaaacacatgggatactacggaggttacggatacggttgtggttatggcggcggtggctgcggcggcggtttcgctttaatcattgtacttttcatcttattaatcatcatcggcgcttcttgcttcggcggcggctggtgctaattattaaaaaatgatgacgacgcaacatccacgctttatttcttcaactatttcttccacaaaaggtctcttcgggatgaagagacttttttagtttattatttataataacgtgtacaaactgcacgttaaaaaggttttatgcgtggtcctacataaaaaaaagactctgaaatcagagtctttttctacttatgctttttgaacgttagcagcttgaggtccgcgttgaccttcttcaacgtcgaatgttacagcttgaccttcgtctaaagatttgaatccttcgctttggattgctgagaaatgtacgaatacatcgtcgccgttttcgcgctcgataaatccgaaacctttttctgcgttaaaccattttactgtacctttttccatgaatgttgcctcctcgtgtgctatgcacacattgtattactatccttgctcatgatcaaaatctttaagacgaaagtattcacctatcgattgttgccgaacaaaaataattcttcttatagaataacaaaagttaatgataattgcaaggaatggagaaattttaacgaagacggtcattcatttaatgaaagaaaacgaaaattatacgagtgaaaataagtaagaaagagcgtatcaggtcacactatctctatatataagaagaaaggggtcagtcatatgtttaaacaaaaagcaggggaaaaactgattgaactgttaattgaatggggcgttgatcatatttacggcatgccaggagactccattaattcaattattgaaccgcttcgcaaagcccaggacaaaattaaatttattcaagtgaggcatgaagaagcaggagctctcgcagcggctgcatatgcaaagctaacgggtaaaatcggtgtatgcacggctattgccggaccgggagcgattcatttactgaatggtttgtatgatgcaaagttagacaaagctcccgttttagcacttacgggacaagtggagtctgatcttatcggaagcgatgcgtttcaagaaattaatttagagcgaatgttcgatgacgtggctgtatataaccagcgaatcatgtccgctgaacagcttcccactgttgtcaatcaagcgattcgaacagcttatgctaaaaaaggtgtggctgtgttaaccattcccgatgatatccctcgttttgaagtcggatcagaagcacgggaaacatcaagcataatcgttaaacaagacgtctttcctcacagagaagaccttgaaaaagcaaaggatttgattggtaaagcagaaagtccggttattttagccggtcgaggcacacatgaaatgagagaagaactgcttgcgtttgcagaaaaaatcgcagcacctattgttcttacgcttcctggaaaaggcgcaataccggatgaacatccatattgtctcggaggacttggattaatcgggacaaagccagcgtatgaagcgatgcaagaagcggatacgctcatcatgattggaacgtcctatccgtttacaggctttttgccagaccatgcgaaaacgattcatattgatattgatcctgcacaaattggcaaaaggtatcctgtagatgcagggcttgccggagaagcaaaaacaacaattcagtggttcttagaaaacgttggccgctcagagcatcgccagtttttagagcaaagtcaagaacgtatgaaaaagtggtggagtcagcttgatacccaagaagcaaaagaaagtctacctatcaagcctcagcgagtaattcgagcgcttcagcacgtagcaactgataacgcggtcttgtccgtagatgtaggaaacgtcacagtatggatggcgcgtcattttcgtatgacaaatcagcagtttgtgatttcaagctggctagcgactctcggatgcgggctgccgggcgcacttgctggaaaaattgcttatccggataagcaggtttttgcggtctgtggagacggcggctttgcgatgacgatggcagattttattacagctgttaaatacaatcttccgctagttgtggtgctatttaataaccataaaatcggtatgattaaatttgaacaagaagtaatgggaaatgctgaattcggcacagacttaacaaatccgaactttgctaggtatgcagatatttgcggaggtgttggctaccgagtagaaaaagaagaagagctgctgccggcttttgaaagtgctgttagacaaaacaagccgtgtattatcgatgtaatcgttgatgcaaacgaagcgcctatgccagctaagattacgctaggacaagcaacgggttatgccaagcatatggtgaaagaattgtttcaagaaggtaagctagatttacctcctctataaaaatgaggccgtgacaaaagtattttagtaaagatccgaacgatgaatcgagactcttaatagagaatcaacttcgtttggatttttttattgtgagggtgaatgtagtttaattaactataaatttattatgtaaacttaaataccagcaaatgaaaagtagtgatattatatttattttgtaaagtggatgagcaaaaaaataccgaattggatggtctttttttataaaactgctttaagataagagagataaaggataaactactaataagaaagtttaaatgtaaggactgacgccgcatgaactggagaccagatcgcgctagcaaaaaagcgatttataaacaaattgcagaatatattgaaagttgtatttcatcgggagcgtttccgccggattctatgctgccatcagaacgaacgcttgctgctgagctcaacgtgaacagaagcacagtagtagctgcttatgaagaactgcaggcacttggaatcgtagaacgtaaaaaaggaagcggcacgcgagttagttcgagcatctggggaatttcccgtaaacgtattccaaactgggggagatatgtagaagacggttcgtttttgcctaatttaccgctcgtacagcgaataagaagcgaagctttgcgaacagattttgtaaacttagccagcggagaattagctcccagcttatttccaagtgacgattttcagcgaatattagcgggcatgccgtttaatgagcatttaggctatgatcatcctcacggcaatgaacgtctgcgtgacgctattgctgctcatgttcatgaataccggaaaatctccaccgatgctaattccattttaatcacatcaggtgcacagcaagcacttcatttaattgtgcagtgtttgttaaaaccaggagatgcagtagcgattgaagatccgtcctatagttattcactgccgctttttcaatcagcaggtttacgaacgtttttgctgcctgtagataaaaatggagccaatccggacgacttagtagaattacataaaaagcatcgcattcgtatggtttttttaaatccgtattatcaaaacccgaccggtattgtgttatcagaagcgcgtcgaaagcggtttttagagctttcttcagaatacggcattccgcttattgaagatgatccttattcactcacggcatttgacggaaatgtacatcaaacgctgaaatcgatggacgagaacggaaatgtcctctatatcagctcgctttctaaaatcgtggcatcgggccttcgaattggctggatagtggggccagagcaagtgattcagcgcctggcagatgctaagcagcaaattgactttggccacagcatctttccgcagtggattgcttatcaattcttagattctcctacgttttcttctcatattgaaaagcttagacaagagctcaaaaagcaagagtatgccctgtcgtcgagtctgaacgaattgctcggatcaaaagtatctttcgattcgcctcaaggcgggattcacttatggtgcaaagtgaatcagccggtcgatgactatcgtctattggaagaatcgcttaaaagaggagtggcttttgtcccaggaagcgtgctgagttctcaaagcggagctattcgctttacgtttggcagaggggaagaagaggtcattcgagaaggaattaaacgatttgcgagcgctctagagagtctggaatagctataaacataggtaaacgtgccggatgaaagttttattttattatttcgtatagattgttatgatcttgtgctatactaagagtaccattaactttacttctgtatttgtaccgactggccctgttgaaaaacagggcttttttttatgtttgtacacaaaaaaacagatcctttaaaggatctgtttctgatatgttgtgtttcttatgctttttgaacgttagcagcttgaggtccgcgttgaccttgttctacgtcaaatgttacagcttgaccttcgtctaaagatttgaagccttcgctttggattgctgagaagtgtacgaatacatcgtctccaccttcgcgctcgatgaatccaaaacctttttctgcgttaaaccattttactttaccttgttccataattgttgcctcctcgtgcggactcgcacattgtggtactattcttgctcaaatctaaagacgaaaagtgacaatactcatacatccccaccgaacaaaaataattctcttacatcttagcagaaatttcctatgtttgcaagcgctttatttaaaaaccattcgtattttttagacaagtttttcataaatcatgtctaaaaaatgtcacattttgaacattatagaaaggctattctttgtattcgcttttactgtagttatataataatgaaaatatgctttttctaaagatagacgacacgtataagaaacgtacatactgagtgctgaaatggagtggtaaagatgaaggtgggtttaattggtttaggaaatatgggattaccgatggcggaaaatatgataaaggcgggtcatgaacttgtcatttataaccgcactgcttcaaaggcagaaagtcttgtgaaaaaaggagcaaaggttgtggagacacctgctcaagcagcacaagaagcgaatcttgtctttacgattctttcaaatgatgaggctttaaaagaagtaacgctttcagaaaccggtgtacttgcaggccttcaagaaggtggtattcacgtctctgtgagtactattagcgtagatttgtcggaaaaattaacaagcgcacatgctgcatcaggacagcattttgttgcagcgactgttttaggtcgccccgccgcagcagcagctgcggctctcaaagtaatagttgcaggtaataaagaagcaagagagcacgtttggccgctgtttgaagcgattggtcaaactattttcactgtaggagacgagccttacttatcaaatgtagctaagcttggcaataattttttattagtatcgatgttagaagctgtttctgaagcagtagtcatggtagaacagtatggcatgcaagcggaggagtttcttgaagtggttaatagcttatttgcatctcctgtgtataaaaattacggcaatttaattgctaaaagagactttgatccagccgggttcaagctggagcttggactaaaagatgtaaacctggctattgatgcagccaaaaaagtgtccgctccgcttccgttaggagagcttgtgaaaggtcattatgaacaaggaatcgaaaatggctggggtcacttagactggtccgctttactaaaaacagttgaagctctaaaaaaagataactaaaaagacgaaaaggagtgcagccagtgaaagcgaaaggaaagtgggtatggattgtatcctttatttcgattatttcgtgtctgctctttgcagcggggcttggaatgtctatttatgattatgttagcgcctcgaaagctactgtaaaagaaatgccaaagccaaagcaggaaacaagcagcagtaacaaaagtacaaagaattatacgattgtcgctttaggagattcattgacaagaggaacaggagatgcagcgggaaaaggatacgttgggtatttaaaagataatcttgaagaaaaaacgaagaagaaaattctcttaagtaactttggaataaaaggtcaaacgtcttcgcagctggcaagtcaagtaaagcagcagcaaattcagcggcagattaagtttgcagataccgtgctgatcaccattggaggaaatgacttatttcaaggcggacaaacgctgcaaaacttaaataaaaacaatattcaaaagctagaaaatgactatttaaaaaacgtagacagcatcttaaaaagcatccggtcggcaaataaagacgcgacaatttttttaattggtttatacaatccgtttagtaacctgcaagatgcaaaaacgacaacggctattgtacgagaatggaattacaaaagcagtgaattaagtgctaattataagcaaactgtttttgtaccgacctttgatttgtttcagctaaaggtagacgactacttatataccgataaatttcatccaaatgcaaaaggctataagctaatcgcagagcgtgtagcatcgctgattacgtggtaagggagggaatgatatgagtgaagtaacgctttcagtaaaaggactgaaaaaagtaataggaaaacgagaagttatcaaaaatattgattttgaattaaaaagaggcgaagtatttgggtttttaggaccaaatggagccggcaaaacgacaacgattcgaatgcttgtcggcttgattcgcccgacggctggttccatctctatttgtggatacagcgtatcgaagcagtttacaaaagcgatggagcatatcggctgtattgttgaaaaccctgagctgtatccatacttaagcggctgggaaaatctgcagcatttttcacgcatgattccttctatgacggaagaacgtattcacgaagttgtggagttagttggcttacaagagcgtatccacgatttagttcgcacgtattcgttaggtatgaggcagcgtttaggaattgcacaagcgcttctcggaaaaccaaaagtgcttattttagatgagccaacgaacggactcgatccatctgggattcgggatatgcgtaaatttattcgttttttagctgaaagtgaaggtctaagcgtcttagtatcgagtcatttgctgagcgagattcagctaatgtgtgaccgagtagcgattatcgcaaaaggagaagttattcacacagaatcggtgaagaccctgttaactcagcaagagcgcttactgtggaagctagatccgcagcctgcaggaatagatgtcttagaacaagtgacggactttgtgcaagtgcagggggagtatgtcacgacgttttatgaagaagctgaagtgggagagtggaacaaacagctcattcaagcaggagtaacggtaaaagaaatgaatcgaaagcttccaactcttgaagatttatttatcgaaatgacaggaggcgaatcgattgattagtttggttcaaaatgaaatgatcaagctcgttcgaaaaaagcgcctgttaatcgttacgcttatcatgggcgttttgatttccatgttcacctatgctcagcttcgcgaaacacagcgccttcaagaaaagctaggaacgaccgattggcgcagtacgctgcagcaagaaattatcgatacgcaaaaccggctgagcggaagccaaatttcagatgattggcgcaagcagcttgaaattcgcgtggcgcagcaacagtattatttagataatgatatcaatccttcggaaccaggggcaccaacgtttgtgcgagggttcattgaaaacgccatccagcttttgctgccgctgatgattatgattattgcagcggatttagtgtcttcagagtacagcttgggatccatcaaggtattgttgacgagacccgtgaaacgctggaaaatcctgcttagtaaatacatcacgctcgtcatgtccgtctcgtttttaattttaatgtttggcgttttgtcgtatctcatttctggcgttgtatttgggtttaaaggctggacagcccctattcttacggggtttagcgtgcagggaaatgacttaaatacagctgacgtccatttaatttcgcagtggagatatattttaatggagtttggtcttgcttggtttgtatcacttgttgttggaacgcttgcttttatgctgtctgttttaattaaaagtacagctgcgggtatgggtgtgatgcttgcttgtttgattgcaggtacaattttaagcagcatggtttcttcatggcattcggctaagtatttgtttatggttaatttaaatttaacttcttatctgcaaggcacagctcctccgactgaaggaatgaccttagggttttccttgggtgttttaaccatttggggacttgccgggctgctcgtgtcgtttctggtatttaccaaaaaagacgtgtactaattccatatgagttgacgataatcaggaacgtacgttatgattgtgttaacaaaaaatgctgttttgttcaaaggggagtagctcttgcagtaaagtcgtcatttcgagattgttatctccggctttattgacaatgcaaattgttagcgagacctttgccaatgttgccattggtaaaggtctggataaaaacacctttaccacatgtggtaaaggtgttttttgttatttcaaaatgagagaggagcttaaaaatgtcaaaactatcgagactgttaaaaagccccgctgtaaaaaaaggaataaaaaaagctgtacccattattatgaaagagttaaagaaacgaaaatcgaaaaaaagatagcagaaaagaaaataagaaaggttgagtgctaagtgaaaaagtggatgctagtgatatcaactgctgttctttttatggtcggcggctgttcttttcttgaagatacaagcagtacgttgaactacgcaaacgatgcaaaagattacgtgagtgaagcacaaaagtttgctgaagaaataccgcctctagcggaaaaagctgttaatgacgacgaggcattaaagaagctagagcaaaagctgcaggaaatgaaagggaaagctgaagaatttaataaaacaaaagctcctgacatcgcttctgatgtgcacgatcagcttgttcaacaaaatgaaaaaatcattagtggaattgaagcgtatgaagccaatataaaggatggcagcttcaatccagaagcgctaaaaaacagtgaattgtttcaatcaattcaagatgtatcaagtattatgaaacaaattaaagaattaggtcagtaagaaaacgcggctgagaaaaaagtatgttaactaaagaaaatccgaacgattaatcaagattcttgatggagaatcaacttcgttcggatttttttatttgtagggtgaacgaacgtaggttgcatgtgtataggtgatacaagtgatacaagcgattcacactagctctttgattccatttgtacgtctttggattgatgtagttatgttttatgatgtgattcaacctcgttttcttgttataaatgtaaattatataaatatatctatttgttagaagacaaaaacctcttctttcttttttatatctacgaaattttgttagaagctgtgacaaacttaatgtctgcttttcatatcctatgtatagtacatatatacacaccgcttgaaataaattttttttgaatgaaaagagagcgtgggaatgttgatttatgttgatttattaggtaataagactcatttaaaaggagggttgatccaattaataaaaactatagtcctttattttaaagagagaaactaaaaaaaatttttcggtttacaaaaagttaataaagcgcatacaaatagtttactaaaaaatcaaaaaatttacatcctttataaatcttttctgctatactatttttgaacagttgctagatttatagcgatgataacttacttgaaaggtgaatggtagatgaaaaagaatactcgcagtaaaacgaagaaaatcctatccacatcactggcactttctctattatcgatgcctcttttaactacacaggcaggagcggaagaacgtcatcctggacaaagctcacagcaaagcaagcatcaaggccataataaaaaagatgcgcttgtgaacatacgcctgatggaaacaaccgatgttcatacgaatctattaaactatgattatttcaaagacgccccttatgaaaaagtaggtttagctaaaaccgctaccttaatcaaaaatgctcgaaaagaagtaaaaaacagcttattagtagataacggagacctcattcaaggaacgcctctaggcacgtataaagccaagattaacccgctgaaaaaaggtgaagttcatcctgtatttaaagcaatgaatcagctggattacgatattgcaacacttggaaatcatgagttcaactatggattagacttcttaacagaagcgtacaacgatgcgaactttccttacataaatgccaatgtctacgttgatgatcatgacaacaacccgaaaaacgataaaaataaatttacgccttataaaattatgaataaaaaagtcgtcgatgaaaatggaaagaaacggacgattaaagttggtttcattggctttgtgccgcctcaaattaacgattgggataaagcaaatcttgatggaaaagtcattacaaaaggcattgtggaaacagccaataagtacattccagaaatgaagaaaaaaggcgcggacgtagttgtcgcgatggctcactctgggtttagcagcaacaagcaaaacacggaagatgtcatttactcattaagtgaagtaaaaggcattgatgctattacgttttcgcatacgcataaagtcttccctgctaaaacggaagctgcgctagacggtttgttccttggagcagataaaaagcctcttcctggcgtggataatgcaaaaggaacgatcaacggcgttccggctgttcaagcaggttacggcggaggatcacttggtttaattgacttaacgttaaaagaagaaaaaggaaaatggaaagtagtaagctctcaatcgtctacacgtgaaacgtataaagacgtaaaagatgcgtcagggaaaacggttacgcaaagtacggtagaaccggataaaggcgttgttaaagcagttcaaaaagatcacgatgcaacggttaaatatgtgaacaccccaattggtaaaacgacggatgatattcacagctatttttctcttgtgcaagatgatccatctattcaagtggtaacaaatgcacaaaaagattacgtagaaaaatacgtttctcaaaacaagccggaatataaagaccttccgattttatcagtgggagcaccttttaaagcaggaagaaacggcgttgatgaatatacggaaattaaaaaaggggatttaacgatccgaagcgctggcgacctgtatctatatgacaacacgttaaaagcggttaaagtaaaaggttctgttgtaaaagactggattgatatgtctgccggtaagtttaatcaaattacaccgaataaaacagaagagcaggaattattaaacccaagcttccctgtttataacttcgacgtaatcgatggcgttcaatatcaaattgacgtcacaaaaccagcaaaatacgatgtgaatggaaacgtgattcatgtagattcaagccgagttgttaacttaacgtataacggcaagccggttgatccgaatcaagagtttattgttgtgacaaataactaccgagctggcggaggcggaaacttccctggtctaaaaggaagcgagcttgtggtggattcagcggatgaaaaccgtcaaattctaatggactacatcaccgagcaaaaagaaattacgccgacagctgacgataactggtccattgcaccaattaacggaacggctaacgtgacgttcacaagctcaccgcgcggagaaagctatttaactgaaggaagcaacattacgtatacaaataaaacggatgacaaaggatttggcatttacaaaatcaatttaaacggcgaatcaaaagataatacgaagattcagttgttaggtatgaacgacctgcacggtcagctcgataccgatacaaaaatcaattcaaatggccaaacgctgttagctggaaatatgaagtatacagcggcggctattcgtaaacaagaagctgaaaatccgaatacgcttatagttcatgctggagatatgattggcggaagcccgttagtttcagcgctgtttcaagacgagccaacggttgaagtaatggaatcacttggatttgatgtaggtacgcttggaaatcatgagtttgatgaaggtattgccgagcttcaccgcatgattgaaggcggagatcatccaaaaggaacaaaaggatatgacggcatgaatttcccggttatagcggcaaatgcttatgatacttcaactaataaattaattacggaaccttacacgataaaagaagtaggcggtgaaaaaatcggcttcatcggcgttgtgacacaagaaacgccaagcatgattgttcgtaaaggaaatgaaaacttaaaaattacagacgaagcagcagcgattgataagtatacggaagagctgaaaaagcaaggtattaaagcaattgtagtattagctcataatccatctaatcaaaacggaacgcctactgaacttgatgcagcggatatcgctaaaaaagttgatgatgaagttgacgtgatcttttcagctcacaatcacgtatacaataacaaagtagtggataacaaactaattgttcaagcttactcatacggttcagcgttttctgatgtagatgttgaaatcgataatacgggtgacatcgtgaaaaaagatgcaaaaattgtgaccgtatatcaaaaagactatacgccagatcctgaagtttcaaagattatgcaaaaatatgaagacttagcggcacctattaaagcagaagtggttgggaagtcatctactgatttagcaaaaggctatccgtctagcgggccaacaggcgatatcgcgcttggaaacttaattgctgacggcatgaaagcagaaatgaacgctgattttgctttaatgaatggcggaggcgttcgttcacagcttgatgcaggtgacgtgacatacggtgatttgtttgcgattcagccgtttggcaacgtcttaaataaagtaaagctaagcggagcggatttagaaacggtactgaataaccaaattacctcatccggactcgactttcatattgcaggctttaactatacgtgggatggaagcacgagtaaagtagtcgatatcacgcttccagatggaagtaaaattgataaagaaaaagaatacacggtagtagtcaataactacatgtacggaaatgaaaaatatggtattggtgcactctcttcagatatggaagtgggaccagaagatttacaagcaacggtaaactatattaaaacacttaagagcccgtttgaatacaaagctgaaggccgtattcaaaatgtggcagctgctaaaacagctgaacagcaagaaccgactttaaaaatagctcaataagccaaaaaaggctgtctcataactcggatttccggtttagagacagcctttttttaatagtttaacttaaattttaaactctcagtcaatgaatttacgttataaaacatagcttaatttttgaaacaatcgccaaattgtggtattctctccataagaagacttacgtaaacgttaaaaatagtatcaaagatttcactattttttcatttatctacgctattatgtaaagttatatagaacctgtaaaagaacgtgttcgctatagtaaaggagtaaataaaagtggctattaatctacaaaaagggcagaaaattgatttaacaaaaggaagagaagggttatcttctattacggttggattaggatgggatcctgtaaaaaaacgcagtttttttggtttcggaggaagcggaccagagattgactgcgatgcgtctgttcttatgctcaattcgaacgataagcttgtaagtaactcagccgttgtgtattttgggaatcgtcatagtaactgtggaagcgtcaagcattcaggcgataatcttaccggagcaggtgaaggggacgatgaacaaatttttgttgatttaaaaaaggttcctggaaacgtacataaacttgtgtttgtagtcaacatctatcagtgtgttgagcgaaaccaagatttcggtatgattaaaaatgcgtttattcgtgttgtggacagcgctaaaaacgaagagcttgtacactttaatttatctgaagatcattcaggagcaacagctttatttgcaggtgaaatttatcgagacggaaaagagtggaagttttcagcaactggagatgcaacgagagatactggattggctgaaattgcaaacaaatatacaaaataaacaactagaaaagagggaataacatggctattaatctttcaaaaggacaaaaagtagatttaacaaaaacaaatccaggattaacaaacgtagtagtaggtcttgggtgggatgtaaataagtatgacggtggaaacgattttgatttagattcatctgtctttttattaaacggagcaggaaaatgcgcttcagaatctgattttattttttacaataatacgacgggtgcaaacggagcggttgagcataccggagataaccgtacaggcgtaggtgaaggagacgatgagcaggttcaagtagatttgaaaaacgtgcctcaatctattgaacgtattgcgtttaccattacaatccatgaaggggaagcacgcggtcaaaactttggccaagtaagcaacgcctacgttcgtattttaaatgcaacaaatgacgaagagttaattcgttatgatttaggtgaagacttctcgatcgaaacagcggtcgtggtaggcgagctgtatcgacacggtggagaatggaagtttaatgctattggcagcggctatcaaggcggcttagcggcacttgtaaacgactttggtttaaacgtctaatcattaaagtaagaaaatgtacggaggatgtttttatgtcaatttctttatcaaaaggtcagcgcattgacctaacgaaaaccaacccaggcttaacaaaagtaatagtaggtcttgggtgggatacaaataaatatgctgggtctcaggacttcgatttagatgcatgtgcatttttagccaataaatcaagccaagttgtaaatgacgaggagtttgttttttacaacaatttaaaaagtccaaacggagcggtggagcataccggtgacaaccgtacaggtgcaggagatggagacgatgagcaaatcgccgttgatttttctcttcttcctgaccacgttgaaaaaatcggaattagcgtcaccattcacgacgcagatgctcgaggacaaaactttggacaagtatccaacgcgtttgttcgtctcattgacgccgaaacaaatgaagaagtgcttcgttatgatttaggcgaagatttttcaatcgaaacagctgttgtggtgtgtgagctatacaagcacggaaacgactggaaatttaatgccattggcagcggtttttctggcggattggccgatctttgccgcaactacgggttatccgtataaaaaaggcatgcgataaatgaaaaagaaagggtgctttaacgagtaccctttctttttagcatgtatatgtctgaaaagaaaggagctgtaaggtgtgagtaaattaattgatcctcatatgattaatcttaacgagcaggatggaacttctcttttttctaaagatgtttctctgcgaggtgactttgtacaaaatgagcagcaaacttcctataaacaagtggcaggcagatatttaggcactcatcttgatgcggacgagtacgcagcttttctttatgaacttgcacattcatcaccatcaattattgtcttgcaagataagcttgataagtccatttctaatgatagattaaaagaagtacaaacgatccttaaaattaatcaagaagagcgcggcctttctgtcaatcggctgtttgcttttttggaaggaaaaaagctgatcgtgaagtcagaaaatcccgctatacatagaagagtacgtgaaaaatttattgaaacgttaacgtgttttaaagaacagcacgcagagggctttatggacgggcattttcaacgcgtattaatcgatttaataaagtggcagtggaatcatctaacaccttggctggtcgataaaacatttcctgagcacgcgcctcgcatcatgtggtacggagatgcaaataaaagcgagcagtattttctctattatttaattttactaggttttgatgtccttacctttcatccagaaggaaaggataatttaaaagaagtagataagaatcagcatttaacaacggtttatacgtttccttctactagctcgcttgtaccttttccaacggataaaccggttcgaaaaggtacggtagcatttaaagcgtctcaagaaattgagcaagtgcttcattcagaggagtccatgctgtataaaccgtggcaatttcgttcgtattttccaacttcagttactcttaaaacgacgtatgatgagatctttttattaatgagagaacgggcgtttattcgtcctaattttcaagtgtcaaagccatatgtacacgtgccggtcttgttttcaaaagtacttggtatctctaaaaaccgaaaagagtactggagtaaagtgcatgagctcatgcaaacggaaaatgagttagctctgacgattgattctgttccttttgctaaaaaaatagaaggaaataatcactttcactatcaaggagctctcggaagtgatggcacgctcagtcctgataaaatgattgaaagcaactggtggcgctataaagagctgcctatcgggcttcagaaagggctagctgcagctatttctaggtactgtgcacattcaaagcttcttcggttagatcatgaagatgagtatcagcatcaaatgtacttgtttaatcagtctttggagcttccaaacaacgtgcttcgcatgcttcaaaaatttgattatacgcagcatgtaccccgtctcattatttatcatggaactgaacgagaagcgtttacgcgtgaagatgcagctttactgcttctattaaatgaattcggcgttgatattgttctctttaatccgacgggtcaactggatatagaagcgttcgtcgaagaaaagtatttcgatatgcactggctagaagatattagctttactgaagaattcaaagagccgtcgctcattcaaaaatggttaaaacgaatcttttaaagaaagaagggtttttaaatggcaacaaatgaattacagcctttagatgtaaacgaagccgaagaagttttagaaacaaagcctaacgaagtaaaagcaaaactgcgagaagagccagaagtacgtcgcttggcagaacaaattgattataaaaatcagctggctttacttgaatacgggaaagaaacagctaatgaaatttcctcgttttccggaaaagtgcttagtacaattaaatcgtctagcatggaagaatcaagtcaattattaaagcagcttggaaagattatggataaatttgatgcaaaggattttgttgaagataaagggtttttctctaagctttttaaacgcggtcaaaaaatagtggataagctgtttcaaaaatatgaaacaatgggctctgaaattgataaagtatatgtagagattgcaaaatatgaaactgaaatgaagcactcaaccacaacgcttgaacagctttacgagcaaaactatcagtattatatggagcttgaaaaatacattgtagcgggcgaagtgaaagtagaagagttaaaacaagagctaaaggtgcttgaagaaagagcgtcgagtggaaatcagctggcagcaatggagcttcaaaccttaaaaaacgcggttgagctgatggagcagcgattatatgatctagaaatggcaaaacaagtatcttatcaatccgctcctcaaattcgcatgctgcagcgaggaaatacaaagctaatcggaaaaatcaattctgcgtttattacaacgattcctatttttaaaaatggacttattaatgccattgcagcgaagcgtcaaaatttagtagccgagtcgatgaacgaactagacaaacgtacaaatgaactgctcattcgaaatgcagaaaatatttcacagcaaagcgttaaaatcgccaaaatgtccggtgcccctagcgtaaaagtagaaacgatggagcaaacgtggaatattattatgaaaggaatgcaggaaacaaaagcaattgaagaggaaaataaacgccttcgtgaagaaggacttgttcgcttggagcaatttcaagaaaacttcaaggcgcttgaacataagatgtaacgaaaaagcgggaatctttacgattcccgctttttttacatatacgtttgctagaagtctgaaccataagcgattagtgaaaagcgtgaaagggtatcggatataaaagaagtattatccaaaataagatagttatttccagaaggcgtttgtgtacttttataatttaagttaaaaacgtaaaaaacttaattattttaagtctttttgctggtttttaacttttctttgcgctacaattagctcatatcaaagtgaaaaaggagggtattcgggtgtatcaagagcagcgcatgagtgggattattgaataccttcacacacaccgcacaattacattagacgaaatttgcgatatgttcaccgtttcaaaagatacggcgagacgcgatttagtcaagcttgaagaaaacggcgaggttatgagagttaaaggcggagcgacgctatcgtcaagtcatattattgattacagtgaacggacgcctaccaaagcgaaagaacaaattgctaaagaagcagcttcgttaatgtcggaggggtatgacgtgcttttagatacgtcttctaccatcgcactgatggcgaagtatatggatgtaaagcatgtaaccgttattacaaattccattgataatgtggatttgctcgatcaatatacagcgtgtgatacgtttttgctgccgggcaagtttaacgggaaaaaccgtaacgtcaccgggccaagaacgatttctacgttgcaggaatacaaagtagatcagctgtttttaggtacgtgcggcgttggtgcagatggtattacatctccaagtgaagaagaagcgtttttaaaaagacagatgattcaatgtgcaagacaagtgattatgcttgcggatcatacgaagtttgaacgtgaatttttacatcgagtatgtgatatgagtgacattgatatcttaattacaaataaagacccaaaagcggatgtaaaagaaaaaatagaacaaaatcaagtgcagcttatcgtaacagattttgataaaggagaggaaacacaatgaagaaaataaaagtaggattagtaggatacggattttcagcaacggtctttcacacgccgcttttaagcgtgttagacgaatttcatatttcaaaagtaatgagttcaaatcctgaaaaggtaaagagtgacttagaggatgttgaagtagtgagcactttatctgaacttctagaagatgacagcattgatttagttattattacaacgcctagcggcatgcattatggaatggtgaaagacgcacttcgcgcaggcaagcatgtaattgttgaaaagccgatggtcgtatcggaaaaagaagcaaatgaattaattcaattagcaaaagaacaagatgttcaactaagcgtctatcataaccgcagatgggataatgattatttgacggtgaaacagctgattgaagaagggaaattaggcgacgttaaaatgtatgaagctcattttgatcgctatcgtccagctgttcgagaccgctggagagaaaatgaaggacccggttcaggagcgctttacgatttaggatctcatttaattgaccaagctttacatctttttggaatgcctgactttgttcaagctgatgtgtttgggcagcgagatcatgcacgcacggatgattacttccacgtagtgcttggatacggttctcttcgcgttattttgcattcaagcgctattgtgccaagcaccgggccgcgctttcaaattcacggaacaaaagcaagctatattaaatacgggattgacggccaggaggatatgctaagagccggcaagaagcctgcggatgatacgtggggagccgacagccctgaacactacggtaagctgacaactggcgaaggagaaacggaagaaattgaaacgctgcacggttcttacgtaatgtattatcaaaaaatcgccgacagcctgcttcgaggagaaaaacttccggtttcagcagaagaagctcgtggcgtggttaaagtcattgaagcggcatttgaaagcagcaaagaaaaacgagcggtttattttaactaaggagcgagaaacagtgagtaatcattcagtagagacgctgcttgaaaaagtagttcagcaggaaaaagaactaatctttcatcaatttacaaatgaccaggctttacagatcggaacggccattattaatgaagcaaaaagcaagggtaaggcagtaaccgtaagtattaaacgaaatggtcaaactctctttcaacatgcgatggaaggggccattcccgaccacgaagaatggattaaacgaaaatcaaacactgttcttcgccaccatcacagctcgtattatatgaagctgtactgcgagttaaaagatcgttcttacgcgcagttttatgcagcgaatcctcaggaattcgaagcggtaggcgggtcatttccgatttcggttaaaaacgttggcgtaattggaagcatcaccgtatcaggcatgtcacaagaagaagatcatgcactggtgaccgatatgattcgtagctttttgcaataaaaataagcggacttcgttggaagtccgcttatttaattaaaagatgagtggcgataaggcgtgtgttttttctacataaataaaagcatcatatcgttttgacaagcgagaaggaacataatttccgtattgttcaatctctgggtcgtatacaacaccaatggcgcggtggcctatcgttgaatgaaaaaatgttcggttttcctctgtgaacatgagatattgatcaaaagcacctgctcggtgaatggtatcttcccagctttcttccatagctggaggaacggttaattcctgctgcggattaccccagctatcagaagcaatgaccgtgccgtgatgagtcccgaatccgacggcgtaaacatgctcctgtccgtattcttcacgggtaagctgacctacattcaccatgccgctgcttttcatgtccgttgctcttgcatctccgatgtgagtgttatgctcccatacaatgcctttagcgctatctttgtagtaagattgaatatattttaaagcttctaccatatgacgatcgcgaatattccacgattcattgtcgttggtaatcatcttatgataataagcttcagcattgcttgctaccagcgcatttacctgcatactaagcgtagcctcaggctcatgagtataggtatctttcttttgctgaatggtttgtaaaagctctaagatttctaccatgcagttttttccgtaaagagcagaagaaattccgtacatctgtgcttcgcgatgaaaaggttcaaagcattcaaaggcttttttcgctttctttgcatcagaagcgtggttgttttctaagtactcaataatagcttccatcgattcccacaggctgtatacatctaagccgtaaaaacctacttttggctgatgtgctggcaagttgttgttataatcacgaagccattcaatcaattcttttatttcttgattggcccacatccatgaaggccagcggctaaaagattttaagacatcttcggcattcgcgtatcgagttgtatatcctttaatatagcgattaacttcaaaacacgaaggccagtctccttccactgctataaaggaaaaatcatgatgttgaattaattctttcgtaatagctgctcgaatttcgtaaaattcagatgtgccgtgagatgcttctccgagaagtacgtattgagcgcggcttgctgtgttaataagcggcagtaagtcatcgacatcagcaaaaggcatagaatgttttttaatggcttctatcatttgaatggtttttagcatacgaccaccttattattaagaaatggatagcaagagcttgagacagcaagtcttgctaccagttaacgggtttttatttttatgaattacctgctgaagtgcttaatagcagaatcatttaaagaaaaatcttctttagtaagcgccgtttgattctgtgtttcacattgtttagcaggatgttcttcttttttagaaacagcagaaacttcttcggtattgttatatcgattgtttattgacattgcttttcacctcttatatctagtgtttgaggtacagaaaataaaataagaagaaatattaggaataccttgaaaagaaaagtatacgctttaaattatttgaactcatgcaagaaattgtctacactaaacactgatacataaatcgagtgaggagaacgtgaagagtttatgaagttgatttcgtggaacgtaaatggcattcgcgcgtgtgtgcgaaaaggatttttagattattttcaagaagtgaatgcggatgtattttgtattcaagagacgaagctgcaggaaggacaaattgatttgcagctagaaggatattatcagtactggaattacgccgtgaaaaaaggctattctggcacggctgtttttacaaagcagaagcctttatccgtttcatacggtgtggataaagaatcggaagacgaaggacgtatcattacgctcgagtttgaacaatgctatgtagtaaatgtgtatacgccaaattctaaaagagatttagcgaggcttgaagaaaggcttcaatgggaagatgatctgctcgtgtacttgaacaaattaaatagccgtaaagcagtggttttatgcggagacttaaacgtagcacacgcagagattgatttgcataatccaaagccaaaccgaggtaattctggttttaccatagaagagcgaggaaaaatgacgacgcttcttgctagcggatttcttgatacattccgctatttataccccaatcaagaaggagcatatacgtggtggtcgtatatgaataaagtgcgagaacgaaatatcgggtggcgcattgattattttatcgtatcagagagaattagagacgttattcaagaagctgctattcatccgcatgtaatgggaagcgaccactgtcctgtgatgctagaattaaatgtacctcatctatgatttctttctatataatagaagaaaaacggaaaaaaggttggttcacgcgaacggttgcggtatagtaaacatagcaaaaagtacagaatgttctatgagataaaggggagatagaagtgaagcgagactcgctgcaaaccattgagcacgaaattgcgctgcttgttcgtctaacaacgacgcacagtcctaagcttggaagcttggaccgttctgaatatttactgttaagcgagctagatcagcgcagtccgctcgggattaatgcattagctgaaaatttaaagctgagcttatctacagctagccggcaagtatctgcgcttgaaaccaaacagtttgttcgccgctttccgagtccagaaaatgggcggattagtttaattgaaatgacggattcaggaaaagatattttgcagcatgtacaaaacaagcgtaaacaagcctatgctgaagtattggaagactggtcggaagaagagattttagcactggaaaaaagcttatcccgcttgaatcacgattttaaaaaatggcgcagtaatggatgttaaagcgaatacatatagatgaacaaaaaggctattgaaaaatagtctttttaagttgaaacaaagaagttgatttcttcattaaaagatgtataatatgtagtgctgctataacttgcatgatacaacttgtacaataaaatatgtaaggaattgttagtcatatgaaaagaatttaataaaaggaggaataaatatgagtcagaataatccagcagtagcctccgacaaacaaggtttaagcgtacctaaatacttaattatggcgattttaacgctattttcaattggccctcagtattttttgaatttatcttacacggtcaatcaagtattgattcaaaatcgatttgatgcgagtacacaaagcttactattgccatctattatttctaacttggcatttggactcggagtacccattggtccgatgctcacgaaaaagtatggcgtgcgtaaagcatacttaacgttcgttttagtctttttagcaggttcgattatcaacgttttttccgaaaacgttgcgtttttatcccttggtcgtctgattcaaggcttaagttcaggaatgctgtttttaaccattattccagctgcgctgatctcgtttccgaataaaatccgaaacttctttttagtgttagcgatcggcggactgttcggttcaacggcgattggagcctttttaggtgctgtatctcttagcatggataattggcgctgggtttttgttttaggaataatagcttctcttgtctgtctgtttattgggtataaggtattgcctgctcacgatccgagtcagcaagaagagcgtccagtagataagaaaagtatctttattcttagtcttattatgattttattagtgtatccactgtatgaactaagatacgaaggattcgcttctattcaagtgtggccgttcttattggctgcagcaggattagttgtcatttttgtcttagtggatttagcggctgaaaatccgttagtaccattaaaatcgctgctagccgtaaaaccagttgcgggtacaattatggcaattggcggtcatatggcatacatcttagcaatcgcaggcattaatggcgtgatgcaaaatgtgcaaaatgcatcgtacaccacgctttcttatttttatttgtacttctttattggggtactgatttcagcatttgcgacgacattcttgtatgacaaatttggtccaggttaccttggagcgattggatcacttctcattgtcattgtaggatttagctgggtgaacgtatcagccgatacatcactagtgagcttgtatgttcacattatgctctttggtatgggtgttagtatggcactggtatccggtgcactaggagcggcattggccggagatttacatcaagcttcgatgcgttccatttcactgcactccattcgaaatttattaggagccattgtagcacctgtaattggatggtttgttgttcgacaaaacgcaatttattatgaagattttcgaggtcaaattagctcagtggatcctcaggtgaagctgcagctgtctgaaatgatcaaacgctatatgggtatgggaatgagccaagcggacgcaaaaacatcggctgtgacggctgttgtagcaggcgctaaaaaagcgtcgattttacatgcgtatcacaacttatttttcatgcttggtattttaggcgtaatcatgctcattgcttcactaagtaaagcgtggagcggtcaaaatagaattcttgttcaaaaagaagaggtgcaagaaaaagctgagccgcaagaagaaagaaaaatgctgccggcgcctcaaacagaagaaacatctgtataatatactaactatagaaagaaggaattccgatgagtaaaagtcgtttattggttactaacattgttggaatcattgtgattttattactagtaggttttggtggatattatttctacgaaaaagcaaattatgttaaaaccgatgaagcgcaggtagaagcaccgctttcacaagttattgcttcagctaacggtcagttaagcgaatggaacgtaaaagaaggagatagcgtttctcaaggtgactctgttggaagcttaaaagaaggcgacaaatcaacagacgtaacgtctatgattgacggaacaatcattaaaaacaacgcttctcaaaatcaattagtaaaagctggcgatgtattagcacaaacagctgatttatctaaaatttatatcaatgcaaacattaaagaaacagacctaggtgatatcgaagaaggagacagcgttgatattacagtggacggagactcaggtaaagtctttaaaggccatgttgaagcaatcggccgcgcaacaaattcagtgtcttctatgcttccggctcaaaacacaggaaactacacaaaagtaacgcaaaaagtaccggtgaaaatttcaattgatgatgcatcagataaagttcttccaggtatgaacgcagaagtgaaaatttcaatttaataacggaaaaaaagctgcttcctttaagggagcggctttttttatgcctaaacaaataaaataaaaaatgtgctaaaaaggggatgtatacaaaggaaatgtgtggtaagatacttcttgtttgaaattggatatcggtaaagaaggtgatgggatgaccgcggtcgaaacaaaaaaagggccaaaagaaaagctgaatttatttttcttaacgtggccgatctttttagaagtgtttctttttatgttaatggggattgctgatacctttatgttaagtgcgctgtcggatgatgccgtatcgggagtcggagcagccaatcaataccttcacattgcgattttggtgttagaggtcattggcaacggggcggcaattgttgtctctcagtatttaggatcaaaacggtatatggaagcgtcaaagatttctgctttggccgttacgttaaatttaggagtcgggctagtcattagcgcgggttttcttttgttttcaagacatatgatggaagcgatgaacttacaaggtgacgtgctgatgtatgcacaaagctatttatccatcgtcggaggagctatttttcttcaagcgattattaactctcttgcagcgattattcgcgtacatggctttacgaagcaggcaatgtttgtttcacttggaatgaacatttttcatattgcaggaaactatgctttaatcttcgggaagttcggctttccggaaatgggcgtgcaaggagcagcgatttcatctgcgttcagccgattcgttgcccttattgtgttcttttggctgctgtatcaagtgatggaatatagaatgaaatttcaatactacattacgctttcaaaagaatatatcggtaaaattttaaaaatcggtattccgtcggcttttgaacaagtgatgtatcaaggctgtcaaattgtctttttatactatgcaacctacctaggagcagaatcactggctgctagacagtacgcgatgaatatttcgatgtttatttacttatttgctattgcgattggaatgggcacagcaattattgttggccgtttagtaggcggaaacgaaaaagatgaggcctaccatcgcgtatggaaaagcgtcaaatgggccagtgccgtaacgatgatgatggttgttcttgtgatgacattcagaacacagctgatcagcgtgtttacagacaacccgcatatcattgagcttggcgcaacggtgctgctgctgagcatcgtgcttgaaacgggaagaacgatgaacattgtgctgatcaactcgctgcgggcagcgggtgatgccaaatatccggtgttaattggtgcgatgtcgatggtcatgatgagcttgccgcttggctatttctttgtttttcatttagacatggggctcgctggcatttggcttgccattgcagccgatgaatggacgcgcgcagttattatgtttttccgctggaaaagccgggcgtgggaaaactacggacttatacagcacgaacaaacagctgaagaaccaacgccggttcaagtataaaacaaaacctctgcagaatgtgcagaggttttttgctgtgtaaaaaaacgaagtgaagttggtctttttacgcaaaaagccttaatttatgggagaaaacgggtatgggtacaaaggaatggttttattctacttattctttgttttagataatggtatattgttggataacgtatttagacatgagtcttttttctctgatttttcatttttatttcaattcatgaaactagaagcataaaaaagagagttttttcctatttagctataatgagacaaattttatacttataattattggattaaactcgaaatgtgcggaacaggaggaacgatatggggttaggaagcgtattagacggactgctgggtgaagtatctggaagagtctcagatgtagaaggaaagatctctaagctaagaacagctaaaagtaaaattgagcatgaacaagctgtttcattaaaagaaatcgaacacatcaaaaagcctgagctgggagacaaatggacgggtacattatcggatgattttgacgaaaaacgtacggcagcctacgacaacataaaaggcattttagacggtgattacgatggatacattcgtgaaattgaaacaaagatatgggcgctagaagctgaaaaaggagctttgagcggcttgaacgccgctattggagaagcggattctttattagctaaaggtgaagaagcctacgacgcagtagaaaacaagattagtgaaattagaagggggctgttttcatgacaattaagcttgatcacgctgacgttattaaaaagcttgaagcagtcagcacagcgattggaaatttatccattagcaaaatgcctgaccttggaaaaaacagccttgatactacaaagaaatgggaagcgcgtgaagaagaaattcaaacgcttatttctacttatataaaagcactaaacaaaaacgtaaaagatacaaaatctaatgtagacttactaaaagaacaagacgaatctattatccattcgtagcagcaaagggggatgactgtgggaaaggtatacgatgcaaaagcgctgtttgacgtagcaaaagacagggaaaaagcctacgatgagttactcagccagctgggtgaactgaaaaaagcgctgcagggcgtagcggacttagaaggcagcttagaaggaaaaggcgctgacaatataaaatctttttacaagcagcacgccgatacggccggacagtgggaaaacttaattaaaatgcagcaaagctatttttcagcgcttcacgttaaagctgaaaaagcaaagctagcaggaagcacgattgtaactgaatcatttttagaaacagagttaaaaaacgccaacagcaatgctaaagaaatggttgctcagcagcacgaagatctgcagagtattttaaacggcatcgacgatattgtctctatttcagcgttttcaacgagtgagtttaacgataaaatagaagaagcagagaaaaaacgcaccgatacaattgaagcagtgaaccagcttgacgctgaatggtcaaaagaatacagcgaaatggacgatttctatacggtagtggatacgctagtaagcggcttagagcttgctacgagtcaaggaggaagcgtctatcagcttgcctttaacgaaaaagcctatcacgacagcgagctgtataaagttcaaacaaagctaaacgactatgcaacttcatatgttgactacaacaaacagcaagaagaagtatacgagctggaaaaaaagcaagaagaagaagcaaacaagccgtggtatgaaaaaacgtgggacgcggtttctacctttacaggagaggtcagcggatattatgattataaacgagcagcagaaggcgtggaccctgttacgggtgaaaaactttctacctcacagcgcgtcgcagcaggagccatggcagcagccggcttcattccggttgtcggctgggtaggaagagctgcaaaaggcggaaaagccatctacaaaacggctaaaggcctaagcgcagcggatcacgccttagacgcctacaaatccgccaaatccttcaaagtcctggagcaaaccgaaaaaggcctctacggtcttgtggccgcaaacggcctaggagaatatatgaccggacgcgacatgttcgggaataaaatcagtgaagagcagcgtaaagcaagtcttctgcaagcattaggaattgctggagctggggcgctttctacgaaggcagcggggaaaacagcgaaagcaggcgctaatgccgtggcaaacggagcgaagaaacttagtgatatgcggaatgtacttagcaaacaagcgactcaacgtattatgccgccgctgcaaagcgctcagaaagcttatcgttcttcttcgaattacgtcaaaaagaaaattagtcaagccggagatattaagctggctcctaagaaggtccgagtagtagaagaaccgctgactgcaacgcgtatgccagtggtagatgagtggattaccggaaaagatgttgggcggatgttttcggttcggagtggtgaaacggctcggagagttgaaagtgaatcgggagcacggtacggtgatcaaaaaatatctgataaactctatagtagattaagaaaagaaacgcctactgatgagcttagagatatggtgaatgaaggggttgacttgcctatgcctgaccctgcgctacctggtctagagattaccaagagattagaagctgatcacatagtacctatgaagaacattgcgcgtatggaaggttttgacaagttaacttatgagcagcaagtagctttgttaaattatagggataactttataggattaagtaaaattgctaatacttctaaagggtcaaaaacttatgaggaatgggtaatatataaaaaaagaaatattgaggttgatccaacgtttagaaagaaaatgatgggaattgaaaaagaattgcaagtgaaaatacagggtttaatagatggatttttaaaagaatagggagttgacagggataatgcttcaagataaattagatttcttaaataaatatacactaagtaagaaactatctgtgagcttaataggacctaatgacattgataatatccaaaaggatttaattcctgatgaatggagaggaatttttaaagagaaagataaatctattaggataagtgaaatattaaatgtatggaaaagatatgtaagtagtgaaatgagcaataccatatctttcctgaatgaatttttaattgatgttgaattaatggctattggtaatcgatactctatgttgtattcggtgaaaaattcaagagggaaaattttatattatgaaggtcgaaaccctaaagaatactttaacaacgagcagcttcaagaagattggagtaaaatcccggataaaattagaagcttttatgaaaatgttcataatggattttactattatccaagtaagtcaatggggttagagtcactagaagatgttacgtatctagatgattatgaatgggagattgttgatgaaattggagaacataatttgagaattgatttcacatcttcttatggatttttcagcaatggaatgggaacttatgtagtagttgactataaaaacagtctgaatgacaatgctactttgtggtcttcaaaagaagaaccagaatataacttaaatttttgggatgtagtggatgaatggatggttataggatttgaataaattaatagaacgtagataaagaaagtataatctacgttttatttctaaaacattattaaaaaccgattagataaaagataagctttttgattctaatgaacagcttagagaaattcctaaagaaaataaccaagaactagagtattctcttacgctaatgtttaaccaaactagaaaattctttatacaatttgattgcacggattggtctaatgcaaattagggcttcatagcgcatgaaaagatgagagagtatagatatttagatgaagtaccaatagatgaaaaaactaagagcttaatagaacaatatttaaaagagtatcccagtaatcctatttaaataattattaaagttataagtaaacacactgtattttgtgaaaatcagtgtgtttttatattatacagcaactaagactttaatttaagcctttctcactggtgtaaaactcttcaaatctcaccttactgtagcagccgccttgataaggaagagctgcaaacggcctaggagaatatatgaccggacgcgacatgttcgggaataaaatcagtgaagagcagcgtaaagcaagtcttctgcaagcattaggaattgctggagctggagcgctttctacgaaggcagcggggaaaatgggacaaagccttgcgaccaaaggaaccgaaaagctcaacaacatgcgcaacacgcttcgcacaagcgccgttgccaacgtcacaaaacaagcctaccaaagcgtcaaaaacgcaccggcctcttggacacagtcgctacataaaacgtataacaacatcctagacagcagcatgccaagactggcgccagaacttgtgccgactggtccagcacttgcccagcagacggtgagggagaccttgcagaatgtgaagcagcagacgatgcagatggtaacgaaggtgaaatatgatccagttcataaccgctatcgcggagctggaggaagatttatgtctaagcgtgatgtggagaagctgggtgattcggttaaggtagagacggttcggaaagttgataagcctgtaaaagtagagcgtccaattcaaaaggtcgatgaacctgtaaaagtagaacatgtgagtgaacgtccgattcaaaaggatactaaagggcagataggttatacaagaggttttgatgtagagcctaaatatagttcttatgaacaaagggtaaaaattactcccgttaataaaggtgaatggagtaacggacgagcagaatcggtattcatctccgataaaaccggtgaaattcaacaataccttgatgaagctggtgttgatggagttgagtacaaaaacggaatgccagatttttctccattttcaaaaggtgaaataaaattgggaaatatgaccaatgatagaaaattaaatttttcaactgccgatgaggaattggctaaaaaatggagtacgccagaacaaaaatggacagcagaagatatagctgattggcgagaagataatagatatacttggcatgaactcaatgacttggaaacaatacaattggtaccaagtaaaattaatagtgtttttaaacattttggtggagttggcgaatataatataaaagttaagttaggagagtaattaggatgacaataattaatgatgatttatttggaaagcttgaatataaaaacaacttctggagaggaaaaacgactattagaatgtttgatgtggaacaagaaatacttttaagtgttgattcagatgaaaatgctgacttttcaaatgtgcagagagaagcatttcttaactttattcaagatatgaaaaacataacgaatgaggcggaaaagcaagtatatgattactatagtgaaaattatgaagagtatagagaaatgttaggtaataaatcagaagcagaccatttagctccaagaattaattctctttcagatttaaagagattagtgaagccaactgaattgattgtaagaagaataaggaagaatgggaaaagaagattaggtttgctttgtgatgtttcttgggacattgaagatggattaggaataaagatagaaaatgaaattgtagaagaagtaggttatcaagatattgtactataactcatcaaatttaatttaagattgaccttgaatagctaacagcttattcgaggtctttttttggaagttaataggtgaaagtaagatgaaaaagataataaacaatttatatcatcaacaatataaaaaatgattgtatgaaattcacaaaagaaaataatgaagaagataagctttttgatcttagtgaaaagattagagaaatctttaaagaaaataaccaagaactatggtattcttttgcgctaatgttagaccaaacagggaagttctctgtattatttgattatacagattatggacttgtagcaaagaaaaagatttggaagtacaattaaatgaagtaccaacaaccaacagatgaaaaaggtaagagtttaatagagcactatttaaaagagtatccacataatcctatttaaattattagatgaattctggaagggatttcagagaactaaagggatctctctgatactatgaactgatgaagaaaccgtatgaacaaaaatatcttaggaggtttctatggataataaggaaaaagcagttaaaacctatgatttcattaagaatggtgatacagaacaagcaaaagagattctgattacagataaaacgctgcttgagtttataactccttttggaacgtggctacacgtggctgctagagctggtagtcttgacatggtaaagttcctagttgaatacgggatggatattaacacaaatgaaggtgtaccaaagtcagcgccaattgcacatgcagcgagtgtaggtgaatttagcatagttcagtacttatacgatagaggtgcaatattagatgtaagcgattcgagtagaaatcctttattttcagcgatttatggtggtcatcttgatattgtaaaataccttgttcagagtggtattgatattactgtaaagtatacgggggatacgatgaaagatatggatgcttatgaatttgcgattgaacgaggaaaaatagaaattgctgaatatttaaggcagaagtggacagtaaatggaattaaagcttaatgatatttatcaagaggtgaccgataatttaaaggaaatgatataagcgaactacaaatacgacagtgattttcattgaccacaactatttaaaagtaaaaacggtagaaacagctaaattattgaggaagatgtctatattaaaaaacgacaataatgggcaactaaatgaagggagatatgatttggagaaaaacagcgttaataaagcaataaggaatgcaattaaacgtggtaacattaactcagttaaagagctaataggtaaggataaagaaattctacataccatgactccatttggtagctggttgcacatagcagcaaaaaaaggacagatggaaatagtagagtatctagtgcataaaggaatcgatgtaaatataaaaggtgatatatttgatgcttctcccttacgagtggcagcgggtgaggggcatgtagaaatagtacagtacttaatccaatctggagcagaactagatgtaagcttggcaaaaagaaatcctttatttgcagcgatttatggtggccacaaagaaatagttgaatatctagttaatcaaggtatagatatttccgttcaatataccggagagaatatcgaggatatggatgcgtaccgatatgctaaggaatttggacaaacagaaattgctgattatttaaagcaaaagctgaatgaaaaagtacaaaagagagtgcttgaagactaattaaattgtatacaacaggttacaaagctaataaaagcaaggaggtccacctcatgctagaacctatatatgctgaaaacgtaattgtcggagttatacataaaaagcagtttcaatggtatgtaaccgatcgagagctatggtatttagattatgtaaagtttgcgcaagcttttgaaagtcatctagcggttgacgaatacattgaacctgaacgaaaaggaattgagattcttagcagtgaaaatgctgagctttttttaaagcgtatacagtcatataaagcagatgcagctactcttttaaagctgtttgaagataaaatagaaagcggagaggaagaagacgtattagactttatcccttcgtttttggtggactttgatcaaaaggtgttctattcactgtttcctgagccggcttcatttgaagaatatgttccaagtgattggaaaggaacgtatgaagactttacagctttgattccagaaacagaaaagtattggataaataaggacggagaaagtttatttgagctgtgaggaaggaaagaagcgttggatagttcagttcgagtattcaagaccgacatgagaaagagatgctgtaaatagcatccctttttttaaaaagttacaatgtcttttcagcagctttttgatgtgcaaaagaggaagatttcgttctttcctcttcatcgaaatccatttctggaggagaaagcttaaatccttttgtaagaaaagttaagtacacaagtcctatggcagtccagatgcttcctagcactaaggcgtgtttatctagattaataaagagatagaaatcaagggatgctccgatagctggtataagaaagtaaagaagaaaactattctttctttcattttttaacgtgaagtaatagtgaaaaatgaccgaaagatttacaaaaataaatgttaaaaatgctccaaagttaataaaagaagtagatgtacttacatcaagcttaacggccagtaatgaaatgcctcctatgaataaaatattcaataggggtgttttcgactttcgatgaagatacccaaatatcttagcgggaagtacgccgtctcttcccattgcaaataataaacgggctccgcttgtttgagcagataagccagatgcgaattgagcaataattaatccagctagaaaaatagagctaaataaattgccgccgatctgtacggcaatttcaaatgctgctgaatcaatatttttaaaagatgtatagtcaggatgaacaagctgtagaaagtaagaagctccaataaaaatgatgcctccaattaatgtaataagaaagatagcttttggcatggttttttcaggattaatggtttcttcagatagagttgtaacagcatcaaatcctaaaaaagaataacaagcaatggaagcgccagcggctacaaacgaaaatgtaaaatgctcgttcaagaatgggttaaagctaaagagtgcaaaaggtgatgagccttttataaggtatataatgcttagtgaaataaaaataccgactacgagcaattgaaaaatcatcattaatgtattgacgctcgccgctgcttttaagccaatcatgttgataacagttgtaataaaaataaaggctagtacaaatgtccaaagaggaatgctagggaaagctgtatgtaaataaacagctcctatcagccaaataaccataggaagaaacagatagtctagtaaaacagcccatccaatcataaatccgacatatggatttatggattttcttgtatacgtataagcagaccctgcaataggaaacgctttagtcattttaccgtagctataagccgtaaatagcatagcagctaaagccactatgtaagcagtggaaactagtccatgagtggtttcagccaacaagccataaataccaaatacaatcattggagtcatataagcaagtccaaacaaaacaatatgtgacaacttcaaagttggaactgcttgatttctttttgtttccatctttgcgcctcccttaaaaattgtttttaatcttcttatgtctatttgtacaaatccgctcttctgtgcataaggtaattaagcttctgatcttttgattcctctaaagaaatagctactgttgagatttgttccttgctacccatttttaaaagaacttctcctttactgttcaccactgaactgtgtccaaaaaagaatgtatcttcttcattgccgattcggttgcatagagcaatcggaagctcattttccatagcacggctttttaaataggttatttgatagtcttcgtaagggctcatgttagcaagcgggatgatgagtaaatccgctccttttatttttaaagttcgggccacttcagggaattcaaggtcatagcaaatcattaatccaatggttccgaatttggttttgaaaacaggtaaagtgttgcctgggtgaaagatttcagcttccctgtcaaaaagatgtgttttttgatacgtaccaattacagttccggtatcatctataagagcggatgtaatatgataatgcccgttagctgttacttcaggaaaagatataacggcgtggatgctgtgatccctgcagctttgttggaaaagctgtaagctgtcaccactgacggattcagctagctcctcaatatcatcccaaataaaataacctgttaaacaaagttccggaaagacaataaggtcagcctcttcgcttgcagcttgcttgatacattcatttattttccgaatgttttcttttttattgcctagtacaggacaaaactgagcaattgtaatattcactgtaaaatacctccttataatcgttttcactataaatacaagcaagaagtgtgccaacgtatttttttcagttaattctgattttcgagctttaaaaagatgaattttttcattatactaatagggataaaaagagaataaatgatattttttgtatctagttatttaaaaagctaagatgatgatttttatcatcaatgatgcaatttttcattaggaacaatagaaaggagggaatgcatagtgaataattctttaatagatacctgtgaatcaatagtagtcgtcacaaatcatgaaggccgcattgataccgtatctatcaataataaacaaaccagtcacttatcgttgtttcaaaaaaatatgttacttgaagaagttcagtggaaaaaggtctttactgctgctccaagtgactctactcagttattaagcacctatgaaggaagaacctatctgtttactcttcaccttgtccaagcgaacgcttacataaatcaaatcgtgacattagcgaatatatctcaaagtatgtttaatccttattccaatgaagatcagcataaaaccgatgagttaattatggaatcatctgctatgaaaagaattagtaaaattataaaaacaattgctcatgtaggctccactgttcttctactaggtgaatcgggagtgggaaaaagtcaaattgctaaatttattcatagtactagtacacgttcaacgcagccttttatttctgttaattgtggtgctattccagaaagtttgattgaatcagagctatttgggtatgaggaaggaacttttacaggcggaaaaaaaggaggaaaggtcggcttatttgaagctgctcataagggaacaatttttctagatgaaattgcggaatttcctttaaacctacaagcaaaactgctaggtgttttgcaagaaaacgcggtgcgaaaagtaggaagtacagaggaaaagaaagtagatgtacgagtaattgctgcaacaaataaaaatctacaggagcttgttgagaaaaaattatttcgtgaagatttgttctataggcttaatgtcgtaccgctcactataccgcctcttagagagcgagaaaaggacatacatatcttaattgatcattttctgtttaaatataatacaaaatatcatcttcgaaaagaaattaatgatgaagtaaaacaagagcttatccaatataaatggccaggaaacataagggaattggaaaacacgatagaaagaattgtcgtaacaaatatgactgaaaaagaagtgctagaagaaaaaagtatacgtgaaaacgtttggtcattttctcctaaagcaccaatatctttgaaagaagctaaaagacaagtagaaaaagaattaatcttaaaagcttacggtgaatacaaaagtacttacaaagtagcagaagtattgcaggttgaccagtctactatttcaaaaaaattaaaagtatacaaaaaagaaggtttttaaagaggtgaagggatgcgtctattaaaaattgcattagcccagcttagaagcaatttgcatgataaaaataaaaatttaaagagagtttttggaacgatggaagcggctaaaaatcaaggtgcggattttgtgttattccctgaattatttttgactggttttttgttaaatgaatatgtggaggaattagctgaatcagtagaaggagaattaatcacgaaagtaaaaaagtatgcgaaagaattacaaataggagttattcttggttttccagaaaggcatcactttaaaatatataattccgctgtatttattaataaggaaggtgagatagtaggaacttatcgtaaaattcacctttttgatcatgaacattcatattttacttctggagatagtataccggtctttgatacacctcaaggaaagtttggagtaatgattacatatgatatggaattccctgaagtggcgcgaattctggcgttaaaaggagctgaagttgtctttgttctttgtgcgaacatgattccttacgagcatcatcagcacatttatttgaggtcaagagctttagaaaatcatatttttattgcagctgctaataaagttggattagaagacgactatgtctattttggtgaaagtgaagttattaatcctaatgggcactgtgtgtttaaatctcttaataatgaggaccttgcgattgttgacatagacctatcatcttcggcaagttcaaaggaaattttgaactatttggataatcgaaagtcagagttatacagaagagaagggttataagagctctttattaaagaaagctgctattatcttttcaggccaactaagcgggcagtgtgactcgcggagcttgcgtgaatggtcttccctatttttgctgatgtttgcacccaatttacttcatcgggataattcgtaatcactccgtcactttttgttttccacaaaaatgaagccggaagccgcttggttccagaccacggcgatattttcattccggcagaatggacttggtggatgagagcaggcgttagtatgtcataggatgggttaaagtaagtggcaaaagcggcgaattgctggattgagtttgggtttgcgtctcgttctgaagaagttagtatgcctataggaacgtttgggagaagctcatgcatttttttcatggatgaaacgttaaaagactgaatgataacgtgatcgagctttcgcttgttgatttcaaaagctacttttttttcaattccaggataaagttccggggcttttaactctattaatataccgatttttccttgaaattcatctaacacttgtgaaagagttggaattttttcattcgcaaaagaatcgtctttccagcttcctgcgtccaagcgctgaagctcagcgtacgttaactctcgaacgtgtccgcttccgtttgtcgttcggtctacggtacggtcatgcataataacgagtacaccgtctttgctttgctgcacgtcaagttcaatgtaatctgcattcatttctagcgcttgatgaaaagcagccattgtattttcaggtgcgtaagcagaggctcctcggtgcgcgatgttcgtgagtttttcttccgtgcgtgcgtaagcagaagaggcgattgtacagcataacaaggcgactgcgcttagaccagctaaatattttttcatcacgtttctctcctatgcgttggtatagaaatagcataacgaaaaaatatgatgctgatatagagaaagtatgtagaaagcgttgacattttgtaaagaaaaatagggactttttcatggtgatgtttacaaaaaatgcgtaaaagaataggaattttaattaaatattaaggaaacagcgctataataaaaggtgtgaaaaaaagaataggaatttcttagaaaatagttgtataataggtgagtcagtcaatgaaaggaatggaacatggatattcagtacatacatacgtttacgatgcacacaaaagaggagtgccggacgcttcagcaaaagctaaaagcacaaattgatttaacatcacgcgtcaaaatcacgcatatacataactgtgctggtgttgatgttgcgcattgggaagaaaacggcgtatcttacggagcgtgcagcattgtagtggttgattatcagacgaaaaacgttgtggaaaaagtgcacagtgtaggacaagtaaccgttccttatcttcctgggtttctagcttttcgagagcttcctttaattcttgaagcggctaaaaaacttcaaatagagcccgacgtgtttttatttgatggcaacggatatttacactacgagcatatgggagtagccacgcatgcttcgttttttctcaataaacctaccgttggaattgggaaaagctatttaaagatcaaagggcatgattacgttatgcctgaagatacagcaggcgcttatgaagatattgtgattgatggcgaagtttatggtagagtagtaaggacagccaaaggggtaaaacctatttttctgtcgtgcggaaactatattgatttggacatgtcgtatcagctcatgatgcattttatttcaaaagaaagtaagcttccgattccggtccgcctagcagatctgcatacgcatgagctgcggaaaaggtaccggcagtcagcagggaagtaagctgttcataatgagttcatagtttccttttatactgatggttggaatatagtagtagtgtaaaattattaaagaatgagtaaggtgattaaaggtgagttcatttgttgcgagtattttggattttttaacgagccttggctatttaggtattgcgctcggcttaatgattgaaatcattccaagtgaaattgtactagcctacggggggtatatgatttctcaaggcatgattagttttcctggagcagtcattgccggaattattggcggaacgattgcacagtggtttttatattggattggagcctacggaggacgtccgtttcttcaaaaatacggcaagtacttatttattcatgataagcatattgatcttgcggaaaactggtttaataaatacggcgcgggtgttgttttctccgctcgttttgtcccggttgttcgacatgcaatttcgatccctgcaggtattgctaaaatgccgttttggaaatttacgtctttaaccgtgttagcgatgattccttggtcgattttatttatttacttaggcggaaagctaggcgagaactgggcgaacattgaagacgtagcaagcaaatatacgcttccgtttgtggttgcggcatttgttattattgttctttatttcgtattcaaacgcacgcgtacaaagcgcgtataagatcatttttggactgaaagcatggcagaaagccatgctttttttgtatgagcaaaaacaagttcttttatttgctcatgacttcttcaagtgctattatttttcatacgcactaaaaaaggagacgatttaacgtggtacaagaaattgtattaaatgatacgcctattcaaatttacagctatgaacaagagattgtaaagggcaaaacaaaagtttcagttgattttaaagtaacaagtgaggaatatcatgatattacaacacttttatataaaggtacttttcatgtaaatgtcccagaagaagatctggatttccaaggaacgattcatcagtactctacgtcttttacaaatttatatgaaaaaggcaaggtaggggatttttcattaagtttaattgaagtgaacgaataaggagcagatgcgtgatgaaagtaagtatactcgaccaatcgcccgtttcatcccatcagaccccagcggaagcgttagaagcatcaatgcagctagccaaagctggtgacaagcttggctatgaacgctactggattgcagagcatcatgatttgtctggacttgcctgttcggctcctgaagtgatgcttggctatatcggcgcacagactaatagaattcgaattggatcgggagcggtgctgctgcctcactacaagccgtataaagtagcggaaacgtataacatgctcgcaacgctgtttccagggcgcattgatctaggaattgggcgcgcgccgggtggatcggctgaagcaacaaatgcgctgtcggataacttcttgcagcaagtatttaaaatgcctgaacttgttgaagagctccttcagtttttagacgataaatttccggctgaacatgaatacgcaaagctttcagcttcgccgcttccgcctgtctctccagaaccgtggctgcttggcacaagtaaaaaaagtgccgagctcgctgctagaaacggaatggcctatacgtttgggcagtttatgagtgaacaagacggttcagctattattgatcagtacaaacaggcatttcagccaagacagagcggagatcagccctatgcgattgtcactgtatcgatcatttgcgctgaaacaaccgagcaagcgcagcgcatcgcaacgagctcactcgtatggaaaattcagcaggataaaatggaagcaaaaggcgtgccttctattaaagaagcggccagctatccgcttacagaagaagaagagaaaaaaatcaaaaaaatgaaagaagccatgattattggaaatccagaagaagtgcatgagcgtcttcaagaagttcatgcacgctacggagcggatgaactcatgcttgttaccattacgcacaatccggctgaccgattaaaatcgtatgagcttatagcagaaaaatgcaaaaaataagagccgaaattcggctcttattttttatgcccgtaatagtactcatataagtgctgaaatgcttctatagcaggtaaaaaagaagcggcgtcttggcagtcttctattaaccagcacgtggctagtatagaatgagcgtatccccacagcaagatgcgttttttacttacgttcagttcttttacaaatatattgattcgatggtcaattgtttctgccacgtttgtcttaggcagatgatttaaaagaaaagggatgatttcgtactctttttctccaattaacccttttggatcaattattttccacgcttcaccagactgtaagatgttatcatgatgcaagtctccgtgaagcagaaaaagctgctgagaagtgcggtttaattcagagaaaacggctagtgcgtgttgaagcgtttcagaagaaagaaaataaataccgtttggatacatttgtgtacactctcgaagctgtttctctcttttaaccgctgtttcgatagtggagtctgagtgcggcatgcgccatagagatttcatgagctcagcagcgattaacgcagcttcttctaaagttgataaagaggaaagcgggcatccgggagacagcttttctaacagtaaaatgcctttttcagcatcgctgtccaccatttttactgtgttctcaccagctagtgctgtcagtgcttcttgctcatgaagcaactctgaaggctctacaaaaaatttgacaactagttcgctttcatctgctttacgcgcaggagcaacaaagtggtaagaaaggggaaagtgactgtaaatgttgatacgccagcgctgttgacagtagcgaataagctgaggaaagtcagctaaccacttttgacctttatgagagtgaagatgagtaatcgtatcacaaaatgtttgaggcagcgtatacatgcgtttgtctcctttgttgtttccaattctttctgataaactcatcatatacagcctacatagaatctgtaaagaaggagggatcctacatatgaagaaaaagaaggtgaaatccccttgggctctcgcggggtttccgatttatatcattgggttttcacttttactcgctggaggcgcaccggagtgggtagaaacagtgagtaaaatcatgattgctcttggagtcattttgcttattattgcaggaattgatcttaaaaaacaaaaaaaatcaatacaagcctaaaaaactgccgtttggcagtttttttatttggagaaagggtaacaagataactagataaaaatgttgaattattattccttttgatgtataaatataatataagaagcaacggtattgagaggagaatgaacgtgtcctacgtaataaaaaaagaggttccgctatttgagcagtttgctgctttgcatgaagcgagcggattacataaaagtaaaaaaggcaattatacaaaagaacagctgtttgaagctgcagccaacagctggtttagagtcggtatttatgacaatgaacaattaattgcattcggccgtatgatttcagacggaatttaccaagcgcttatttgcgacgtgatggttgatcccacatatcaaaacaaagggcttggaaagcaaattattcaagagctgttgacgaaatgccaagaaagcggaattgaatcgattcagctgtttgcagcaaaaggaaagcatcatttttataaaaaattagggtttcaagaaagagaagaagacgcgccaggcatgtcgcttgttatgtaaaaaagctcagtgatcaatcatactcactgagctttttgtattatgcagctttcaaaaccgtacttttttggactaaattccaagcaacttttactaaataaacaacaagcaaaacgtttagcatagacgtagcaaacatagaaaacgggtatgacgtgctgttttgcatgctgctgtcaccgtataaaacaaaaaaagtgttcataaaaatactgatgctaaatccaaggaataagtaaagcaagtttttgtcttttaaataaatataagcgagcaaagcaagcgctgctgctggaaataagtagcgttcatgcatgcttgaagaaaacgtaaataccccggaaatttgaatgagcgctgcaagagcggcgtatttaaagctgcgcccttttatataaataagccatgaaaaaacagttgtcgcgacgataaaaataagtccccacgtatgatagcttaaaaacagcagcgttgcagagctgtctttatagtttgcgcctattaaactaaaaaagttataggcgttaacagaggcatacgggtactctccaatggtggatgaaaataaattaataatccacgtgggactttttccagctgaaaaaggcaataaaatcaccccagcagtgaaagccgccgttaaagcaatgccgaagaaatgtttcacttgctttagacgaatgagttcgaaaaacaaaatgggcaggataataatcgcctgcggcttcattaagaccgctgctgtaaaaataacggccgacgcataaattcttttttccgtaatcattacaatcgctaggacaataagcaaagtgaaaaatgaatcgacttgtccccaaaacgttgaattaactaaaatggcaggattaaataaatacccaattgctaacagatatgcaaaagaaggtgccaagtatttacgagctaaacgatagagtaaataagatgtgacgacatctgctaaaataggcgggattttaatcaacagcgaaaaatactgctgaaaatccggtaaactgccaactttcccaacgataaacaagatataaatataaaacggcggataatcgcttccgcttttagcgtagaaatttgaaaaatgattagccgcaaccgatgcccagtttttgaaaagagatgcatccatatgagagcctacccacggaatcagcgcaatccggataaatagtccagagccaagtaatgaccataaaataacgcgagaatgccctatcgaatgatgccatttctttttctttaataatccgtaaacgaaagctgctgctataaaaaagcccaccgtataaagagctagcggcgtttcataatctttattagctccttgacttccggcaccgttacccatagatagattatgaaaaggcgttacgtgttctccggaattgctagacgaagcaggaccgtttcctgaaggaagacgatgatccctcgaagtattattaggagaagatataccattagtaatcttttttaactgatgactttcttgaatcgaaaataaatgttcttctcctttgtagtgtgatagtgaaacaatactgaaaacaaatgctaaaagaaaagcagccattacgataaaagccgttcttttttgtagtatgttcatataaaatcctccgatgacaatgtatcgaataagtagtagtgtgtctccatactataaggggagttggtgaaaataaagtgaaacttctttaataaagagcggaagagagagcataaaaaaacaaggccttagaagaccttgttttttatattgcttatagtacagcatcaaatttatttactttccactgtgaaccggatttataaaatgtaacggtgcgttttacacttccaccgtcaactgttggaaccgtaaattgataagagcgaacatcggcacgctgataagttagttttgcttttgctttgttccactctagcatgctgaatccgtcaccgacaggacgagcaagcgttccgttatatgtgatatagcgataatttgttaatcctttttgaatagcactgtttgtaaaagtttcagataagtagcttactagtttggtttttgtattaaaatcttgacaaagatatgagtactgagtgcctttataattaaatgttttttgagtacataaattacctttagatccatgaagtgcattccagaaatggttgcttgcgtttgctgcaatttttaccgcattagtcgttgatagattttgtgctgctgcttgagctgtaactcctgtgcttagtgaaaagaaaagagcaagtgatgctaagattattccaaattttttcatttccatttccctcctactcattcattgaaatatatgtaacattcatgctgttaatattacaattgttacatttatattacaatacttctttaaagaaataaagagtatttcttatatatgtttgaattattcccgtattttcttaaataaaacgtagaattaaaagaaaacatataaacagtatgtcaattatgtgtcacatatttcttcgctttacaagttcgtatataataggaataaaccgaccactatgctgatgtagataaataggtcaggcacaaaaggagaacgtagaataatgggtgtttcagaagtaacatcaggaattattattaccactgctgtaattgctattgtaattattacagttggtgttttggctacaatgattgcgattgcgaagaaagcaaataaaaagtaagtatgtagaggagagttagtatagtaactaattctcttttttttgaaaaaaacctatcgctatttttataataaaaatgcataaataacgcgtgcattattcatagaaaaaagcaggaaatttacgttttgaagctaatagatacataaggcaaactgcgcactttcattataaaaataatggaaggggttctaacagacttcaagtgatatcgcctattttatgtcataatgaatgatattcattaacacagcatcttagacgcactttataaccaaataatgaggagagtggttgagttgcaacgacaaaaagtagcagtgaatggagaaaggttaaaaaatacgcttgaacgatttgccgattatggacgaacacctaataacggtgtaacccgcctagcgctgtcagaagaagatcgtctagcacgagattatttttgttcatgctgccgggaccttggaatggatattaaaatcgatgaccttggatgtatttacgccacgcttgaaggattagaagataagcctcctattgtaattggttcacacatggacagcgtgaaaaaaggcggaagatttgacggaatactcggtgtagttgcaggattagagttagtaagaacgctggttgaatataatattaagccaaaggtgccgattatgattgttaactttacgaatgaagaaggagcgcgttttgagccttccatgatggcttcaggtattttatcgggcaaatttcaaaaagacgttatgatgaagaagacggatgttgacggcgtgacgtttgaacaagcgctccaagcatgcggatatgaaggcgatacaagtaaccgtctcactgaagcgtcggcatttgtggaattacatattgagcaaggtcctgttttagaaagagaagccaaatcgatcggtgtagtcgagtgtgtgctcggaatggtatgctatgaaattgaagttaccggagagtcagatcacgccgggacgacgccgatggacatgcgaaaagacgcgctttttgcaaccaataatttaattgctgaggctcgtcatgagctcggcagattagattcaaatttggtctatacaatgggtcgtatgaacgtactgcctaatattcataccgtgattccaaataaagttattttttcgcttgaagcgagacatacggatgaagacgtcattgcgtccgtggaaaagatcattcagtcactgccggatcaagcggagctgttagaaggctgcgaagtgcgggtgaccaagctttggggacgcgataccgtatggtttgataaagccgtttgcgatgaagtggaagaatcggttcgttcgcttgggtattcctacaagcgaatggtaagcggagctggacatgacgcacagtttttagctagctatattccgacggctatgatttttattccgagcgtaaacggaaaaagtcattgtgaagaagagttcactccttgggaagaatgtgaaaaaggtgtaaatgtacttttagaaacggtgatcaagttagctcagaagtaacgggacaaaagagtaaaccttgaggtttgctcttttttagtgcttagaaagactgcgaactatcgcattgaacttttggtttattatggctacaataaatgagaagcatgcgggtggatgttaaaaaaggatgtgaaaaaaagtgaggtattctcacttacagaaatgaaaatccatattattattgcagatgataattcgtttattcgagaaggaatgaaaattatattaaatacatacgaggaattcgacgtcgtggctactttaaaagatggtcaggaagccgttcaatattgcaagaatcattccgtcgatattgcattgttagatgtaagaatgcctgttatggacggcgtagaggctacaaagcttatttcagagtctaccaaagcaaagccgcttattttaactacgtttgatgacgatgaatatattattgatgccgtaaaaaatggagctaaaggctacttgttaaaaaatacagaaccagagcgcattcgagacgcaatcaaaagtgtgttcaacgggcatacggttcttcaagatgttgtgcttgataagattaaatcaagtttaaacgctgcaactgagcgcgagtcaaaagcggatatgacacagtttacagagcgtgaaacgagcattatgacgctgattgccaaggggctttcaaataaagaaatttctaaaacgctttttatttcagaaggtaccgtagcaaactatattagttcgattttaagtaaaacgggacttgagcatcgtactcaaattgctatttactacttaaccggtaaagggaagtagggctatggaagtcggattaatgatgactaagctcatccttatactgtttttggctattacgtacattcagtttaattatgtacacttgatttcagctattgtgttagcactgcttctttacagctgtgttaatattgcagcgtccattgtgaaaaaaagcgtgttcaagcgtatatttattgttatttcaattgtccttattctatattgtgcgtataaacttcatcctttgttttttcttcttttgccgctaaacctttgtgagcttattggagaatcagtcgtaaaaaaatggatggtgctgctgcttgttttgcttccaatgctgcttgttccctctgatattagcgcgctgtatgtgttagtcgctgcgtttactttctttatttatacaggagcagctctctatcaaaagcggacaatcaattatgaacaaaagcttgatgaaatgagagtaagtatgcaaaagctgcaaaagcacgtgaatgaaaataaagagtatgtgagacagtctcaatatgcttcaaaattagaagagcgaaatcgattatcgcaggaaattcatgataagattggtcattcaatgacaggagcgcttattcaaatggaggcagcaaagcatgtaatgaagcaagatgaagaaaaagcgctgtctcttcttcaaaatgcgattacgatttcgaaagaaggcattgaagaaattaggttaacgttaaaaagtataaagcctcccgctgagcaaataggaatcagcaggctcaagttatttattggggaatttgaggccaaacatagtatagccatgcctcttgtatacaaagggaatttggatcttattacgcctcttcagtggaaaattatccatgaaaatataacggaagctattacgaatgccttgaaatatgcagaagcaacgatgattgccattgagcttcatgtactaaataaaatggttaaagtagaagtcaaagacaatggaaaaggggctcacttgtttcaaaaaggtcttggcatagcaggaatggaagagcgagctgcttccattaacggaacggtcattgttgacggggcaaacggattttctgttaccacactgctgccggtaggtgagaaacttcatacataaataatgagatttctcatggggaaaaggtgaacttatgcactgacgtaagtttgcctttttttcataaaataaggatataccaacacactagaggtgaaatgatgaacgtattatcaattcaaaaattaacaaagaaatttggggattttattgcggtagataatttgtctttacaagtagaagaaggagatatattcggttttttaggaacaaacggagcaggaaaaagcacaacgattcatatggtggctagtctgcttcaaagcaacagcggcgatattgaagtacttgggaaaaatataaagaaacaccgaaattttgcaaagatgaacattggaattgttccgcaggacttagcgatttatgaagatttgacagcctatgaaaatgtgaagttttttgcaggtctctacggattaagaggatcacttcttaacgaacgagtcgaagaagctttagcgtttgtagggcttttagataaacaaaaggcgtatccgaaaagcttttcaggaggaatgaaaagaaggttaaatatcgcatgcgcaattgctcatcgcccaaagcttatcattatggatgaaccgacggttggcattgatcctcagtcgcgaaattatattttaacatctgtaaaaaaactaaatgaaatgggaagcacaatcatttatacgagtcactatatggaagaagtagaagaggtatgtacaaagattgcgattattgatcacggcaaaattattgctgaaggaacaaaagagcagctgaaagctattatcaccgatacaaaagatatttggattgaagtaaaggcagcggatgatatagattgcagcggcctaaaagaaattccaggcgtaacagccgttacgtatgaagatggaatcattaaaattaattcaagcgccgaagtgaataacttgaacaaagtcattcattatttaatgacgcatcatatcgagattaaagcagttaaggaacaagcccctaatttagagacggtctttctcacgctgacagggcgcagtctgagagatttataaaagaaaggaggaatgagaaatgaatattattgcaattgctttgaaagaaatgaaaagtgatctgcgagataagcgtgcatttatctttatgattctctttccgctggctcttgtccttattttaggaacagctttgtctcaagcttttaataacgacatgaagatagacgacagttacgttctctataaaatcgacacaagtaatgaagaatctgctgcttttaagcagtttgctgtaaatgcagaaaaatcgggcattcattttaaagtgctgaaaaaaaatcaggatggaaaaaaagaagtaaaagagcagcgctatacagcttatgtagaagtgaaagaccaaggcattcatctctacggaaatgaagaaaacagcattgaattcaacatggtccaaggtatgttaagcacctttgttgataagtacaatgtggctatggaagtggccaaagtaaaccctcagcaagtggataatctgctccgtgcgtctaagcatgactatattcaagaaaaatctcttcattctcaaaaacagccaaattcaatagactactacgctatttcaatgacaactatgattgttttgtacggatctatctcagcgagttatttaattagaggagagcgtatgcgaaatacagctagtcgattagtagccgcgccgattaaaactgctgaaatttttgtcgggaaaattttaggcactgttttggttcacgccatatgtgtattagtcgtgattatgtcgactaaatacttttttcacgcgaattggggaaatcatttacttttagtgcttctgatgttattatctcaaattctttttgctattagctttggactaggagttagctaccttacgaagacagaagcggcgtcaagagcaattattatggttgttattcaagtgtcgtgtattgtgggaggaacctattttcaaaatggatctggagagggcttcgtcaatgtatcacctttaacctggatgaataatggacttattaaattgatttatacaaatgatatcggcgcttctctttcagttatcgggttgaatgtaggcttctctattttattcttgggcatagcaattgtgcttttgagaaaaagagaggggttataacatgaaaaatatcatgtggcttgtaacaaatatgctaagaaatatgctgcttagaaacaaaaggacgcttgtgcttgttattggtttgcctattgcaggggttttaatgtccgttcttatttatggaaatgcaggagggacttcggtgaatatcggagttgtcaatcacgactcaacggatattacaaaagataccgttcagtttttaaaagggctgcataaaacaaatgttaaaatgctcactgacaaagaagtggatcatgagattacgtcaaagaaagttgatgctgttattacctttgaaaaagggttttctgacagcgtcaaagcgaacaaaccagattatattacgatcacttcaataaaaggagcagaagtaacgagctttattaagtcttatttgtatcaatatattgataatgtttctgcgcttaatcaagcagcaggaggcaatgacgctgcgtttaaccaaatgtatgagagttatcaaaaagcgccattccacgtctctacgcatgcccttgaagacaaaggaaccgaccaaaacattgtcaagcagacaattgggtatttaattatgtttatgcttttttctgccgtgaatctatcggctcttatcacaaaagaaaaagagcagcgcacgtattttagactgctagcttcgccagttagcgcaaggcaatacgtgatatccaatgttattacaaatatgattttattaactctgcaagtaatgattacgcttggttgtattacgactctttttcacgtagatatgaacattcccgtatggcagctgtttttcattttagttttgtttggtctcgtagccatcggattgtctcttgtaattatcgcttttacagaaagttcaaaagcagcgaatggtcttcagacgcttatcatcacgccaacttgtttactgtccggctgctttttcccgcctgaatttatgccggatgtgatgcagaaaatagccgattttcttcctcaaacgtgggtgctaagcacgttaaaaagcgttcaacaaggagctgctttaagcagcctatggttaaacatcagcattttactagcttttgcgctcgtttttttcctgctgtctatttataaattaaatcgaaataatactgttcaaaagtttatttaaatggtaaagtcagagaatacctctggctttttttgtaatttttaaaaagttacaaaaaaagattgaaaaatataagatgaaattttagaatgaaagaggaaaggggtatacaaaaagagaataaataggggagaaaaacgaagttcatgttggttttttgcacaaataaatgaaatcgcttacataagtcagcatgaaaatacggaaggagagattgtcagcgagataacaaagggggaaaaacagtgggaatttatgaactacttgtaccacgcacggttttatatggagaaggatcattttctaaaattggagaacaggctgcactgcttgggacaaaggcattgcttataagtgatgacgttatggtgaaagcaggcaatgtagaaacttgccgtcgttacttagcagaggctggcatggactgtgccgtgtatacaggcgtaaattcagagccgacagatattcatctagatgaagcgcttgttatatgtaaaacgcagcagtgcgatatggttattgccttagggggaggcagctgtatcgatactggaaaagcggttgccattatgatgacaaatgaagggcatctacgaacgtattttcaaaatcaacaagattttcaagatagtcctcttcctttggttgccgtgcctacgactgctggaacaggctcagaagtgactaaagcgacggttattacagacacggcgtacgatgtaaaaatgatgctcgcaaggcctcaattattgcctgatacagccattgttgatccgttattaactctatcatgtccgaaacacgtaacggcagctacaggaattgatgcactcagtcatgcagtggaagcgtatttgtctaaaaaagcacatccttttacagattcacttgcgcttcaagcaattgagttaatcatgaaaaatattcgtcttgtgtacagaaatggagaaaatgttcaagcaagaaacgaaatggcctatgcttctatgctggcgggaatggcgttttcaaattcatctgttgctctagtgcacggtatgtcaagacctattggcgcgttattccatgtgccccacggtatttctaatgcgatgctcctgcctgcggttttggactatacaaaagaggcttcaatcgatcgtttaggtgaaataggacaagctctttttccgaacgtatcatatacaaaaaaagaaggagcagatgtgttaattgaagccatcaagcagctttgtatcgacttagagattcctaatcttcaatcgtggggcattgatcgtcagctattttacgcggcggttgagaaaatggcagcggatgcgattcaaagcggaagtcctgctaatcatccggtcgtaccgacggcaaaagaaatcgttcagctttattacaagtgctatgaatatgagtttaagtctgcactttataaaaaataagataaatttaagccaaattgaatgagggatgaaaggggaaacgttatggatttgctgattattttgctgtctctggggcttttgatgctggttgcttaccgcggattttcagttattttgtttgctccgctttgtgcgctgctagccgttattttaacggaaccaagctatgcgctcccgtttttctcaaacgtttttatggagaaaatggttgggtttattaaaaactacttccctgtctttctattaggagctgtcttcgggaagatggtagaaatgtctggagtcgctgaatcgattgcgaaaacaattgttaaagtagtaggggctaaacgcgccatcttggctattgttttaatgggagcaatcttaacctacagcggcgtaagtttattcgttgttgcgtttgcagtttatccgtttgcggctaacttgttccgcgaagcgaatattccaaaacgattagtaccgggaacgattgcattaggagctatttcgtttaccatggatgcacttccgggtacaccgcaaattcaaaacgttattccaacgactttttttaaaacagacatctatgctgctccgacactggggattatcggatcggttattgtctttagcttaggtctttggtatttagaaagccgaagcaaaaaagcaagaaaagctggagaaggctactacgggtttaataatgaactagcggctgctgcagagctagaaaaagagtctgtaccttctacagaacctaaatatgaacctagcgtagcaagacagattcttgcatttgttccgctcgtgcttgtaggggttgcaaacaaattttttactgtttctattccaaagtggtacccagatggttttgattttgccaaaattggccttgaagcgttcggaaaagtagatttaaccgcagttgttgggatttggtcagtggaattggcacttgttattggaattgtcacaacgattgcgtatgactggaagagagtgaccaccggtttccaagcaggtctgaacgcaagtattggcggagcgcttctcgctgcgatgaacacgggagctgagtatggctttggaggcgttatttcatctcttcctgggtttgccaccgttcgtgatggtatttcacatacctttacaaatccgcttgtcaatggagccgttacgacaaacattttagctggtattacaggctctgcttctggaggtatgggaattgcgcttagtgcgatgggagataagtatgtagaagctattaatcagtacaacattcctcctgaagttatgcacagagttgtagcgatggcatcaggcggtatggatacgcttcctcataacggagccgttattaccctgcttgctattactgggttaacccacaagcagtcttaccgagatatttttgccatcactgttataaaaacgcttgcatgtttcttgatcattggaatctacagcttaactggactcgtataacaaataaagaggctgagtttagttgaagaaagatccgaacgatgaatcgttcggattttttttattgttgtggtgaacatagatttcatgtatataggtgcttttagcggttgattggagggcaaggcgaagactcctgcgggaaaagcgggataggtgagaccccgcaggagcgtaagcgacgaggaggctcatcggccgcccgcggaaagcggagccttgcacggaaatcaacagcggtttcacaaggaatctttatctcctttgttcgtctatatgttgcagtgatttagctgtatatcaagctttttgctttaaaacagattctttgactttctaaactgtaagtattatgattacactactttctgcaatactatatgccgttacattaattcttagcatgtttatgaagaaaggagaatgactgtgaagctatttgaaggaaatttaaaagtaggcgactgggtcaaaggaaagtctcgcgacggtgaacttatatacggatatattaaaacgattaatccatctaaaaaagcagcactaatcaacgttgtaaaaagtgatgatgaaaaaatggtcggcacaaccattggcatgatggatgaaaaaatagagaagctgccccttcaaaaaacggcgcacgaagagcagattctttcattgattgatcttgcgctgctaacgaaagacaaagcttggtttattgaattaacagctgaattaaaaagattacaagataaaaagcaaggctgacattcctgataaggaatgaaggccctgctttttttattattcatagggaaaaagcaggaatggaaagccgcttgagagaagaagtaaatgacgacattaagaaagaaaaggtgataaaagatgagtaaacgtgtcttgattttaacaggagatgccgtggaggctttagaagttttttatccgtattatcgctgtttagaagaagatattcagtgtatcattgcttctcccgtgaaaaagaagctccaaacggttgttcatgattttcttccagagatggaaacattcacagagaaaacgggatataaaattgattctcatgcttctgtcgatgaagtggatcccgccgattatgatggacttattattcctggaggacgggcgcctgaatacattcgaatgaacacaaaagttcaggaaattgccgcgtattttttaaaagaaaataaacctttaggcgttatttgtcatggtcagctcgtgttaacgacggttagagagtatctgcaggacagagaagtgacagcgtatcctgcttgccgaccggaagtagaagcggcgggtgctgtatttgttgaacagacgcttcacgtagacagaaacctagtaaccggacaagcttggccggatttacctaaatttatgaaagagttttttaaagtgctaaaaaaagctgaaaaagtgaacgcataataaaaaaagcgggctgagagaaaacaattctttcagctcttttaattgatgataggtgaggtgtaaacaacgtgcagctagtgtctgaactgtcgaagaaaattataaaagaagtgcagctggtgatgaaagaacatgtaattgtaacggatatacggggaattattattgcgtctacagaagaaaagcgggttggtttttttcatgaaggcgcgtggaacgtgatgcaaaaaaagcaaaaactatatatctccaaaaaagaagcagcagatttaaaaggagttaagccaggaattaatttgcctattagttatcaagaagacattattggcgttattggcattacaggtactccagaagctgttgagccttttgcagacattattcgaagattaacagagctaattattcgcgaagcatactatatagaaacgaaggaatgggaaaataaaggagtagaagctttttttcgtgaatggatttatagccagcaggtagatgcagaatttattgaacgaggccatatcttaggagtacaagtagacagtgcttattgctgcacgctgtttcaaattgactcatctctttcgaaaaataagcagcagcaggtacaagaaatgattcgctactggtttgaaagtcataaaggtgaaggagattatatcgcaaattggggatacgatcgcttgcttttacttaaagaggctgtagatgaaaaggcaagacagggatttaaagaagaattaataaaatgtcagcagtacattcaagcaaacaaccaagttatgatcactattggtgtaggaaagccggcggagcaatttaatttgcatgcttcatatgaagaagcgaaaaaagcgcttaaagtggcttcaaaacgccaaaccgttgttttttatgaggagctgctgatggatatgattttagaagacgtttctgaacctgtaaaaaaggaattcttaagtcgagtgctttctcccattcaaacagaaaaagagcttcttgaaacgctgaaatgctatttagccaacgatcaatcgttaaaaaaaacggcgtttgatttacatattcatatcaatacgcttcattaccgcttgaagcaaatgaaagaactaacagacattgatccaaaaagcgtaaagggtagcacgcttttttaccttgcactgtctctattagagtaaagtgcgcccttggttagataaacatacaaaaaaagagtttttaaagcgcttttttttagttttttatccatagtccctcgtggcttctgcaactataataagattaagagatatataaggaggaacgttatgtatgcttaatgaacgaacaaaagcaaagctcattgaagttgtagggtcagccaattttcaagatagcagtgaagcaagactcgtgtactcttatgacgcaacacctaactttcagtcgcttcctgatgcggttattatgcctgaaaacaaagatcaagtgaaaaggattttaacgatatgcaacgaagatcatgttcctattgtgccaagaggttcaggcacaaatttaagcgcaggtacgtgtccaacgcaaggcggaattgtgcttacatttaaccgaatgaataaaattttggaaattgatgaagaaaatttaaccgctaccgtgcagccaggtgttataaccttagatttaattaacgctgtagaggcaaaaggtttattttaccctcctgatccaagctctatgaaaatatcaaccatcggaggaaacatcaacgaatgctcaggaggattacgaggcttaaaatacggcgtaacaaaagattacgttcttggtcttgaagtagttcttgcaaacggcgactgcattaagacgggaggcaagctggctaaagatgtagctggatacgatttaacgaacttgtttgtcggttctgaaggaacgcttggcgttgtgacagaagcgattttaaagctcattccaatacctgaaacaaaacaaactctgctcgcgctgtttgaagacatggacgcagccgctaagacggtttcagcaattatcgccaataagattattccagccacgcttgaatttttagatcagccgacgtgcgaggtagtagaagattttgcgcaagttggtctcccaacagatgtaaacgctgtcttattgattgaacaagatggtcctccagaagtagtgaatcgtgatattgaaatgatctcacgcatctgcagcgaaggaaacgctgtatcggtaaaagtagcggcttcgcaagcagaagcagaagctttaagtacagcaagaagatcagccctttctgctttagcacggatgaagccaacgacgattttagaagatgcaaccgtcccgcggtctaaaattagtgaaatggtcaaagcgattaatgaaattgctgtaacatataacgttaagatctgtacgtttggtcatgcaggagacggaaatctgcatccgacttgtttaacagatgcgcgtgacgaagaagagcttcaccgcgtcgaacaagcttttgaagcgatttttcataaagccattgagcttggaggaacgattacaggtgaacacggagtcggagaaatgaaagcaccgtatttggcattgaagatgggcggagaaggagtagctgcgatgaaagcaattaagtatgctttggacccgcaaggaattatgaatccagggaaaatttttgctaaagacacgagaaaaagagtggtggttcgttcatgacggcaacaaaagacattcagcaagcgttcaaagaacggttagattataacgagttaatgaattgtatgagatgcggtttttgtttgccaagctgtccgacgtatggccaaacgaatcaatatgaagcagcgtcaccgcgcggaagaattgctttgatgaaaggagtggtagacggacttattgaacctgatgaatccgttgaaaagcaattgaatctttgccttggctgccgagcgtgtgagcctgtttgtccttcgggtgtgaagtacggacatttactagaagaagcgcgtgatattattcagcagaaaaaacgacataagtggccggtgaaagcgcttaggcatatggtgtttgaacagctttttccgcataaagaacgattaaaaaatgtacattctctgcttgctttctatcaaagaagcggcttgcaaaaagctgttcaaaaaacaaacatactaaacgtcctgcccggtaatttagcacaaatggaaaaaacgcttccgcctgtaccaacaaaaaaagaaatgaagaaacgtccttttttatttgaagcagaaggaacaagagagcgtacggttgctttttttacaggatgtttaatggatacgatgtttatggaaacaaacaacgcgacgattgcacttttacaaaaagcggggtgtaaggtcgtcataccagaggtgcagacgtgctgtggcgcgctgcatgcgcacggaggagaaaaagatcaggcaaagaagttagcgaagcaaaatattatggcgtttgaatccattcaagcggatgatattgttcttaatgcgggaggctgcggtgcgctgttagtggaatacgatcatttattaaaagaggaaccggaatggaaagaaagagcagcggctttttctgccaaagtcaaagatttttcagagattttattgcagcagcagtttgtggaaaaacaaaagttatcgcttccaagtcaaattattacgtatcaagactcgtgtcatttaagaaacgtgatgaaaacgtccagcgcaccgagaaaactgatccaagcgattactggaacggtgtttaatgaaatggaaaatgcggatcattgctgcggctcagccggcatttataacttaacggaacaagagatgtctatgcaaattttagattataaaatggaaaaagtgaaagaagcccatgcacatacggttgtaacagcaaacccgggctgtctcattcaaatgaagctaggggtagtcagagaaggagtagaagaaagtgtaagggccgttcatcttgcagatttacttcttgaagcagtagaaagcaaataaaaaggccggacgtgtccggcctttttattatttgaacagctgagaaacaatttcgtacgaacgaaggcgagctttgtgatcgtaaatttgagcgttaatcatcagttcatctgcttctgtttcttcaataaactgttcaagcttgactttaatcgtctcaggacttccgacaatagaagagcccagctgctgttgaagagaagctttttcaaagtcagtccatagttcatccatattatccacaggagcttttagtttacccggtgtgtttcgaattaaatttagaaactgctgctgcatagaagtagccaaacgttcagcctctctatctgtatcagcagcgattatgtttacacctaacattgcatatggtttgtctaacacgtcggacggcttaaaataacggcgatacatgttaagagctgtcattgtattattaggtgagaagtgacttgcaaatgaaaatggcaaacctagctgtgcagaaagctgtgcgctaaaaccgcttgagccaagcagccaaatcggaatatttaaaccttgacctggaacagctttaacgcgcatctgactttctgaagccggtttaaagtattcttgcagttcagctagctgttctgggaagtcactgccgtcgcttctgcggtcgcgtcgcagcgcttgtgctgtcagctgatctgtccctggcgctcttcctaagcctaaatcaatacgtcctggaaatagtgattcaagcgtgccaaaatgctcagcaataacaagcggagaatggttaggaagcataatacctccagagcctacgcgaatacgtgacgtgcctgcagctacatgaccaattacaacagatgtagcggagcttgcgatacctgtcatattatgatgttcagctagccagtagcggttatacccccatttttcagcgtgctgagctaaatctaatgtatttctaagtgagtcagatacagttcctccttcaactacaggagaaagatccaatacggaaatcggaatatcttttaattctttactcatcaatttcatcttctttctttaaagacttcataggccttgttatttcaatggaatacaagtattttaacaataatctttcgagttccaaaatattttgcttcggttattttcctttaagttattgctctttatttacacaagcttttgagaaacaaaaagcttgtatggtatagggcagaagccgcctctttctataaaaagctgtcatattttatagtggaagggaggatgaatatagttactttaaatgaacttaaaagcaagcagtacgatatgatatacagtttaggctataactgttttccagggatatacataaaaaaatattctttgcgaaaacaagccggcgtgattgattggtgtattagcatttctctttctcatgtcaatcagctgttgaaaaatcgctgtaaagacttatttgtatatgaacatttaacctatatcagttctttcggagatggttccacgcttagactgcgtgataaggtgtatcaaattgattctgctcatgattttccgtcgtctattaatgcagagactaactggcttttatataatgaagtcaaagaaaaatatgaacggagaacggagcggtttttaacgtcgatggagaccagttcttgtatattgtttattcgtatgggcggaacgtatgaagaagcgaaagaattagagcatattttaaagggaatggtcaaaaacgatttctatatactgcttctgacaaacagtgaaaaagaacttttgtccgaagctaactgggacttgccttatacatgtgtcttacatgcacctattttttcaatggacgtgctgcgcgatgataaagtatgggaagagctcttaagcgggcttgttataaaataaaaggaactctttttgtttaatacgggaatgaaaaagctcgtttttttcatagactttgttatatctgtgtatcaaaggagatgaaaagatggaatctgatgtgcggaaggcgataaaagaaattgtatggctgctgctagaacaagaccagcgctggaatgagtatctagtacagctggaggatttgaaaatacaagtggatttgaatagttccgcatatgaagttctgagaaagatgacgggtaattacgaagtgctgcttgaacatatggatctcattcagcagtttgaaagtcattctaaaagtgaaacagcgctgaatgacttagttactatcgttatgaagcattactcattaaaaaattcataagcctgctttgtgcaggtttatggagtttaagctctcaatggaattcggtagagataatcgtttataataagtacatatggtgatgaaagggtgatcgatatggaagagaaacaagaaattgtacccgttcgtacagaggaaacagccaaatattattcggaagaaaaattttgggacaagcttaaaaagtttggtaaaaaagcgggagcaaacgttgtttatgccgtattgcttttatactacacgctgcaaaaacctgatattcccccaaaagcaaaagcagtcattataggagctttaggttattttattcttcctttagatttaattccggactttgcagcaggagttggatttacagatgatttaggagctctggggcttgcattgattcaagttgccatgtacattgatgaaggtgttaaactgaaagcaaaagaaaaaattaaaacgtggttttcagaagaacacaatttttccattattgatgctaaaataaagtaacgttatgatcgaaatgtaattattaaataaagtgagcaaaagaaggtgatagatgaatcatcttctttttaaccgataatatataggtctttgtgactattttaatccgttttatgtaaaaaaagcaggattaaaatatttttttcattaaaattttaagcaatgtaattgaataattgccctacaaatgttaagttaaaacatgttcataaattcgtcacagaaagcaatatacaaataagtaagatggtttgtaaaaactttgtgaaattatggaactttttaactgagagtttcaaactcttagagattcttcctcatcaatcagaagtcgctttctttcgtctcaagattaagcatctttcatttgaaggtgttttttttcagcctaagtaagccaacaacatgattgtatgacaagtttttgataaggttgtatagttactgtattgtatgacaagttttgtgtgatttgatgttaaataaatgaacagcttcgaagtaaataaatgattgcagaaaaacaaagtccatgcgttttcatgaaccattatacgttacttcatatttgtagagatgtttagcaaaaggggagatgaatggcctgacgtaaacaatatccatagacaagccttagaagataattatctttctaagaaagcaaatttatatgattgattctaatctaaacaatggagtgttcaaaaatggaaattagtcaaatctttattattttaaccccaatcttttttgttattttgctaggttatttagcagggtattttaaaaagtttgatgcaacaacatctaaagggttaaatacgcttgtaacaaaatttgcgttacctgcacatctattcgttggtattacaacaacatcaaaacaaacgcttattgaaaaatggccgtttttactagcattagttcttggtattattggattttatgttcttttcttacttgttgcaaaatatgtatttaaatactctttaacaggcgcgtctatgttctctttaaactctacgcagccaacgtttgcgtttatgggtattccagtattaggtagtttgtttggcgcggatgtagtagcaattccaatcgcaattactggtatcgtagtaaatgcgatgcttgatcctttagcaactattattggtacggttggacagcgtgaaagaagtgaaggcgattcagaagaaagcttatttaaagtaacgattaaatcaatcttacacggtctttctgagccgttagcctgtgttccgttaatcgcagtagtattagtattatgtggcttccaagctccagatttactatcaagcagcttagaccaaatcggttcaattacatctggtgcggctctattcgcagttggggtaacaattggtatccgtaaaattcaatttagcccagcggcatttggtattgcgattttaaaagtggctattcagccgcttgtaatgttaggaattgcaacagcaatgggtctatcatcagctgatatcgtgaaattagtattattagtagcgttcccaggttcagctgtagcagcgatgatttcagttcgctttgacagcttagctggtgaaacagcttcagcattcgtacttagtgccattatgtcacttgttacattaccgctattaatttcttggttaatgtaatcacatatatggatatagaacaaaaaaggctttgctattttagcaaagccttttttgtgtatctatacttaaaaaagctttaaaaattcttgagcgattttgggaagataactatcggtacgccacgtaactaaaggctcaattacaaatggattatcttctatgtttaaaattttaatatgttctagtgaaaaagaagatagcatcgaataaggaacaatggcagcaccaagaccacgacatactaaattaagaagcatcgctgagtcatggcattcgcataaaatattaggtgttatatccatctttttaaattccttcacaatgcgattatatatgcttatttcccggtttgagcgaagaagaataagagggagagaagcaatttcggcgactgaaatcttttctgttgcataaccactttctttaggaacggctacaacaaaaacatctggtgcaagtgtttttgttttgacatgtttataaggtaagtcagtagtagtgactgctacatcgatttttccttccgttaataattcgtttaagtgagctggttcgttttcataaatgttaaatgtgctgtttggatactgtttttgaataagagttagcttatcgagaaccgttgatgcacagtagattgtgcatccaatttcaagtttttcatttgttgcgtttttacattcctgtacttccaatactgatttttcgaccctttgcacaatttctttcgctcgttttaaaaaaagctctccttctaccgttaacaataagcgcttgttattatttcgttcaaaaagcaaaaggcctagctcattttcgagctgttttagctgcctgcttaaaggaggctgagccatatgcagacgctttgctgctttggtcacatttaattcttcagctatgacaataaaataatgcagctgtcttaattccactgtattcaactccatactttaaaggtattattatatattttatcaatattttaattgtatggaaaatgagtgtaaagttaaatgtgtaaccaaagcagagaggaggaagagaaatgaaaatagctgtaggaatcacaggagccacgggagctattttaggtattcggattttagagcttttgaagaaggcttctattgaaacgcatttaatcatgtcgacttgggctcatgccacaattaagctggaaacaccgtatagcgttcagcaagtagaagcgctagcagattattgttattcatatcaagaccaagcagcaaaaatttcgagcggttcttttcgtatagatggaatgattgttagtccttgcagtatgaaaacattagcatctattcgaatgggactagcagataacttaatagcgagaacggcagatgtgatgttaaaagaaagaaagccactggtgctacttcctcgagaaacgcctttgaatacgattcatttagaaaacatgctggatctttcaaaaatgggcgctatccttgtgcctcctatgccggcattttataacaaacctgagacgattgatgatattgtcacccatattgctgttcgaacgttagatcaattagggattgagcttcctgaggcaaaaagatggaatggaattaaacatttatcacaaggaggaaaataaacatggcttataaagattttagagatttccttaatacgctacataaagaagggcagctactgacgattacagatgaagtgcagcctgatccagatttaggttcagcaggtcaagccatcagtaatttaggagaccaaacgccgggattattatttaccaatatttatgggtacaacagcgcaaaggtagccctaaacgtaatgggttcctggtcaaatcacgcattaatgatgggaatgcctaaatcaactcctgtaaaagaacagttctttgaatttgctcggagatatgaaaaatttcctgtcaaagtaaaaagagaagaaacagcgccatttcatgagtgtgaaattaaagatgatatcaacttattcgaccttttgccgttgtttcgcttgaatcaaggagacggaggctactatctagataaagcgtgcgttatttctcgtgatcagcatgataaggagaactttggcaaacaaaacgtaggtatatatcgtatgcaggtcaaagggaaagaccgtttaggcattcaacctgtgccacagcatgatattgccattcacttgaaacaagccgaagaaaaaggtgaaaacctccctgtatcaattgctttaggatgtgaacctgcgattgtcacagcagccgctacgccgcttcattacgatcaatcagagtatgaaatggcaggagctattcaaggtgagccatacagaattgtgaagtctcagctttctgatttagatgtaccttggggagcagaagtgattttagagggagaaattttagctggtgaacgtgaatatgaaggtccttttggcgaatttacaggtcattactccggtggcagaagcatgcctgttatcaaaatcaatcgtgtataccatcgcaaagatcctatttttgaaagtctatatatcggtatgccttggacagaaacagattatttaattggaatcaatacaagcgttcctttatatcagcagctaaaagaagcatatcctgaagagattgaagctgtgaatgcgatgtatactcatggtctcgttgctatcatttcaacgaaaagccgatacggaggatttgctaaggcggttggtatgagggcattgactacgccgcatggattaggatattgcaagctagttattttagtagacgaagatgtggatccgtttaatttaccgcaagtcatgtgggcgctatcgacaaaaatgcacccaaaacatgatgttataacagtgcctaatctttcagttctgccacttgatccaggatctgagccggctggtattacagataaaatgattttggacgctacaacaccagttgcaccggaaacaagaggccactattctcagcctttagatacaccacttgaaactgaaaaatgggaaaaaatcttaacgaatatgatgcaaaaataaacaaggaggaatcgacatgcatacttgtccaagatgtgaagccaaacaagcgaacttagtatctaaatcaccagttgaaggagcctgggagatttacttatgcaacgtgtgtttgtttacctggcgttcttctgaacctgagaccatcaccaatcctgaaaaataccctcgaccatttaaagtcaatccaaaagacgtaccgctggcaacgcacgtgcctcctgtgccaccccgatcttaatcagcaaaggtggtaagtaaaatgaataaagcagagctgccaaaagtcgtgcgcgtatttttaaatggaaaagacttagaaagaaaacagcatgatgcgatgctgctatctacagtgacatccgagggttttcctcatgtagcaatgattagcgcaggagagctggtagctattagctcttcacgcgtcaagctgttagtatggaaagataccacgtcttcaaaaaacatgatacagaatcataaggcaaccgttacattagttgttgaaggaaaagcttattacattaaattttggctaaaaaaagaagctcctgtgttatcaggctatgagttatttacgggagaagtagccgctgttaaagaagattacgcaaaatatgcagttttaacatcaggaattcaatttcagcttcatgattctaaagaggtactgagccgctggaagcaatcaattaaggctgttctttctactgaaaaaaccgattcttaaaaataagaatcggttttttagctgtagtgaaattttttcaaatagcatgctagctgaacttttaataggtgttcactgtttgtaaatgtttacctgaatgtaaacaagaagaaatagcttttgccaaagctatttacgagtctacatccgctgaagataaagaagcagcaaaaaaacaagtggattcactgctagacaaagctttagcgaatcatccagtcttcaaccaaattgctcctatgtctaaaaatgcttcctttatgacaggatcaactgatgtcgcagacgttagctggaatgttccaactgcacagtgcgtgaccgcaacatgggcttatgctacgccgtttcatacatggcaagctgttgcccaagggaaaacggagtatgcccatgatgcgatgttattgactggaaaagccatcgcggctacggcgattgaaatgatagaaaatcaagagctgattagtcaagcgaaacaagagctggaggataggctagaaggggaaagctatgaatgtcttgtgccttcacatatacacccacctaattactcagaaagtgagcaggaagactatagtgtggtataaaaaaacgaggcgggaaaaaacgtattttcgtgtaaggaagatccgaacgattcatcgttcggatttttttattgttaggttgaacgtaggtttcatttatcccgtttgttcgcctttagattggatcgatgtagttatggctcaatctctttttttgttttcattaaaaataaatggttaaaaatatatctctttgctgaacctaaccctatctaattgtttaggaaaagaggtaaaaaaacatgagagcatataaagtagaaaaagatgggtcaatttcaacttcactaaaaggaaaatcagttttatccacttcttatttaaataaaggttctgcttttactgaagaagaaagagaaaaccttcatctgcagggacttcttcctccaacggttttaacgttagaagaacaggtgaagagagcatatgagcagttcaaaaaagcaccgaatgatcttcaaaaaaataattcgttgaatgatctgcataaccggaacgtcgtcttattttatcgtttattaaccgatcatttaagtgaaatgcttcctattatttacacgcctactgtaggtcaatccattcaagaatacagccatgaataccaccgtcctgacggactatatttatctgtaaatgaagcggatcgattaagtgatgcgattgaaaacttaggacttgacggtaaagatattgatttgctcgttgtaacggattcagaaagtattctcggcatcggggattggggtgtgggagggataaatattgcagttggaaagttagcggtctacacagctgcagcaggaattgacccaagccgcgtactgcctgttgttcttgacatggggaccaataacaaaaagcttcttgaagatcctttgtatttaggaaatcgtcatgaacgagtaaaaggagaagactataatcgttttattgctcaatttgtaaaagaaataacgaccaagtttcctaaaacgcttcttcattgggaggatcttgggaatattaacgcgcgtcacattatgaaagaatacggcgataaaattttaacgtttaatgatgatattcaaggaacgggagtaattactcttgcagccgttttaacagcggtgcgcattacaggaacgcctttaaaagatcagagggttgttgtatttggaccgggatctgctggaattgggaacgctgatcgtattcatagtgcgatgatgcttgaagggctgtctgaagaagaagcatatgatcgtttttgggcatatgattacagaggtctgttaaccgaagatatggaagatttagctccttttcaacagccgtatgttcgccaaaatgaagagattaaagaatgggaaaaagacgataaaaataaaatttcactgttagagcttgtcaagcaagtgaagccaacgattttaattggaacgtcaggcgtcacggatgcttttaccgaagaaattattaaagaaatggcaaagcatgtagagcgcccggtgattatgccgctttcaaacccaactaaacttgctgaagctgttccggaaaatattataaaatggacggaaggaaaagcccttattgcgacgggaagtccatttgaacccgttgaatataacgggcacacttatgaaatcggacaggctaataatgcatttgtgtttccgggtcttggtttaggtgcaattgtggttcgcgctcaaaagtttactgaatctatgtttgcagaagcagccaatgcagtagcgcgtatagcagaaacagatacaaaaggagatacgcttcttcccaacattaaagatcttcaaaaagtatcaaaggcggttgctgtagcagttgccgatgctgctgtaaaagataacgtagcaactgttaccgagcaaaatgtaaatgaacttgtagaagcagcggtatggcagcctgtttataaaccggttaaggcaaaaaatgaatgaggtgaatgataaatgagcataggtcaaatttttctcattctcgtgcctatcttttttgtcattttgcttggttatttagcagggcactttaaaaaatttgataagcaaacgtctaaggggctcaacacattagtaacgaagtttgcgcttcctgcacacttatttgtaggtgtaacgacaacgccaagaaaaacactcatagacgaatggccgtttttagtagcgctgattttaggaatcgtcgggttttacctcattatattgctcgtcgtgaagtatgcagggaagcatacgttaactgcctcttctatgtttgccctaaactcagctcagccaacgtttgcttttatgggcattccagtactcggaggattgttcggtgcgggcgcagtagcgatcccaattgccataacaggaatcgtggtgaatgcaattttagatccgctggcaacgattttaggaaccgttggacaacgggggcgaaaaaaaggggaagagaaaacaagtttatttaaagtaacggttcattccattttgcatggtttatctgagcctttggcatgtgtaccgttaattggggtgattttaacgctttgcggctttcagtcacctaaacttttacaggatatgcttgatcaaatcggaagtatcacatcgggagcagctttgtttgcggtaggagtaacgattggaattggaaaaattaacttcagtaaaggcgcgcttgggatagccgtcttaaaagtagcggttcaacccatcgttatgctcggaattgcagtatggataggattgtcttcagatgaagtgacaaaagctattttactggtagcttttcctgggtctgctgtagctgcgatgattgctttgcggtttgaaagtttggaaaacgaaaccgcatctgcttttgtcattagtgctattttatcgttggttacgctgccgcttcttatttcttggcttatgtaaataaaaaaacgaaagaggagaattcctctttcgttttaagaaggattaataagctaatgcaaataatcctttgatatgagataagtaacgaacgttacttgcttctttcataagtgatgctggtaaaccttttaattgcgttttgtttccgccgattgtaccaattgcatctttgcgtccaagacttcctagtgtaccagagaagacaggaacgaatgattccattgctccgccgcgaatagctactgctaagttcacgcctacaacttcacccatttgccaagctaattgagcagtaggtgggtaagggcgaccttctggacccattacaaccgctgagtcaccagcaaggaatacatctttatgagatgtagattgtaagaattcatttacaagtgcacgaccgcggtttacttcgatacctgagttagcaactacagagttaccttgaactccgccagtccataccattgtttttgtttcaattttgctgccgtctttaagttcaacagttgtagcatccatttttgttacaggtgtaccagtaacgaatgtaacgccgcgttttgttaagcttgattgagcgcgctctactaattcagcagggaagcctggaagaactgtaggagctgcttctacacagtatagagaaatttcttttggatcaacaccgtgttttaagcataggcttggcattaagtcagcgtattcaccaacaagttcgatacctgttaatccgccgccgccaactacgattgtaccgtcagctttattttttgttttgctgtattcagcgatacaagcttctacgtgtgcacgtaaacggtttgcatcatttactgatttaagaacgaagctgtgctcttctaaaccagggataccgaagtaagcagtttcactacctaaagctgtaacaaggtagtcgtagcttaattttgtaccatcttcaagagatacttcacgttgatctggtgagatttcttttaccgttgcaatttttaaatcaacgttgtagtttttaagtaatttatcaagtggtaaagctaccgcttgttcagaaacgccgcctacagctagacggtgtaattctgtaatgatttggtgagtagcaaaacggtttactactgtaatttttgcttcatccgcacttaggtgttggcgagctgtcattgcagttaataaaccaccgtaaccgccgcctaaaattaaaatatgttttgacatagtcgatcctccgtccacactttttaatgaaaattatttttgtttttcgtttgtaatgtctaaatacgcttgtgcaaagcggaatagtttttgagcttgtggatctttaagcatgcgtaataaaccgaataaaccgattgaattagaagcatttgcttctgcacgatcgtttgcttcgattgcagtagctgcaagaccttttactgttccttctactggctcgataaattcttttactccaccaagtagatcttcttttaatacgtcgtcagttaataatgattgcgcaacgtcgtaagtttttgtaagcaccgttaccatttcagataattttggtaaattatctacaagaacagtaagagcttcttgtacttcaggctttaacaattgatctaacacatccgcttgacctttgttaactgccgcttctgtttgtacagcagcattttcctctgcagctgatttttgaatagttgattgagacatgaaaagtcctcctttgctggatactgttgcatatgtagttcctagttatctgctagactttcaaactacattgtgaagttgtgaaatcttgcacataattctattttaattttaatacgagataaaatcaactcattttgttgaaaaaataagtgaagaacctcgtaaccctttgtttaataaaagtttataaaaaataaagcgaataattgcctaggtaaacaaaattaaaatagggaactaacatgattcctcttcctacgataaaacaaataacgtcatatttcaacacatacgaacttaatattctataagtagtaaaaagatagggcgcatttactatttaaagagttttcaaaaaattgcattgacttactacggtgttctacatataatcagaatataacatcttatgtaaggagatataacatggttatagtggatgaactttatcataatgtggtcattacattgcctcaattaaaattaattgaatttataatgaagttaaaagaagctaaagcacaagaaatagaagatataaaaaagaaaattagtaaatacgaagagaagaaacgtgctgaagaagcttggtatcaatcactatcaccgtttcgtaaattttttaccgggcgtcctttaagtcagcatcaagcggtcgagtatatggtatacgtaaaggaacgctttaaaaaaattgatcaccttaaagcacaaatgcgagaacttcatgaagttcttgaattaataaaagcggaaaatgaagaaacaagtgaaattacgctttcgtctgctattgtacaagaaataaaacgattaaaaagcagtggaggcgttgggatatgagtgttaatgaactaagtttagggatgaatacaacgtgggtcgtgttaacagcggcgatgattttgttaatggaaggcggctttgccttgctagaggcaggttttgtccgctacaaaaatagcgtgaatattattatgaaagtattcgctgatattacaataggaacgctttgtttctatttaattggttttggattaatgtacggagatgatttaggtggagttgtcggtaaaagcggttttgcgctatcaggtaatttatcgcaccttgacattccaattgggcttgaagcgttttggttgtttcaatgtgcatttgttattgcggtcatttctatcgtttctggagcggtagcagaacgaattaatttccgtgcataccttttatatgcgattttgatgactacatttatttatcctctagccggacactggatttggggaggcggatggattagtaagttagggatgcttgattttgccggttcggcagttatccatgctctaggcggtttttcagctttagcagctgcaataatgattggaccgaggaaagggaagttcacaaaaaatggaattagttctgtttctcttccaagtaatttgccgcttgcatcagtgggtgcttttttattatggtttggatggttcgggtttaatgcaggaagtacgctaagtgccactgacgttagaattggtcacattgctattgtcacaatgttatcagcagcagcaggcggagcagttactttattttatactttatttcgctacaaccgttcagatgcaccttctgtaataaatggatcgcttgccggactggttggcattacggccgggtgcgcttttgttaacacaccatctgctatttttattggagctgtatctggcttattaatgatggcagctacaaactggctcgaagcacgtcaaatcgacgatcctgtaggagcttttcctgtacacgctgcttcgggaatatggggcacgttggctgtgggcttgttttctacagacgggggtgtgtttacaggaggaggctggacgttacttggcgttcaacttcttgggttaatcgctctatgcgcttggggatttgttacgacgtggatagggttaaaggttatttccttggtggttccgcttcgatctacggaagaagaagaagaagtaggcttagatatcagctaccacggtatcatggcagctcatcaagctcctgaatttattgaatatgaaaactactatgcggaagtaaaagaaaaagccgcagattcgtaataaaaggccgctctttacaacaaaagggcggtctttttatgtgaaaaaaatagatttaaaatacttggtttaaatgattgaaaagtcagaatatttgtgttatattataaaaaagccaaggagttgatttcttatgaaaaagaatttacttaattcaccgcaaaaatccaacggaaaggtgcttgatgcattattcgctgagatgattttagacaaggcgattgcagaatttcgtaaagcacagctaaaagaagaaatcgaccgcacgctattgatgaaaaataaagaagagtttttaaaactctcatcagaacttaaacaaatttcttaattacttactatactt

SEQ ID NO: 7 - DNA, 197670 bp, Priestia aryabhattai
  source 1..197670: mol_type = genomic DNA
actgtttcgttcagttttcaaagaactcttgtcttaaagcgactcctatataataacactttttaagaatcgttgtcaacacttttatatgacttttttaaaactactaaaaaactcatatatgttttgctgactttttatatattaccaaaatgaaaagcctatggcaaggtttttttacataaaaaaagcccctgctttttcaggggcttttttttattcttccgtttcttcagcttcaattattatatctgtttcttcatgttcatctaattcatctaaaacttcgtcttcatcttctgaagtttgtacttttgcaaccgttgaaacaaactcttcgtctcctaaacggatgactttgacaccttgtgtgttacggcccatttgtgaaatatctgaaacagaaacacggataagaacgccgcttactgtaataagcataatatcttcttcttgagatacgcatttcagtgcgacaacatcaccatttttatcagtgatattacatgttcttaaacctttaccgcctcttgtttgcacacgatattcttcaatcggcgtacgttttccataaccatttttcgtaatgatcaagatatctgattgttcttcgagaatctccataccgattacttcatcttctgaatcgagagtgatccctttaactccagtagctgtacgtcccattgaacgaacatcattttcattaaaacgaattaacatacccttcttcgttccaataaccatatcgcgcttaccatctgtcaatttaacagaaatcaattcatcttcttctcttaaattcaaggcgataagtccgctatttcgaatgttctcaaaagaagataaaggtgtgcgcttagaaattccttgttttgtagtaaagaatagataccaatcgtctacaaattcatcgacgcgaatgatggcatttacccactcacccttgtctacttctaacaagttaataataggtatccctttagccgttcttccgtactctggaatttcgtatcctttcgtacggtaaacttttcccttatttgtaaagaagagaatcgtatcatgagtagaagttgttagaagatgttcaacaaaatcatcttcgtttgtattcattccttgaatacctcttccgcctcttcgctgactcttatacgtagaaacaggcaaacgtttaatatagccgttgtgcgttaagctaataacaatatcttggcgaggaatcagatcctcgtcttcgataatttcagctcctccgcttacgatttctgttcgacggccgtcattgaatctttcttttacttctattagttcttctctaataatttctaatactttttcttcatctgctaaaatagcttttaactcagcaattagcgctaataaagattgatattctgcttcaatcttctctcgctctaatcctgttaaacgctgtaggcgcatatccaaaatagcttgcgcttgtttttcagataacgaaaactgcgtcattaatccttcacgtgcaatgtctgttgtttgagaacctctaattaaagcaataacagcatctaaattatcaagagcaatctttaaaccttctaaaatatgcgcacgtgcttctgcttttcgaagttcaaattcagtacgacggcgaataaccactacctgatggtctaagtagtactgtagacattgcttcaagttcaatacttttggctgtccatctactaatgcaagggtattaataccaaaacttgtttgaagagatgtctgcttatataagttgtttaataaaacatttgcatttgcatcacgtcttacttcaataacaatacgcatacccgaacggtcagactcatctcgtaaatccgtaattccatcaatcttcttatcacgggctagctcggcaattttttcaattagctttgctttatttacttggtatggaagttcatgaacaagaatagtttgtttaccattgctttgttcttcaatttctacttttgcgcgaacaataatagaaccttttccagtttcataagctttacgaattccgctgcgcccaagaatttgtcctgcagttgggaaatccgggcctggaataatctccattaactctgcaattgtgatatcagggtcttgacttacagctaaaacgccgtcaatgacttcccctaactgatgcggaggaatatttgtcgccatacctaccgcaattccggctgaaccgtttacaagtaaatttggaaatctagcaggtaataccattggttcacgttcagaaccgtcatagttatcttggtaatcaatggtatctttattgatgtcacgtaacagttccatcgaaacttttgacattcttgcttctgtataacgcatagctgctgctgcatctccatcaacagatccaaagtttccatgaccgtcaattagcatataacgatagctaaaatcttgtgccatacgaaccattgtttcatatacagctgagtcaccgtgtgggtgatacttaccaattacttctcctacgatacgagctgattttttatatggcttatccgatcccatacctaaatcattcattgcatataaaatacgacggtgcacaggcttaagtccgtctcttacatctggtaaagcacgcgatacaattacgctcattgcataatctaaaaaggatgcgcgcatttcttgactaatatttacttctcttatttgagagtttggtttatctgacatcgataagaacctccttcgcgaagttcagtatagtaattcatatatatgtaaacgcaggatagaacctatctctatcctgacgtttatataccctttataaaaaatataaagggtattaccgttcatttaaatatcaagattttttacgtactgagcattttcttcaatgaaattacggcgcggttctactttgtcgcccattaaaatttcaaatgtctcatcagcttcaattgcatcttgcaagttcacctgaagaagggtacggaactctggatccattgttgtttcccataattgttcaggattcatctctcctaaacctttgtaacgctgaaggtttggttttgcgccttcagggaaagaagctaatacctcttctaattgacgatcgttgtacgcatactccacttttttaccttgtgtaactttgtaaagaggcggctgggcaatgtacacatatccgtgctcaataatctgtctcatatagcgatagaagaacgttagaagaagcgtacgaatatgcgcaccgtctacgtctgcatctgtcataatcacaattttatggtagcgggctttcgaaatatcaaaatcgtcaccaatacccgttcctagagcggtaatgattgtacgaatttcgttattagataaaattttatctaaacgcgctttctctacattgataattttaccacgcaaaggcaaaatagcttggaaatgacggcttcttccctgcttagctgaacctccggcagagtcaccctctactacataaagttcgctaatagaaggatcttttgatgaacaatccgctaatttacccggtaagtttgaaatttcaagcgcgcttttacggcgtgtaagctcacgagcttttttagctgccattcttgctcttgcagccattaaacctttttcaattacctttttcgccacaatagggttctctagcaagtaagtttctaagtgttctgcaaacacagagtcggtaattgttcttgcttcactatttcccagctttgtttttgtttgtccttcgaactgcggatctgggtgcttaatagagatgatagctgtaattccttcacgaacatcttcacccgttagattggcgtcactgtctttaaatacgctgtttttacgtgcatagtcgttaattacacgcgttaacgctgttttaaatcctgcttcgtgcgttccaccttcatatgtgtgaatgttgtttgcaaaagaatataaattacttgtatagctatcgttatattgaatagcaatttctacagaaatgttgtctcgattaccttcaatatagatcggctcttcatgaatcacttcttttgcacggtttaagtgttcaacgtaagacttaattccgccttcatagtgatattcacgtcttttatcttcttcacgtttgtcttcaatcgtaattttaatgccgcgatttaagaaagctaactcacgcagacgattagctaacgtatcaaaatcgtattcaagcgtttctgtaaaaatttcactgtctggacggaattgaataacagtacctgttttatctgtttctccaactacttttaagtcagcagccggtacacctcgttcatatttttgataatgaactttaccgtcacgatgtacgtgcacttccaaagaggtagaaagtgcgttaacaactgaggcacctacaccgtgtaatccaccagatactttatagccgccgccgccaaatttacctccggcatgaagaaccgttaagataacttcaacggcaggtctgcccattttttcttgaataccaaccggaattccacgaccgttatctttgactgtaatactattatctttttcgataataacattaatttcatcgcaatagccggccagcgcttcatcaatactattatctacaatttcccatacaagatgatgtaaaccctttgcgctcgtcgatccaatatacatccccggacgtttacgaacagcttctaatccttctaatacttgtatctgatcagcttcatatgcttgtacttctttttgttccatcgtcaaatgtatcacctacacttttttttaacagcaaactgctgtatttatcattttgtattatgtttttcaaatattatgtggaaataatacggagcctttaatgtatttgcaatttgtttacttatgcacaaaattttcataatcgagggtacgagttgaaatatatagacttaaaactataatgatatcatatttcagttagattgccttgcgaaaagtttttagacagatcaattgctatttgaccttttgaatttggccagcttctacgtgatatgtagcggctttttctaaggtctcgtgatgaattccttcaatgctcgttgtcgttacaaacgtctgaacttttccttgaatggtatttagcaagtgtgattgacgaaaatcatctaattcagacaatacgtcgtctaaaagcaagattggatattcacctacttcttgatgaattaactcaatttcagcaagctttaacgataaagcagtcgtccgctgttgcccttgtgaaccaaatgtttgaacgtctttctcattaacgtagaaaagaagatcatcacggtgtggtcctgctaaggtgacacctctatcaatttctctactttttattttatcaaacttttgatgatatgcttctaacattttcgacaaatctgcatcttctgatacatcaattgaattcttatactcaatttttaatgtttctaagtctcgactgatccctttatgaataggctctgcccactgttggagtaattgtaaaaactcaaaacgtttttttaagattttcgccgccatttcacttaactgtaacgtaagtacgtctaaaagtgaaagatccgtttgtttttttgtctgcagctgcttcaaatattgatttctttgctgcaaaatcttttgatacctgcttaaatcatgcatgtaaacaggcgaaacttgaccaatctccatatcgataaatttgcgccttacttgcggactccctttaactaggttcaaatcctccggagcaaacatgacagtgttaattgaccctatatattgactgagttttttctgctcaatgtgattatattttgcttttttcccttttgttgagatgactaaatccagtgtaacaggccctctatgcttttctacaatgcccgatagctttgcatactcacagtcccatttaattaattctttatcgttggatgtacgatgagatttagccatagataatacgaagatcgattccatcacgtttgttttaccctgtgcgttttcacccaaaatgacgtttactttattttcaaaaggaatcgttgtcttcgtatagtttcggtaatttgttaaagtaatttctttaatatacaaacgtttcaccaactttaagtaatgacaacaaatgatcctgcagccggtatatccacttcgtcatttgcatataatttacgtccgcggcgctcttctagctccccgtttacatatacttcgtgctcacttaaaaaccattttaccattccacctgtttgaatgacgtctgctagttttaaaaactggccaagcgtaatgtattcagttgaaattttaacttctgttttcatgcgactctctcactttctaatgatgtatctctattttactaaataattctccttgagaaaagaaagctactagtacggcatgctagtagctttctgagatttaatatgttcgcactggtaaaatcagctgcagcattgaatcatcctctaatgttcgaatgacaaatggacgcatcgcaccagtgaagttaattttgatatctgttccttcgagcgcttttaatgcgtctaacatatattttgcgctaaaagaaatttttaattcttctcctgagatagactgactttgtacctcttcaattacttttccgatttcaggagagttagaagagatttcaacaattccctcatccagcgtcgatagttttactacgttgtttcttccttcacgagctaataaagaagcgcggtcaatcgattgcaagaattcttttacgttcaatataacatccgttttactatcagctgggatcaatcttgaagtatcaggataatttccgtccaataatcttgagaaaaatagtaaatgttttgttttgaataatacttgattttccgtgataacaatgtctactaattcatgagaatcatcaaggatcttactgaattcacttaaacttttacctggaataaccacattatacgttgcttcatttccagtttcaatggtcgcttttcgcaaagctagacggtggctgtcagtggcaatgcacgttaattctttgccatcaactttccagtttacacctgtcaagataggtcgtgtttctgaggtggacactgcaaagacagtttgtcgaatcatgttttttaataagtctgtcggtaatctaaacatgttgttttcttcgatctgtggtaaatgaggatactcttctgcatctaaaccatttaagttaaattcagcttttcctgaacgaatgattgttaaaaagtgactttggacgtctaattctacaatgtctttaggaagttttttgacgatttcactaaagaaacgagctgggagaacaacgcttcctggtttttggatatcaacagtctcttttccttcttcttcgtttggaataaacgattcaatcgagatatcggaatcacttcctgttaaggtaacaccttcttcagtcgctacaattttaatccccgttaaaattggaattgttgttctagaagatacagctttcataacgtcttgaacgctttgaactagatagtctttctgtatgataaatttcataataattaatcctccttaaaagtaggtttaaaagcttattatttattatattttaagatagtagtagtaataggggctgtggaaatgtggataacccctaaaaacgtgagaacacagcctatccacatgtggacagactgtgtacaatcctaactcacttatacacaaaatacaagtaaaaaaagcctatatttttagtgattcacttatttctttaatttgtttttgtaggtcagtatctgtttgaacaagttttgagattttttcatgagcatggatgacagtagtatggtctcgcccgccaaactcttctccaattttaggcagcgaaaaatccgttagttcgcgagaaaggtacatggcaatttgtctaggaaacgcaactgactttgtacgtttcttcgctttgaaatcatctaattttatattaaattcttgtccaacaatctgttggatgtcttgaatcgtaataaccctaggttttgaactaggaatgatatcttttaatgcttctgctgctaaatcagcgtttatatctttattaattagtgaagaataagctactacacgaataagtgcgccttctaattctctaatatttgaatcaatctgattggcgatataaagcataacttcatttggaataactaagccgtccgcttttgcttttttacgcaaaatagcaattcgtgtttccaaatctggtggtgtgatgtctgtaataaggccccattcaaagcgagagcgaagtcgatcttcaagtgtaggaatttctttcggcggtcgatcacttgagatgacaatctgcttactttcttcgtgaagcgtattaaacgtatggaaaaattcttcttgtgtctgctctttacctgctaagaattgaatatcatcaatcagtaaaacatctacattacggtatttgttgcggaattctactgctttattgtcacgaatagagttaataaactcatttgtgaatttttcagatgataagtacacgactttcgcggcaggattatgatctaacacatagtggcctatggcgtgcattaagtgtgttttacctaatcctactcccccgtaaataaaaagcggattatacgctttagccggcgcttctgctactgctaaagaagctgcatgcgcaaaccgatttccagatccgataacaaatgtatcaaaggtatacttcgaatttagcatgctttgaggaaattctgctccttcgtctttattgactttctttttaggagtttgaatatcgaattcttcctcggcctggttaggaggaataataaattttacatctaactcttcccccgtaagatcataaagtgtttcagcaattaaattagaatacctagattctaaccagtcccgtgcaaaatcattaggcgcagtaataatgagcgtgtctccttgtaaagcatgagcttttgtcgatttgagccaggtttcaaaactaggtttgcttaattttttttcaatttgatctaaagctctattccataaatcatgaatgttttccaacgagcaatccctcctttttctagcttttatgcgcgttgtacaactcttgtacaatctgtacaaaaccttatgcataaaaattttatatttatacaattgctattatgtgggtaaatatatattatagaagaaagccgactattcgacagattccacatgctgtggataactttatacagtgatagtggaaatgtgtccacaagttgtccacagtttgtggataaaaaccaactgtggaaaagtaattaagagtgaaaacaaaaatataatatcaaagaattcggcatgatgcaatgaattttcgaaacttatccacaatcactacaccttgtggaggaaagttttccacaacacaagatagtgtgcatgagttgtcgataagaaatggaaaagtagaaaaatgtcgaaaaaacttatccacaaaggtttaagagaagaatttgaataaaaaagaggctttttataacatttattgttgtagttttgttcagtaacgatgcgatcgcagctggtagagaaagaaaaagtgatgaaaaggaaaaattttttctttaataaatcaatgaattttgttgattaggtatagacaattgggttataaagatattagaatgaagaagattgagtaaaacagataatgaaaccaagagattgaaaattttattttttaaataacattgacatcttcttagtcttttcattataattgcaaggactgtctttttcagttattcctcgaggaggtgtttatagatgaaaagaacttaccaaccaaacaaacgtaagcacagtaaagtacacggtttccgcgctcgtatgagctcagcgaatggacgtaaagttttagctcgtcgtcgtcgtaaaggaagaaaagtattatcagcataatagaccactgacgccagtggtcttttttcgctttataagactaaaatcacctctgttcctgtagggactacataaaagcatgacctgaaaaagggcaggagttgttaaaaatgaaaaaaagatatcgtataaaaaagaatgatgaatttcaaacagtttttaaaaagggcaagtccgtagcgaatcgccaatttgtcttgtatgttctagacaaaccggatcaagagcatttccgcgtaggattctccgtgggcaaaaagattggaaatgccgtgactcgtaatcgagttaagcgccttgctaaacaaattatgtttgaattcacaccgtatttgaagcaagacaaagattatattgtaattgcaaggcagcctgctgcaacaatgagctatgaagaaattaaaagcagcttgcagcatgtctttaagcgtggcaaattacttacacatagacacaacgattaataaacaatagaagaaaagcctttaatagctgttgtttttctaccgcatccttatataatggattttgacgcactttcagaattgaaaggtgaacatgtagaaggaggaaaaacaggtgaagaagaagttgtttttagggataacgcttatctttctattaactgttttagcgggttgtacggaaattaaccaacctattacagatgatagtaaaggtttttggaatgagtatgttgtgtatccgctgtcattagtcattacgtatctggcggaggtatttaaaagctatggagttgcgatcatcgttgtcacaatcctgattcgcttacttattctaccgcttatgattaaacagatgagaaacacgaaagcaatgcagacgcttcagcccgaaatgcagaagttaaaggagaagtacagttcaaaagatgcccagacgcagcagcaattgcagaaagaaacgatggcattattccaaacttacggagtaaatcctttagccgggtgcttcccaattctaattcaaatgcccattcttattgggattttccacgcgattacacgaacgtcagaaatcgcaaacaacagctttttatggtttgatttaggtgcgcgtgacccgctatttatcttaccagttgtcgcaggaatcacaacgtttattcagcaaaagatgatgatgggcggaaatgtaaatcaaaatcctcaaatggctatgatgctttgggttatgccaatcatgattgtcgtttttgcaatcaattttccagccgccttatctctttattgggtagtgggaaatctatttatgattattcaaacctacttcattaaagggccagacttaaaacaagcgaatattgaaggggttaaaaaatgaacgaaatcacaattacggcccagacgattgaagctgctgttcaagaagcattagatgctttagaagtagagcgaaatcaaacaaatgtagaaataattgaaccaggcaaaaaaggatttttaggaatctttaagggaaaacccgcagttgtaaaagttacaaaaatagttgaccctgtagaggaagcggttcattttattacaaatgttagccgtgaaatggggatttcgattcatacgaacgtcaaaaaaacctcgagaaactgcataattgagattagtagcgattcagcgggaatgctgattggaaaacatggacaaaccctcaatgcactccagcttctcacacaattggtagctaatcgatacggtcagcaatttttaaatgttgtattaaatccagaaaactaccgagaaaaacgaaaagaaatggtcgaaaaactggcattaaaaatagctaatcaggcgatcaaaacgaatcaatctgttcaactagaaccaatgccttctcatgaaagaaaaatgattcaccaagcgttagctaaaaattctttagttgagacacaatccgttggcaaagaacccaaaagaagtattttggttcagccagttgccaaaaagcactagcaaaataagctagtgcttttttatgtgcttatttttatcgatctagcgctcaaaaaaatcaagatgcatacgttgttattcacatgtggataagttaaaatagtacatactgcctgtttttcttgctgtgtataacagaagaacgttagagatgttccaaaccggtgaattgtggtattctatttatttggttcatacaaatcacgggccttaaaatagatgtttttgttcgtggaaaattgttaacgatgatagtatataacatcgtttaaaataaaaggtttataaaatgaaatgaggtgaagttggtgctagattttgatacaattgcggccatttctacaccaatgggagaaggagctattgccatcgtccgcctgagtggtgaagaagcagttacgattgcagatcgtatctttaaaagcgtttcgaataaacgattaacagacgtagcttctcataccattcactacggtcatatcgtagatcccaagacagagcaagtcgttgaagaagtgatgctttccattatgaaaggtcccaagacatttactagagaagacattattgaaattaactgtcacggaggaattgtatcggttaatcgtgtgctgcagttagttattgcaaatggtgcccgtttagctgagccgggtgagtttacaaaacgagcatttttaaatggtcgagtagacttatcacaagcagaagctgtaatggatttaattcgtgccaaaacagataaagcgatgaatatggcgattggtcaaatggaagggcgtttgtccaagctagtacgtcatttacggcaggaaattcttgaaacacttgcccatgtagaagtaaacattgactacccagaatatgacgatgtagaggaaatgactcaccaagtattgatcgaaaaagcttcaaatgtacgccaagaaattgataagcttcttcaaacctctcatcaagggaaaattttaagagaaggattggctacggttattattggacgtcctaatgtagggaaatcttctcttctaaatagtttagtgcaagatgcaaaggccattgtcacagacattcctggaacgacgcgagatgtaatcgaagagtacgtcaatgtgcgaggagttcctctgcgattagttgatacagctggaattcgtgaaacagaagatattgtagaacgaattggtgtggaacgctcccgtcagtatttgaaagaagcagatttaattttgcttgtgttgaattttaatgaagaactaacggacgaagataaaaagctatttgaagctgtaaaaggcatggacgttatcgtgattgtgaataaaacagatcttgagcaaaaaattaatctagaggaagtgcagcaatttgctggtgatcatccaatagtgacgacttcgcttcttcaagaacaaggagtagatcagcttgaagaagcaatcgcagctcttttctttggaggaacaattgaatctcaagatttaacatatttatctaatacaagacatattgcgcttttaacgcaagcaagaggagctatcgatgaggctatcacaggcattgaaagtggtgttccaatcgatattgtccagattgatttaacaagaacgtgggaactattaggtgaaattattggtgatgctgttcatgaaagcttaattgatcagttgttctctcaattctgtttaggaaaatagattattaaaggaggctactattatgcaatatgaaggtggacaatatgatgttattgtcattggagcgggtcatgcaggttgtgaagcggcacttgcttctgcgcgtatgggtgctaaaacgttaacgttgaccatcaacttagacatggtggcgtttatgccctgcaacccttctgtagggggtcctgcaaaaggtattgtcgtacgtgaaattgatgctcttggcggagaaatgggtagaaatatcgataaaactcatattcaaatgagaatgttaaacacaggaaaaggtccggctgttcgagcgcttagagctcaagcagataaatttgcttatcagcatgaaatgaaaaaaacgttagaaaatgaagaaaatctaacgcttatgcaaggcatggtagaacagttaatcgtagaagacggtgtatgtacgggcgttgtcactcaaacgggagctgtgtataaagctaaaacagttgttattacgacagggacattcttacgcggggaaattattttaggtgaactaaaatattcaagcggtcctaataatcaacaaccggctattaagctttctgaacacttagaggagttaggactggacatggtccgttttaaaacaggaactccacctcgtgttaatagctcaactattgattacagcaaaacggagattcagcctggggatgatgtgccccgtgctttctcatatgaaacaacacagtacattacagatcaattgccttgctggttaacatatacaagtgaacaaactcatcaaattattgatgacaacctccacttatctcctatgtattctgggatgatcaaaggtactggaccacgctactgtccatctattgaagataaggttgtgcgctttaatgataaaccgcgccaccaaattttcttagagccagaaggacgaaatacgcaagaagtatatgttcaaggactatcaacaagccttcctgagcacgtacagcgtcaaatgcttgcgacaattcctggtcttgaaaaagtccaaatgatgcgtgcgggctatgctattgaatatgatgcaattgttccgactcagttatggccaacgcttgaaacgaagaaaattaaaaatctttatacggctggacaaattaacggaacatctggttatgaagaagctgcaggccaaggtcttcttgctggaattaacgcgggaagaagagcgctggaacaagaagaagtcattttaggacgttctgatgcttacatcggtgtattggtggatgatttagtgacaaaaggaacaaatgaaccgtatcgtctgctaacgtctcgtgcagaatatcgtttattgcttcgtcatgataacgctgatttacgccttactgaaattggtcgtgaactaggattaatcagcgatgagcgctatgctaaatttgaacagaagaaagcggaaatcgagcaagagaagaaacgtcttttctcctttattattaagccgagtgaagctgttcaacaactgattaaagaagctgggggcagcgaattaaaagatggcattcgtgcgacagatttacttcgccgtcctgaaatgacatatactcatattcatcaattagcaccagctgatgagacggtagatcctgaagtagctgaacaagtagaaattcaggtgaaatacgaaggatatattcagaaatcacttcagcaagttgaacgcttgaagaagttagaaaacaaaaagattcctgattatatcgattatgatgcaattaacggtttagctacagaagcacgtcaaaaattaaaccaagtgcgtccactaacggtagcgcaagcatcacgtatttctggagtcaacccagctgatatttcaatcttgcttgtttatattgaacaagggcgcatcgctaaagtatcaaatgattaaaactcttaggcgcgaagaaagggaaactcaatgaatattcaacagtttcaacagctattagaagaaaagggaatttctctttcttctaaacagctgaatcaatttgaaaagtattatcaagttttagtggaatggaatgaaaaaatgaatttaactgctatcactgatcacggtgaagtgtatgaaaagcatttttatgattctatttcagctgctttttttcaagactttacagaaattgaatccatgtgtgatgtaggtgcaggagcaggatttccaagtattccgatcaaaatttgcttcccgcatttacgtgtaacaatcgttgattcgttacaaaagcgtattacgtttttaacgcatcttgtaaatgagcttgaactagacaacgtcacactatgtcatgatcgagctgaaacatttggtaaaaaagaaacgattcgcgagtcattcgatcttgtaacggcaagagccgtggcacgtatctcggttcttaatgaattttgcttaccgcttgttaaagaacaaggacgctttttagcaatgaaaggtgcttctgcccctgaggaattaaaaaatggagaaaaatcattccaagtattaggtggaaaagtgaagtcaattgaacatttccaattgcctttggagcaaagtgaacgttacattattttaatagacaaaataaagaaaacgcctaaaaaatatcctagaaaacctggtaccccagttaagcttccactagagtaggcattaaatagatagagaagagaatgtttcatatgaaacattttcttctctatattttctgtttagaaagcaggatatgattaaaaaacatcgaattagtttaaggcgggattttcctgaaggtggtgtgggactatgaaatctgctttttcacgtttttttaatttaaaagaaaaagatgaggatattcatgtagagattgaaactgtccaagatgaaaatgtcgaaaaagttttaagagatgaagtaaaacaaattagggtttcaagtattattccgaatcgttatcagccgcgtactgtgtttaatgaagcgaaaattgaagagctagctcttactattcatacacacggtattattcaacctattgtggttcgaccgactgagggcgaagaatacgaattgattgctggagaacgccggtggagagctgtacaaagcttaggatgggatacggttcctgcaattgtgaaacattttaacgatacagaaacggcctctgtggctttaatagaaaacttacaacgtgaagagctaacggctgtcgaagaagcactagcctacgcaaagttaattgagttacataatcttacccaagaggcattagctcaacgtttaggaaaaggccaatccacaattgcaaacaagcttcgtttgttaaagcttcctgttgaaatacaagaagcaatcaaacaaaaattgattacagagcgacatgcaagagcgctcattcccctcaaaaatcaagaaaaacaacttcaagtattaactgagattattgaaaaacaattaaatgtaaaacaaacggaagatcgagtagttaaattgttagaaacgcaggttaaaaagccaaaagcaaaaagaaaagcgtttagtaaagatacgcgtatcgcaatgaatacaattcgtcaatccttgacaatggttagtgacagcggtatttcattaaacacggaagaagaagagtttgatgaatattttcagtttactattaagattccgaaaaaataaagaaatagccctcatctttttttttgatgaggcttttttatcaaagtttttcgtcagaaaattcaatgaacaattaaactgtctggacaaatgggatggaaatgaaagtaggtgacaacatggggaaaattgtggcagttgcgaatcaaaaaggcggagttggaaaaacaacaaccgctgttaatttaggagcttgtttagctgaacaaggaaaaaaggttctacttgtagacggagatccccagggtaacgctacgagtggagttggcatagataaagcagatgtagatgaatgtatctataatgtaatcgtggaagatatggaagccaaaaacgttgtgcgttcaacagccgtcgaaaatttatcaatcattcccgcgaccattcaattagctggtgcagaaattgaattagtatcgactatttcacgtgaagttcgacttaagagagctttagaaacggtgaaagatcactttgattatgttattattgattgtcccccttctcttggtttactcacattaaatgcgctaacggcagctgattctgttttaatacctgtacagtgtgaatattatgcgcttgaagggttaagtcaattgctaaataccgttagattagtccaaaaacatttgaataatcaactgcgtatcgaaggtgtattgctgactatgcttgacgcacgaacaaatttaggactgcaggtaacagcagaagtgaagaagtactttcaggatcgcgtttatcaaacgattattcctcgaaatgttcgtttaagcgaagcacctagtcatggtgaaccaattatcttatatgatgcaagatctagaggggccgcagtttatacggaacttgcaaaggaagtgatttataatggcgaaaggattagggaaaggaattaatgccttattttcaggcttagatgcacaggctgatgattcaattcaggaagttgctattcacgaactcagacccaacccctatcaaccacgtaaaacgtttaaaaaagaagcaattaatgagttaaagcaatccattttacatcatggcatcctacagcctattgtagctcgcaaaagcattaaaggctatgaaatcttagcgggtgaaagacgatttagagctgctaaagaagccgaccttgctactgttcctgtcattataaaagacttttcagaaaagcaaatgatggaactagctttgttagagaatttacagcgtgaagatttgacgccaattgaagaagcaaccgcttatcaattgcttatggataagctcgatatgacacaggagcaacttgctacacgactgggaaaaagccgacctcatattgctaactatgttcgcctcttgcagttgcctgaggaaattcaaaccctcatttctactaatgaattgtctatgggccacgggcgtacgctagttggtttgaaaaataaagctcttctacctaaagtcgttgaaaaaatacgcaaggaacaattgaatgtcagacagctagaggcttatattgcccacttaaataaagccgttccacgtgaaacatcaaaaactaaaaaagataaagatttatttataaaacaaagtgaaacacagcttcgtgagcgttttggtacctctgttcacattacacaaagcaagaaaaaaggaaaaattgaaatcgaatttttctctaaagaagatttaaaccgtcttcttgaattatttaacgatctttctcagactaacaaatcttctgtataaaaaaggttgtcctagttttaggacaaccttttttattgtttataatgtcttacaggttggtaaaccgaagaattattaaactctttctctcgttcgttgtacgcagtctcaatacttttcgcaattaaatcggcaatgcacataacgaggtgaagcctcgtattttgcaagacgaaaaactccataaatccgctcacgttgacaacccctgttatatgaatatccccgactggcggcaattctttattaactcctgctcctggtttaacgggtcctattccaagtgatgcagagcctacgcttttcatacgacctaaacaagcatcaattccaataataaaaggattcgggaaaagcttttgaatatgttttaacgtttctttcaaattaacagcatgaacaggctcttctaacgttccaaaaatatgaaaagatgaaacctttttttcattcagtttcgttccgactaatggacccaatgagtccccagttgaacggtccgttccaatacatacaaaaacaattggtctgtctttctgtgctggaagtaaagatagtaactgtgtactcagcttctttgtagcagattcttcatcatgaaatacgcgggttgaatgttgtgtcttctcaaagaagggagattttaaattcatagggtccactccttatacataatagtaacagtatacgaagattttgaagattctatacatatatttcatggattgggggaaaatcgatgtggagagcaggatgtaaatggatattcttaattatgggaaccatgataggcgctgggtatgcttcagggagagagctatggcagttttttggcgaagaaagtggacttgctatttttctattttctattatttttgcgatttcttgcaatgtgattatgcaaatcagctatcgttaccgaaccaatcaattttacccagtgctaattgaattaataggaaagagatgggctgcagcctacgatgttttaatcgttttttatttgtttacgacaaccgtgattatgatcgcgggcggcggggcgacattggaaatgtggcatgttccttattggtggggaattggcgctcttagtgcttttatcgtctttgttttttcaagaggattaaatgggcttctttctatcaattctttcgttatgccaatcttaatgattgggctagctggcgtacttcttacatttgttttacgtcatcctgtagtaactgattggcatcttcagcataattggcctgctgcgtttacctttacggctttgaatattcttcctcttgttgcggtattatctacaattggaaaggaaattaaaagcaaaaaagagatttatattgcaagtgttggcagtggttttttattaggggggctctcctttatttataatgaatcgcttattcaagtttcaggccttctttcttcttatgaaattccattatttgctattctcaaagactttccttatacgatgctgtttttaatgagcattgttttgctcattgcaatttatacaacagccgtatcaggaatcttaggactgaccgcgcgttttcatactgaaaaggtgcaatctctttggaaactggcagcctgctggctacttttaatgattccctttacaaagttaggtttttctactttgattgccgttttgtatccaatgtatggaatcgtcaatttatttttagtaacggccgttctattatatccatttcgaaatcgctacaaaagttcgtagaaacttgctacaatagattaaaactttctcgtatgtagagtatgttacgataggagctacatgtagtatgaattcgttgacgtcagtttttaagaacgtatttgagccgttttttcaagaagaaacgtgggcacatattggagaaggcttcataaaaattctgttgattctgcttatttctatgtttttaattcgagttggaaagcaagcgttaaataaatttgtagaggttcgcacaaatagccctctgcgtatttctgaacgacgagaagctacgatggtccgtttgcttcagaacgttttttcttatgctatttatttcgttgctggagttatgattttagaaacattatcagtagatgttcgaggattgctagcgggggctggaatcgtagggctcgcggtagggtttggtgctcaaaacttagtgaaagacatcatcacgggattttttattatctttgaagatcagttctccgttggcgattatgttcgagtaggaacatttgagggaactgtagaagaaattggtctgcgaacaacaaagattaagagttggacaggcgagattaatatcttgcccaatggcagtattgtggaggtcactaatttttcgttacataacagcgtagctttcgttgatgtaagcatttcttatgaagaaaacatacaagaagcagaacaagtaattttagagctgctagaagaattgccaagccgctatgaagatatggttaaaacgcctgaattgctgggggttcaaaatatccatgcaactgaagtcacaatgaggattacaagcgaagtaaaaccaatgagacatttccatatttctcgtatgattcgtaaagaagtgcgtacaaggctaaatgaacatggcattgaagttccatttcctcgtatggttatgtataatcgtacagaagaagcacagcattcgtcgacgttgaaagggaaataaggaggagagagctgatgacggaaaaagaatttggtttaaatgacgttgtggaaatgaaaaaacctcatccttgcggtacaaatgaatggaaaatcattcgaatgggaatggatatccgtattaaatgtgaaggctgcggccacagcgtaatgattccacgacgtgattttgcacgtaaaatgaaaaaaattcttgtaaagcatgaggaataacctcatgcattttctatgtttatgccttatactgtaaggtgggacaaaatgaagcatcttaaaacggtgtgactaaaggttctttatcaaacttgtatttcaaaagttgactcactataattgtgacaggttaacttgtttcggatatataaagaggagtgaataaatatatggctttaacagctggaattgttggtcttcctaacgttggaaaatcaacattatttaatgcaattacgcaagcgggcgcagaatctgcgaactatcctttctgtacgattgatcctaacgtaggtattgtagaagtacctgatcatcgtcttcaaaaacttacagagcttgtaaaacctaaaaaaacaattccaacagcatttgaattcacagatatcgctggaatcgtaaagggtgctagtaaaggtgaaggactgggaaataaattcttatctcatattcgagaagtagatgcgatttgtcacgttgtgcgttgttttgaagatgaaaacatcacgcacgtttcaggaaaagtagatcctatttcagatattgaaacaattaatttagagttgattttagcagatttagaaacggtagagaagcgtattggccgtgttcaaaagatggctaaacaaaaagataaagaagcaatgtatgaatacgaaattctcgagaaactaaagaatgcatttgaaagtgatcagccagctcgtgctgtatcatttacagaagagcaaatgaaattagtaaaacaatttcacttgctaacaatcaaacctattctttatgtagcaaacgtttctgaagatgaagtagccgatgcatctgctaacgaatatgtagcaaaagtgcgcgagtatgcggcaagtgaaggtgcagaagtgattgttgtttgcgcacgcattgaatctgaaattgctgagcttgaaggagaagaaaaagcaatgttccttgaagaactaggcattgaacagtcaggtctagatcagcttgtacgtgcagcgtatgatttacttggattagctacgtactttacagctggtgagcaagaagtacgcgcgtggacgtttacacaaggtatgaaagctcctgagtgtgcaggtattattcatacagattttgaacgcggatttattcgtgcagaaacggtgtcatacgaggatttattagctgccaaaacaatgggagcagctcgtgaagctggaaaagtacgtttagaaggaaaagaatacatcgtaaaagacggagacgttatgcatttccgctttaacgtataagattaaaagccgaaaggagatatcttctttcggcttttgtcgttggcgaaaatattagcatatatttacgaaacagcccgcaatgcgtattgctttgcctatggtagtgtgctataattttaattcgtgagtaatattttattgctccttgcccgtttcgggccgttagaccaaaaggaggtgacagtgatgagaaagtatgaagtaatgtacatcatccgtccaagcattgatgacgaagcaaagaaagcattagttgagcgctttaacggcgtattaactgataatggtgctgaaatcgcaaatgttaaagaatggggtaagcgtcgtttagcatacgaaatcaatgatttccgtgacggttactacatgattcttgacgtggcggctacttcagaagcagtttctgaatttgatcgtcttgcgaaaatcaacgaagacattatccgtcatatcgttgttaaacaagaagcataattaaacgtttaaataaattgggttttatttccttaaggagtggttctgatgatgaatcgcgtaattctcgtaggacgcttaaccaaagatcctgaattacgttataccccgagtggagcagcggttgcaacattcactttagcggtaaaccgcacatttacaaatcagcaaggtgaacgtgaagctgacttcatcaactgtgttgtatggcgtcgtcaggctgaaaatgcagccaatttccttaaaaaaggaagtttagctggtgttgatggtcgactacaatctcgcagttacgaaggacaagacggtcgtcgcgtatacgtaacggaagttgtagcggaaagtgtgcaatttttagagccgaaaagtggcggtggggatacgcaacgcagtaactttgctaacactggaggatctggacaaggctctccatttggagataatcagaaccgtaactcaggtaatcaaggttatactcgcgttgatgatgatccatttgcaaataatggcgagacaattgacatttcagatgacgatttaccgttttaattcgcagtagattatccggagtataaaattttatagaaacttttaagcggaaggaggcgtatcaaaatggcaggtggacgtaaaggtggacgcaacagacgtcgtaaagtttgtttcttcacagcaaacggcatcactcacatcgattacaaagatgtagatatgcttaaaaaattcgtttcagagcgtggtaaaattttacctcgtcgtgtaactggaacaagcgctaaataccaacgtaaattaacgatcgctatcaaacgcgctcgtcaaatggcattattaccatatgtttctggtgaataatgaacggtataaaaagaggcagtaaggattcccttactgcctctttttacattacataggtgctcttttgccaaatagttgcttcttatgaattgaatcgataaaataaataatagtctatatcaacgaggtgaagttgtgaaaggaattcgatatattacagaaggagcagctcttttagcgctgtttgtggcgctgttgcttttttcactatacatacctgttgtgggaaccatttttcaactagcgctagctgttccatttattgtgtataccgttcgtcatgggtggaaaaaggcaatattatttttagtagtagggttgttattgactttgttatttggaaatgtgttgactcttccttttacatttgtatttggtattggtggattagcaataggaatgctttaccgacaaaaacaaaaaaggtataccattttactaggcggcacggttgcatttagtttaggtttacttttattgttcgtaggagcaaatgtcgtttttaatgttaatctaatggagcaaataaataatgctttagatcaatcgattaatcaaagtattgaaatgatgaaaagtttaggacaagacgttaaggaatctcaaattgatcaaatgagagatgcatttgatatgtttaaaaatctgttgcctctattaattgttatgggcggagttattctggcctttttctctcagcttattgctacgcctattcttaaaagaacaggttatgaggtgcaagcattcccgccttttcgtgaatttaaacttcctaaaagtatcctatggtattatttgattgcattaatcttatctttcccatcttttaatattgaacaaggtacatttatgtacgtagctattatcaacatcgtgatgggactgcaaatgctagtagtgttacaagggatctcttttattttctatttctcacatcaaaaagggtatgccaaagcaattccaattgttgtaacaattttagcattaattattccaattatccttcaaattgtgcgcatcttaggtataattgatttaggatttaatttaagaaaacaattagacacaaaaaagtagatattgtggaacttaaaaaagtaggagctgaaatggatgcctgtctttacaaaaaagaacgtcattcgctatccattttactcattgtatagtatagctctgattttagtaggtatcgtgacctatcataattggatcataggaatgataggctttatattactattagcctgtctttttctatacatgagaatggagcgaatgctgtccgatgagtttgaaacctatatttcaatgctgtctcatcggctgaaaaaagtaggcgaagaggcattaatggaaatgccgattgggattatgctgtttaatgatgaatatcaaattgaatggaccaatccttttctagcatcttgtctcggtgaagacacactagtgggaagatcattatacgatgtagccgaaagtattattccactggtcaaacaagaagtggaaacagaagttgtcacgttgcatgatcggaaatttaaagtggtgattaaacgagacgagcgcttactgtacttctttgatattacagagcaaatagaaatcgaaaaattgtatgaagaagaacgaacaagtttaggtattatctttttagataattatgatgaactaacgcaaggaatggatgatcaagttaaaagtaacttgaatagccaagtaacctctatgttaaatagttgggctcaagaatacggtatttttattaaacgtacgtcttccgagaaatttattgcgattatgaatgaacaaattttaattcatttagagcgaagcaaattttctatcttagaccaagttcgagaagagacgtctaaacaaaatataccgcttacattgagcattggtatcggagctggtgctgctgatttacctgagctgggtgctttagctcaatctagtttggatttggccttaggtcgaggtggagatcaagtagcgattaaacagccgaatggaaaagtaaaattctttgggggcaagacaaacccaatggaaaaacggacgcgcgtgcgtgcaagagttatttctcacgcgttaaaagagctcattacagagagtggaaaagtgattatcatgggtcataagtatccggatatggatgctgtaggagctgctattgggatattaaaagtagcgcaagtcaatcagaaagacggttttatcgtattagatcctgatcatattgatacaggtgttcagcggatgctagaagaaattaaaaagaaagaaggcctgtgggaacgatttattacgcctgaagaagcgttaaatcttgtgagtgatgatactcttttagtagtagtagatacgcataagccgtcgctcgttattgaagaaaggttattaaatcgtattgaaaatgtcgtggtcattgatcatcatagacgaggagaagactttatcgaagatcctcttcttgtctatatggagccatatgcttcctcgacagcagaactcgttactgagcttcttgaataccagccaaaacgatttaagattgatatgctagaagcaacagcacttttagccggtattattgtcgatacaaaaagctttacattacgcacgggatctcgtacgtttgatgcagcgtcctttttacgttctcaaggcgcagatacggttcttgttcaaaagtttttaaaagaagatatcacgcaatatgtacagcgagcacgctttattgaacatgcagagatttatacagcaggtattgccgtttcacgagctgaaccaaacaaaatgtatgatcaagtgttaattgcgcaggctgcagatacgctgctttcaatcagcggagtggttgcttcgtttgttatttctaagcgacgggataatctaattggcattagtgctagatcgcttggagatatcaatgtacaagttattatggaaagtctccaaggcggaggtcatttaacgaatgctgctactcagcttcaagacattagtttggatgaagctgaagaacggcttaaacaagcaattgatgagtacttagatggaggtaaaaaatcatgaaagtaattttcttaaaagatgtaaaaggaaaaggcaaaaaaggtgaagtgaaaaatgtttcagacggttatgcacataacttcttattaaaaaatggctatgctgttgaagctacaggcggtaatgtgaaagtattagaagcacaaaaaaatagagagcaaaaagatgcagctgcagaacttcaagcaaacaaagagttaaaagcaactcttgaagagctaacagttgaattaacagcaaaatctggtgaaggtggccgtttattcggttctatcacaagcaaacaaattgctgaagaattaaagaaaaagcacaaaattaaagtagataagcgtaaaattgaattaaatgatgcaattcgcgcattaggctacacaaatgtaccggttaaattacatccggaagtaacggctactgtaaaggtacacgtgactgaacaaaaataaacgtaagattgagaaataagtaaataatataaagggttggcgcggacttgtatttgttcgcgccaacatttatgatgaaagaaaatactgaaagaatataagaggggcatagaaatatgagtgatctttttgctgatcgtcttccgcctcagaatattgaagcagagcaagcgctattaggggccattttcttagagccttcttctttaaccttagcatctgaactgctaatacctgaagacttttaccgggcatcgcaccagaaaatctttacatgtatgctgaaactttctgaccaaggtgaaccggttgatttggtaacggtaacgtctgaattagctgaccaaaaaatcctagaagaagttggcggcgtatcgtatttaagtgatttagctaactctgttccaacggctgcaaacgtagagtattacggtaaaatcgtagaagaaaagtcgattttacgccgtttaattcgtactgcaacgcatattgcttcagaaggatatgcaagggaagacgaagtagaagttttattaaatgaagcggaaaaaaacattttagaagtagcacagcgtaaaaacagcggtgtgtttcaaaatatcaaagatgtacttgtacaaacgtatgatgatatcgaagttcttcacaatcgaaaaggtgacattacaggtatcccaaccggatttagtgatttagatagaatgacagcagggttccagcgaaatgatttaatcattgtagcggctcgaccatctgtaggtaaaacggcttttgctttaaatattgcgcaaaacgttgcaacgaaaacggatgagaacgtagccatcttcagtttagagatgggtgctcagcagcttgttatgaggatgctgtgtgcggaaggaaatattgatgcacaaaggctgcgtacaggttcgcttacagctgatgactggggaaagctcactatggcaatgggatctttgtccaatgcagggatttatattgatgacacaccgggtatccgtgtaggtgaaattcgttctaagtgtcgtcgcttgaaacaagaaggcgggcttgggatgattttaattgactacctacagctcattcaaggaaatggaagaagcggagaaaaccgacagcaggaagtatctgaaatttctcgtgcgttaaaagctttagctcgtgaattagaagttcctgttatcgccttatcacagctttcccgtggagtagagcaaagacaagataagcgaccaatgatgtctgatatccgtgaatccggaagtattgagcaggatgccgatatcgtagctttcttatatcgtgaagactattatgaaaaagatacagaaaatcaaaatattatcgagattattatagccaagcagcgtaacggtccagttggaaccgtacagcttgcctttgtaaaagagtacaataaattcgttaatctcgagcggcgctttgatgacgcaggagtgccgcctggtgcataaaacctctcaatatgagaggttttattttattgttatcgcattcgttccgcaaaatacgatatatttgtaataacttttgttaaatcgttcggatttaattgactttagcgtgataaattgatacacttatccatggttaaattatgtcgtagtgagctgttgcttactaagcggaggtgcttaagatatgtcttcagtcgttgtagtaggaacacaatggggagatgaaggaaaagggaagattacagacttcctatcagaaaatgcagaagtgattgcacgttaccaaggtgggaacaatgcaggtcacacaattaagtttaatggtgaaacttataagttacatttaattccttcaggtattttttataatgacaaaacgtgtgtaattggaaacggtatggttgtcgatccaaaagcgcttgttcaagaattaaaatacttacatgatcgcggtgtaacaacagaaaacttacgtattagtaaccgagctcatgtgattcttccatatcatttaaaattagatgaagttgaagaagaacgtaaaggtgaaaataagattggtacaacgaaaaaaggtattggaccagcttatatggataaagcagcacgtgttggtattcgaattgccgatttactagaccgtgaagtatttgaagcaaaattaacacaaaacttagctgaaaagaatcgccttcttgaaaaaatgtatgaagtagaaggctttacattagaagaaattttagatgaatactatgagtatggtcaacaagttgcaaaatatgttgttgatacatcagtagtattaaatgatgcgttagacgaaggacgtcgtgtactatttgaaggcgcacaaggtgttatgttagatatcgatcaaggaacatatccatttgttacatcttcaaacccagtagcgggtggagtaacaattggttctggtgtaggtccatctaaaatcaaacacgttgtaggtgtatcaaaagcgtatacaactcgtgttggtgacggtcctttcccaactgaattaacaaacgaaatcggtgatcaaatccgtgaagtaggacgtgaatatggtacaacaactggtcgtcctcgccgtgtaggttggttcgacagtgtagttgtacgtcatgctcgtcgcgttagcggaatcacagatttatctttaaactcaattgatgtattaacgggaattgagacattaaagatttgtgtagcttaccgttataaaggggaagttatggaagaattccctgctagcttaaaaacacttgcagaatgcgaacctgtatatgaagagcttccaggttggacagaagatattacgggtgtgaaaacattagatgagttacctgataacgctcgccactacttagagcgcgtgtctcaattaacaggtattcctttatctattttctctgtaggtccagatcgtacacaaacaaatgtattacgtggtgtatatagctaaataaaaaaggttggctcctcgtgagctaaccttttttatttataattggtgctttgttaacaagattttttaaaaaagctcaataataaaaagaaagttttaaaaaaactattgcattcatatgaaataccatgttattataataagcgtcgctaagagatataacatgagccattagctcagttggtagagcatctgacttttaatcagagggtcgaaggttcgagtccttcatggctcacttttgttacaacgtggcccgttggtcaagcggttaagacaccgccctttcacggcggtaacacgggttcgaatcccgtacgggtcatttttaatatttttaatacatagcatatagactgaggtcccgtggtgtagcggttaacatgcctgcctgtcacgcaggagatcgcgggttcgattcccgtcgggaccgccattttggctcggtagctcagttggtagagcaaaggactgaaaatccttgtgtcggcggttcgattccgtcccgagccatcaaaaagcatgactttatttaaagtcatgcttttttcttttatttacatttaaaagaaaacgttatttgctttgtatctcttttgtggtaatatattacttttgtatttagagatggttgaaaatcatatatcttcatgtatagtagaggatgaacttgtgacgtttcaagggttatcaagtataataaaactacggtattcaaacagtatgaatactatcttttatattttgcttcaactaataaaggagaacgatgatcatggataaacgtattttagtcgtagatgacgaaaagccgattgcagatattttaaagtttaatttgcaaaaagaaggttacgaagtattttgtgcttatgatggcgtagaagcacttgaaaaagtggaagaagtacagcctgaaatgattttattagatattatgcttcctcagaaagatggaatggaagtatgccgagaagtgcgcaaaaaatatgatatgccaattatcatgttaacagcaaaagactctgaaattgacaaagttttaggtctagaattaggtgcagatgattatgtaactaagccgttcagtacgcgtgaattattagcacgtgtaaaagctaatttacgtagacatcagcaggtagctgttccaacggaagaaagcgaaacgaatgaaattacaattggagcacttgttattcacccagatgcttatatcgtgtctaagcgcggagaaacgattgaactgactcaccgtgaatttgagctgctgcattatttagcgaagcacattggacaagtcatgacgcgtgaacacttgcttcaaactgtatggggttatgactattttggtgatgtgcgtacggtagatgtaacagttcgaagattacgtgaaaaaattgaagataatccaagccatccaatgtggattgtaacaagacgtggagtaggctattatttacgcagcccagagcaggagtaattttagatgaagaaagtaaggctcctgcaatctattcatttaaagtttgtattgatttatgtgctgctcattttaattgcgatgcaaattattggggtctattttgcacgacaattggaaaaagaattagttaacaactttcgaacttctcttcaagagcggacagacttgctgacgtataacattggacaagaaatggtgaaaaatcgtgatgatgattcacctactcttgaggaagacttaaagactattttacgagattttgcttcaagacccaatttagcttcaaatgatatgaatgacatctctgaagtaagagtcattgaccaaaatagaagaatcattgctacatcgaactcaaaccctcaacagatcataggtaaaaagactaatgatttagcgattacaaatgcgttgttagcaggaacgaactctgataatgtatttgttgaccaaagcggacaccgaatcagagttatgatacagcctattcgtttacaggataaagtaggtgccagtcaatcaaattcaactaataaaaatggaaaagttcagtctagcgaagaaatcttaggtgctatttacttaacagcttccatggagcctgtttacgatcaaatgagtaatatcaatcagatctttaaggcaggtacggtgattgctctttttattacagctattttaggcgtatttttagctcagacgattacccgtccaatgtctgaaatgagaaaacaagcacttgagatggctaaagggaattttacgagaaaagctaaggtatacggatatgatgaaattggtcagctagctctcacattcaacaacttaacaagaaagcttcaagaagcacaggcaactacagaaggggagcgccgtaagcttagttcggtattagctcatatgacggacggcgttattgccacggatcgaaagggaagagtaattttaattaatgatccagctgcagctatgctaaatgtttcacgtgaaacggttttgtctgatccagttgtttccctattagatcttgaagaaacgcatacgtttgaaagcttgcttgctaatcaagagtcattaattttggactttagtacaaaatcggatccctttattttaagagctaccatttccgctattcaaaaagagaccggttttattaacgggattatcattgtcttgcatgatattacagagcaggagaaaattgatcaagatcgccgagaatttgtagcgaatgtttcacatgaattgcgtacgccgttaacaacgatgcgcagttatttagatgcgcttgcagaaggagcatggcaagataaggacttagctccaacatttttaaatgtaacgcaaacggaaacagaacgaatgattcgtctcgttaacgacttgcttcaattatctaagctagatagccaagactaccgatttagtcgtgacccaatcaattttgtgaagttctatcattacatcattgatcgctttgaaatgacaattgaacaaggtatttcgttcgtgcgcgacttgccaaatgaagcaatctatgtcgctatcgatcaagataaaattacacaagtattagataacattatttccaatgcaataaaatattcacctgaaggcggaaccattacattttcaattgctcagcatacgcatgaaattgttgtgagcattaaagaccaaggtatgggaattccaaaatcaaatttagctaaaattttcgaacgcttctatcgtgtagataaagcacgaacgcgtaaattaggcggaacaggattagggcttgctattgccaaggaaattattgaagcacatgatggacgcatttgggcagatagtcaggaaggaaaaggaacaacgatttactttactcttccgattgaaagtgagaatgatgacgaatgggaatgagatatgaacatatcaaaacggccatcttagttgttctcgtcgcttccagtttaattatgacgtatcatatatggacgtatcagccttcttataaggtcatttcaaaaaatcaacatttgcaggaagttgaagtgagttcaaaaagtaagatagaagatcatattcttccaacagaagttctctatcatcgaaacgataatcactacatgtctcacgacgaagatgatgtaaacaaatgggtaaatgaaatgaaaaagtggaaattttcgaatgtgacggacgtttcggatgctatttctcctgatggatttttaaattatgtccatggaagtaattctattgaagtgctgtatccagacgcgctaccgttaaaaacatttcaacagcttttctcattttctcaaacgtctttgcctaatcaaacatttgaccgtgtactcattaaaattaagcgtacaccttcctttttcgtgagcgtgtatcttgtgaattatgagcaaaaaaagatttattcggttacagtcaagaatttggccaaagatgatatcaaagaattagaagacaaaatgaaacgtacgtatgccccgagctttgtatataaagaaaacaaaaatcggtatatcttccttccggaaaacaatatcacgatgaatagtgaagtctactatacgagcatgaggcatttagatattgaaaaatataaagaagcgctttttaacaacccagactatgcacggaaagaaacgtctacaaaccgagatgtctacaccgaaggtacaaaagtgattaatgtcaatacgaagacagatgtgatggaatatgtgaatcttgtaaattccacgaccgaggtaatggaagattataatttaataaatcgcagctttagcttcgttaatgaccacggcggctggacggaatctaattacaggttcaacagctggaatcgtattacaaaagaaattagctatcgttattataaagataactatcccgtgtacagcaatcagggaatgactgaaatatatcagagatggggaaatgcggagattttgaattaccgtcgtcctctttatcgttttgtaagagtacaggattccagtgtagaaaagctgcagtcatctcaaaaggtgattcaattaattgaaaaacaccaaaactttgacccgaatctgttaaaagatatttcaataggctatcagctagaagaagtctcacagcagccgaaaaccggtgaaaagacggttgagtttaattcgaattctgtcaaactcgttccttcttggttctattactataatagcaagtggtatcgaatcgcaccgccgactgaaggaggcgataacgatggattggagtagaacaaaaaccatctttattttcactttcttgattcttaatatttacttaggctatcagatttttaaaacccatcaagaagatcagtactctctatttgtagagtcgagcgttgaagaacaattaacgagtgaaggcattgaatataaacatttaccgatagatgtgaaggaagcttcatcgctaaatgctaaaagtaagctgtttaaagatgaagatttaaaaaagctgaaagaacaaaaagcagcgctgcttgaggaaaaaacaattcgaagcgtattagacaaacctttttcagtacctgaaaaaagtcccgaagcaaagctaagtcaatttctaaaacggtatgtgatctcaggtaaggattatgagctatggaatgttaacaaagagaaaaaaacagttacattctttcaaaaatataagaagcacaaaatctttgataatgaaaatggaatgatcgttgctcacttaaatgacaaaggtgaaattatttcgtatgaacaaacgatgctaggttctgtaaaaacattagatgatgagcaggatgttttaacacctttaaaagcattggaaaatttgtttttgaagggtgaattgaaaaagaaggattctgtaacaaaagtagagtttgggtactatacgtttgatctgccgctactaaattctcaagttttagcaccaacttggcacattgttgtaaatggagatacgagttattttgtaaatgcctttgaagggcagattattaaaaaaggaaataaataagtatttggagtgagataaatgagcctgcatttcagcgtgctagcgagtgggagcacaggaaatgcgattttagtaagtgatggagaacattccttactagttgatgcagggctgagcggaaaacaaatggaagctctatttcaacaagtaaatcgcaatatcccggatttatcaggaattttagtgactcatgaacatagtgaccatattaaaggactaggtgttctggcacgtaaatataagctccctattttcgcaaatgaaaaaacgtggaacgcaatggatggcttgatcggcaacattgatacggaacagaagtttcactttgaaattggccaaacgaaatcgtttggtcaattggaagtggagtcttttggcgtttcgcatgatgctgcagagcctatgttttatgtctttcatcaaggatctaaaaaattaacccttattacggataccggctatgtaagtgaccgcatgaaaggtacgattaaaaatagcgatatgtacgtatttgaaagcaatcatgatgttgaaatgctgagaatggggcgctacccttggagcattaaaagacgaattctaagcgacgtgggacatgtatcaaatgaagacgcggctcttgcaatggcagatgtgattggagatcaaaccaaacgcatttacttagcgcatttgagtcaagacaataacatgaaggaaattgcccgcatgtctgttgcgcaagtgttacaacaaaaagatatcaatgtagaggacaatattctcctatgtgatacagatccaaaaagaccaactgatattgtttatgtatagtctctagaaaggaagcgaaaaataacttcatttagtacgtgaatgcagacattcacgatgataaatgaagggttcggtgatagtgtggaacattatgatgaaggccaagagccaaatagtcggccgcctaaacgccgcagaggatatttcgcttctgctctgattggagcaattataggtgcacttattgtactgcttcttatgccagccttggtgaggaacgggattttgccagatggatggatgacggatgaaaatagagatgaacaaacaggatctaccattcaaaagtcagtatctcttgacgtcactacggccgtcacaaaagctgtttctgaaaccaatgcagcagttgtaggagttgtaaacattcagaactctgaaagcttttggaatgatgaacgaactgatgccgggacgggctcaggtgttatttacaaaaagcaaggcaacaaagcttatattgtgacaaactatcatgtcattaaaggcgctaacgaaattgaagtgagcttcagtaacggtacaagggtatcggctaaaattcttggcagcgatgatttaatggacttagcagttcttgaaattgacgcaggccacgtgacaaaagtggctaccttcggaaattctgataagcttaaagctggtgaaccagtgattgctatcggaaacccgctaggccttcaattttctggctccgttacacaaggagttgtctcaggggttaaccgtgtcattcctcaagatttgaatggcgatggaaatcctgattggcaatcagaagttattcaaacagatgccgccattaaccctggtaatagtgggggtgctcttgttaatattgatggtgaattaatcggtattaattctatgaaaattgcccaagaagcagtagaaggcattggtcttgcgattccaatcaacatggctagacccattattaatgacttagaacgatacggtgaagtcagacgtccgtatcttggagttagtacactatcattaagtgaggtatcagggtatcatttaaaagaaacccttaagttaccgcatgatgtagtaaacggagtcgctgttctaaaagtcgagccaggttcgccagccgctaaagccggattaaaggaatatgatgtgattgttgagttagatcacagcaaagtaagggacattgcgacacttcgcaaacacctctacattgaaaaagaaattggcgataaaatgaacgtaacgttctatcgcgatggcaaaaagaaatccacagaagtaaaattaacgcgtcaaatgaagtaaaagaaaagttatccacagggggataaactcctgtggttttttaatgaaaagaatagagaaaggaagataaatacatgaagatatattgctgtttagaacatacagaactagcgctagatgtaatggtagatgagattgagctagcaccagtttttgaaaaaatagaaaatttcactgacaaaaaaagctgtgaatattgtgacaatgaagctgtatatgtagtagggaactaatattcttatacaaaatgtggatataacatgtggatatgtggataatatctgtggataagagataaaggagaggagaagagcctgtgaatatctctattataaccattgggaagctaaaagaaaaatacttaaaacaaggtattcaagaatatttaaagcgtttatcaagctatgcaaaagtagaaattattgagcttgcagatgaaaaagcgccagaaaacttaagtgaatctgaaatggaacaggtaaaacaaaaagaaggagagcgcatcttagcgaaaatctcagacgatactcacattatcgcattagctattaacggaaaacaaaaatcttccgaggaactcgcaaaagaaattgattcattagctacctacggaaaaagcaaaatagcgtttgtcattggtgggtcgcttggtttaagcagcgaagtaatgaaacgctcaaacgcagctctttctttttcaaagatgacgtttcctcatcagcttatgcgcctagtattagtagaacagatttaccgagcttttcgtattattcgaaatgaaccttatcataaatagaacgtgtggatattttttcattaaaagctgaggcagaaggaaatgtaaaaccttctgcctcagcttttatcatatgtggataaatagcacacgtctataaaaaagaacaagaggttcttctctccgataaaatgttagaacaattgagtttaagcaaacgagatcttatttaagaaacagaaaaaccttcgtcttctttcactccagttctgtctttaaactcatcaagcaacgcacgcacttcgtcagtcgtttccgtgctcatgagtagatttcttaattcacttgcaccgcggaatccgcgaacgtaaattttgaaaaagcgtcgaagcggtttgaaagggcgcggctctaattcttcagaatacttatcatgaagatctagctgcaggcgaagaagttctaatagctcttcgcttgtgtgctctttcttttctttttcaaacgcaaacggattatggaaaattccgcgtccaatcatgattccatcaattccgtacttttcagcaagttcaagacctttctggcggtcaggaatatcaccgttaattgttagtagcgtatgaggcgcaatttcgtcacgaagcttcttgatctccggaattaactcccagtgcgcgtcaacatcgctcatttcttttttcgtacgaaggtgaatagaaaggttcacgatatcctgttctaaaatgtgcttcagccagtcataccactcgtcaacttgcgtatagccaagacgagtctttacgcttactggaagccctccagctttggctgcctggataatctcagccgcagtgtctggacggcgaatcagaccagaaccttttccgtttcctgcaacgttctgtacaggacagcccatattaatatcaatgccgcgaaagcccatttcggccatcccgatactcatttgacggaagtattcaggcttgtctccccaaatgtgcgcaacgattggctgttcatcatctgtaaacgtcaaacgtccttttacgctatcttttcctttcggatggcagtagctttccgtattcgtaaactctgtaaaaaatacgtcaggtcgtgctgcttcggtcacaacatggcgaaaaacgacatccgtcacagcttccatcggtgccaaaataaaaaacggacgcggcaactcgtgccaaaaattatctttcatcttatatctaaaccctttcttttaggggaaacgtattcccaaaattaaaaagtgtaatttcttttatcaggttgaatgctagtataaacttcaaccaatatatactttaatggtatgggaagaaaagtgcaagggaacgagtggttttgttttgctggaaatacttattgaaacaacttttatatctagtagtagtgggttgtaagcaattaaaagcgagcctgaaggcatgtaccggatacctgcgaataaatatcctaaagcattcggtttgtgtttaggcactttctccaaggatattataaagtattcaccataattatgattacgataaacgattttataaataacttccactatataaaaaaccacgtctgtcactgtacaacagacgtggcttcattacgtattaatgctttttgtaaggagcgccgtccttagaaggcagcccagaaatgtatcctacaccaccagtttcttgaatgccaatgctttctttcatcgctttagtcagctcttctttatcaacagcggtaatatttctgtcgctgatgtcctcgcccgggtgctgatagttgcttagtacatagcgagagtttttaatgttttctactgcacgaagtcctgttgcttctgctcccactggaactgaaaggatgcgcgataatttttttgtttttacattataagcccatacgaagttgtttgtgtgcagtgagctatcttctccgataaagagtgtatttaagtcatttgaatacgtaaggttatcagggttggcaattttatttggatccgctgtattgccgtatgcatctgctttttctaggtcttgtccaatcagtagcccttccatgcttgcaggaacgtagcgactgttaatcttgccttttgcttggtctttttgatgcgatcctaagttcagctggtaggtcacaccagactctaattttggaagctgaatatcatcttggacagcaccagattcttttagcatggcactattttggtaagaaatagccatatacgcttttttatcttttttgttaaccgttagtccttccatcttgttgaattcagatgttgcacctaaaattgcaccgtatcggcgtgattctaaaaaggcagctgctttttccatgccaggctttacttttaggtattcaacttttttacttgcagcggtttttacagctttaaatccttttgtaggctggtcagctgtttcaaaaatatcactaaattttgtgcctttgtcgattattgttttcacttcattgtctgttgcatggccaagtttaatccactgaaggtcgcctttacctccattttctgtgctcgtttgtttaaactttgccgcataaagagttcctgctgagaagtctttctccttatctgctacatacataaacatcatggtattagatccatcgtctccaaaaagagcggttttattatctggaagtacctgcatcatttcgtgtgaaaaacgacctgtgctgtaatgttttacgacggacgcattgccgctttcatccactgaaatttctggaatccagccgtagtagtaaggatttgcttttgacgtgtcaccgaaataaagcttagcgaagttcgtgacgtctttataagagctagatgaagggtcttcaaaagcacgtgcatcaggctcgtattcttctgaaccaaggtgagtaccccaatctgttgtagagccattacacggcgtccataaaccatttacattggaaaaatcaatttttttagcatgattgacggttagttttcctgttttatcatctcggtcaacttgtgtaagcgtcattgaagcaggaagaccggagatctcttttccagcattattaacggattcatattcataatgtgaaataatataagacttaccgttgatggtgataaagctgtttgaatccggtgcgtctgatacgtacggtgatggcttatcaggaacgcttcggtcaataattggatccccgtttgcatcgattggtgtacctgcggcgattaattcccctttattatcgacaattttatcttttgaaagaaagagctggttatagttaagcggcgtttcttcaatgcttccatctttatacgttacttttacagatgcctctgtatacgttttaatcatattttcaatcgtagtaggtgctttcattggctgaaactcgacgcttttgatttgttttggatgttgaactgggtgatgctctgctgcaaaagcagaagcggcgctagaagctaagagagtgagagatagtccaagagatactcgttttttcatggttgataacctccaaattgtattcatacacttattaaatcatttgattgttgaggaaatataaagagaagcgctggatttgttgaggtgttgttaagaacgttgaacatttatatgacaagtttaactagaggttattcagctatctttcagaatttgttcagatagcattcagctgggcttcacagtgaattcatgttccgctcttacaataaacacatagctaaaggcgacaggaagcgctttggctcgtacagcaaaagtgaaaggtattttagcagaaaaaaacgttactccaatagcgctattttgataaatgaccgctgctaaaaactttagcttgtgctgtaaatacattggaaattacgcggaggtataatcatgattggaaaagtattagcaggaaaagcagtagtagcaaaagccgtgggaggtgccacaattggaacagctatcgctcttggttcaatgacaagcgcatttgcttcagacggccagcacattacttcaacaaaagcgtcggctcataccgaagcggcaacatatacgcaagctcaagcaaaagcaattgccttaaagaactgcggaggaacggttcaatcagtttcttttgaaaataacgcctatacgtttttaattcacggacaagataatcaagatcatcatgtgaaagtaaatgcacacagcggaaaagtggtaaaggttgaaaaactatctttttctcgaagtgaggcacaagcagtagcgttgaaaaattgtggaggaacggttaagtcggtaggcttcaacgatggagtatatacgttcttaattcacggaaaagatagccgtgatcaccacgtgaaagtgaatgcacaaagtggaaaagtgattcaaattcaaagcgctgtatttacaaaagcacagattcaaacgattgcactaaaaaattgcagcggaatgattcaatcaagttcatatgcaaatgatgtatacacatttttgatccacggaaaagacaacaaggatcaccatgtgaaagtaaacgctgaaactggaaaagtaatcaaagtcgaagcggtaaagtttacacaagaacaagctaaacaagctgctcttcaacagcacaaaggaacggttcaatctgtttcgttcagtgaacaagcatacacgtttgtgatcaaaggaacagacaatgtaaaacatactgtaaaaataagccctcaaacaggaaaagtgtgctgatttgataaaaaagacgattgctttacagcaatcgtcttttttacgttaagggcaatacaatttcaaaagcagttcctacattcaatttgctttttacacgtatttttcccccgtgcagctctataatagatgcgctgatggctaaacctaaacctgctcctccgtatgctcgagaacgtgaagcatcagctttgtaaaatcgttcaaataaatggggaaggtgctcttgaggaatgccgtgaccgttatcttgtattcttaatgaaagttctttctcgtttacttttcctatcacttgaataactcctgtagttggatttgtatgctgtactgcgttggaaaataagtttaaaacaacttgtttaaattgatctttgttaatgtctgatggtaaacggcttgggaagtcgaataaaacttttctgttcccagccaataatatgagttgaggtttcatatctaaaatcaattcatctacaaaacagcactctttttgaaacgtcggaagttgatcgagctgagcaagaagcagaagatcctgaataagcttgcgcagtcttttggactctccatacatgctttttaaggcgtcttttaactgctcgggattgctgctagcccctcttagtaaaacttctaaaaagccgtgaatagatgtaagcggcgtgcgcagttcatgcgaagcatccgcaacaaaacgccgcatttgttctttggcttctgtttctgctttaaatgctttttcaagacgttcaagcatttcattaatagaaagagaaaggcggtccatttcaatttgtccttgattaacaggcaagcggtcatgcaagcttccggcattaatatgctccacttttttagtagtaataaacaaagggattaacgtccgttttaaaacagaagaaaaaacaaaaaaagcaatggtcattgcagtaagtgaaagcattaaaaagatcatcatttgtctgattaacaggtctcttagtgattctgttggagtattgatttgaataactccctggatttctccgtcaaagacaattggttttaaaacaatgacttgctcttgatgaccatcgattttttttatgaggctcatcgtgttgtccggctgtttgatgtttttcattacttgtttgtatgtagatgcagaaagcttgggaaagtaagaatgatgtggatccttagccagccgtaaaaatgtgctcttttgattaataaaggtaatattaacacccgggaaataaaccatgggtcttgatctttttacattctggcttgtttcaatatcatgtttccagacatcatcgggaatcaagtgaatttggtcttcgatgcttttaattttattcgtgtaaataaattgcttcatgaacacgtattgaaacaagcctatcagtatcagtaaactcaaaataacaagcaaacttctgaataagagctgaaggcgaagagagttcagcggaaagaaccgtttgtatttcatgaaatatcaatccggtatcctacaccgcgaagcgttcgaatgacggttcggctatggtcctgtaatttttctctcagtgatcgaatgtatacttctacaatgttttcttctcctccaaaatcatatccccacacccgatccaagatggtggatttacttagtacgagaccatgattaataaccaagaattttaagagtgcatattcagtaggggataaatcaagtatgtgattaaggtatttaatttctttgcggcggtcatcaattttaaatggaccaattgatacttcgtctaataagttgggaaattgattgcggattctagcttgaatgcgcgcaagaagttcttcaaaactgaaaggtttgaccatataatcatctgctccaatagtcagcccttttacccgatcgtctacttgatcttttgctgttagcatgatgacagctatattccccattttcttcaacaagcggcatacttcaaatccatccattcctggaagcataacatctacaatagcgatatgaggattgaattcttttgctatattaattccttcaattccgtcttgggcagctttgatatcaaatccttcattcgttaaacctaaagataaaaactgtaaaatagttggttcgtcatctataagcaagactttaattccttttagttgttccatcatggtgaaaactcctttgctcctctactttctattatgcttttttatctgaaacagcactgaataatagctgaaagcaagctgaaaaatagtagctattcttatatcttcagctaactttaagcttctattcgtcttattctcagaaatcttttgcataatgaacggcgtactagataaaacaccataaattagatggaaagtctaatggtgaaagaggaggaaatttaaggatgattaaatgggcaaaagtattgtctacgtctgctttaggaactgcaattgcatttagctctattacaacaagtcacgctgcagaaatgaagacagcgaaagcagaaacaactgagcatgtgcgtatctcgcaagctcaggcaaaaggtattgctctgcaagattgcgaagggacggtcacatctacggaatttaagcaggaatcaagtgtgtatgtaattacaattgtaacgaataacctggagcaaagaatcgtagaagtaaatgcaagtactggaaaagtagtaaacaagcaagaagtcaagttatggacacaaaatcaagtgaaagaatctgtttctaagcagtataaaggcgttattcaatctattacatttaacatagaaacgcgtgaatatacgttaaccatagtagatggcagagtagaatatacgctaaccgttgatggtctaacggggaaagtcattcatgagaataaaaacgagctgcagctaatgtcagagcaaaaaataaaagaagcaattgttaaacaatatagtggttacgtctatagtctagagtttaaagaatccgctagtcagtatattgcagtgattcttaaagatagcactcaatatacagtaacgttagatgctttcaccggaaaagtagttaatacttctcagcaaacagtgaagctattaacgagacaagatgcaaaagatcttgcattggctacatatgcaggtaaggtgagaatggtagaatatgatcaaaacgcagcgatttttacagtgaaaataatcaaagataatacggagtacacagtcacaatcgatgcggtttcgggtgaaatcacacaggtaaaacaagctaagcttcagccattaactgagaacgctgtaaaagttctcgctttaaaacatcaagaaggaaaagtaaagcatattgagcttataacagaaaactcaataactgtatacgtagtaacggtagcgagcggaagcaggcagcagacgcttaagttcgatgcttatacaggacaagagtgctcataattttttatcttaaaacataaaacacacatttcatttttcattcatatcaagtagagggtgcttcaaggcatcctctgcttttctatttataactagaaacggggctgtttatctatgttaagataaatgtagattattgttgtaaaatggatagaaccagaatgaaataaattaaatagatagggtgtacacatgagaaaagaagtacaagttatagccaaagaagcttttattaaaaaagtgaacaagggttatccactcattgaaaaagatgcgcttgttgatggtcataaactgcaagaagaaggggttattattaacttagtcactcccaagaatcaatttttagccaaaggctactatggaaaacaaaacaaaggctacggatggattcttacgaagaagaaaagtgagcaaattgacgcggcattttttgcaagaaaaattcagcgagctattgcttctcgtcatgacttttatgcgtctgaagacacaactgcttttcgcgtatttaatagtgaaggtgacggaatcggcggcttgattattgattattatgacggatattacgttatgagttggtatagtgaaggaatttatcaatttaaagaatacgttattgaagccttaaagtctgcgcctaactttaaagggctttatcaaaagaaacgttttaatgtcaaaggacagtacattgaagaagatgattttgtagcaggggataaaggtgaattccctttaattataaaagaaaatggtattcgttttgccgtttacttaaatgacggagcgatggtgggagtctttttagatcagcgagacgtccgtaaaacgattcgagataaatatgcaaaaggaaagaccgtgctaaatatgttttcgtatacaggcgcattttcagtggcggccgctcttggaggagctgcgaaaacaacaagtgtcgatttagccaatcgcagcttggcaaaaacaattgagcaatttagtgtaaatggaattgatcaagaagcacaggacattatcgtagaagatgttttcaagtattttaaatatgcggtcaagaagaacatgaccttcgatcttgtggtgctagatccgccaagctttgctaagtcgaaaaagcatacgtttagcgcggcaaaagactacaaagatttattaaaagaagccattgcgcttacaaagccaaacggtgtcattgtagcatctacgaatgcaagcaattttgatatgaaaaaattccattcgtttattgaaaaagcttttaatgaaaaaggggaacggtacaaaatgatggagcagttcgctcttccatctgattttaaaacaataaaagaatttaagtcaggtaattatttaaaagtcgtgtttattcaaaaaataaatcgctaaatgcaaggctgcatgatgaactcatgcagtttatttattttagataaaataacgcttacaagctattttgcagggaataaaatgaaggtaggagataaatattgtcaatatatatgataaaataataaagcaattatgctcaacacttcacaattttacaatatcatccttatgaaacgtatttttacaattattttattttaaatgggataagtattgggtgtgaagtagaaagagcatactactactattattaaaaaacatgaaaggagaaagattatggctgaaacaacaaaaaagcctgccggcgaagtgaaatttattcctttattaatttgtctggcaatcggacttgttttatggtttattacacctccatccggacttgatgtgaaggcttggcacttattcgctatttttgtggctactatcgtagggcttattattaaaccattgccattaggcagtgtagctattttatctttaaccattattgtattaactaatacattaacacttgaacaatcgctcagcggttttcaaaatacgacgatttggttaatcgttattgcattctttatttctagaggttttattaagactggtctaggaacaagggttgcctatatcttcgttcgtttgttcggtaaaaagacgttggggctatcttattctcttatcgtaagtgacttgcttttatcacctgcaatgccgtctaatacagcacgagctggaggaattattcttccaatcattcgttctttatccgaaacatatggatcgagaactggagacggtacggagcgcagagtcggtgctttcttaacaaaagtatcgtttcaaggagatatgatcacatccgctatgttcgtaacagcaatggcggccaatcctcttgctgttaaaatgacggaacaaattacaggcaagactatttcatgggttggctgggcagcggctgcaattgtacctggaattattagtttaattgttattccgcttgttatttataagctgtatccgccagaattaaaagaaacaccggaagcatctgaaattgcagtaaaaaaattaaatgagatgggtccgctaaagaaagaagaatggtacatgattggcgtatttttacttcttcttgtgctgtggatttttggcgctaatttaaatattaatgcaacaacaactgcttttattggtctatgtacgctgcttttaacgcaagtattaagctggtcggacatcaaaaaagaacagggagcatgggatacattagtttggtttgctgttttggttatgatggcaaccttcttaaatgatctaggcatgattccttggttcagtgatctgatgaaaggaactgttagtcatatgtcttggatgacggcgttgattgtactagctgttgcgtatttttattctcactacttttttgcgagtaatacggctcacgtcagcgctatgtacgcagcatttttatctgtcattgtggccgctggtgcgcctccgttactgtcagcattaattttagcgttctttagcaatttatttggctgtttaactcactacggcagtggaccggcaccggtgttcttcggtagtggatatgtaacgcagcaaaaatggtggtcgctcggctttttaatttcaattattcatattatcatttggattggaattggcggcttgtggtggaaactgctaggtctatggtaaaaaaaacagtggcgcaggccactgttttttttatgcttcagcccaaacggatacagagccgccatttacagggaactgtgcgtagccatcttcttcaatcacaacttgatcttctcgattgtttgtgaaatcaatccacgtttgtccacttcggtgttcgccgacgaacattctcttttcaccatcttcgctgtttgacatcaccacagcgcatccagacttctcgaattcctctacaccatgccgtacccatccaatagtattcgggtggtcaaaataatcgtcttgctggccgtatgctttgtcatagcgtacatgcaagagagcggaaatatctttttcttttccctcaattgggtgctctccgcctatcccaaaatagtctccgtaaaacacacaaggatagccgtcttcacgaagtaaaattagagcgtaagcactttgtttgaaccaatcttctacccaagattctaaagattcatttggctgagagtcatggttatctacaaatgtgacaacattcaacgggtgagtcttgactaatgtatcatcaaaaatcgtggttaaatcaaaatctcttccttgctgagaggcttcatgcagtttatagtgcagcgatacgtcaaacaaatcgatttgataatcaatcacatctaggaattcctgacaggctgttaactctgggttccaaaactctcctacaaaataaaatggcttttcttgagaagaggacaattcgtgggcaaactctttaataaaatcgtggttaatatgtttaatggcgtctaatcgataaccgtcgcactgcagagtgtctgctaaccattttccccatttgatcatttcttctcgaacttcagggtgatcgtaatcaatattcgcaaacattaaataatcgtagttgccaaactcttgatcgacattttcgttccagcttttgttttccccggcaatacgaaaaacgccttcttttccatttttatcatcgtaatcagtgccgttaaaatgattaaagttccatttgaaagaagaatattgatcgccgcgcccttcaaatgtaaactttgtccacccttcaatttcaaaaggttcagaaatttcttctgttcggttcatggggtccacttcaatgacatggaacgtttctttttcatctgctgcagctttatgattcattacaatatccacatagacattaattccatgattatgacaggcatcaatcgcttcatgcagctcttgcttggttccatactttgtacgaacggttcctttttgatcaaattcgccaagatcgtataagtcgtaaacgccgtagccattatcttctgatgaaacaccttttgtaaccgggggtatccacacggaatcaattccttgttcttttagttgaggggcgagctctttgaggcgttgccaatgctcgccatcagctggcacatgccattcgaaaaattgcataattgtatgattccgttccaagttaaatcatcctccttttaaataaaaagatataatcgctcacggatagttctttaaaatcaaatgaggaattgattatattttttcttttaacgttcctgttatccctattctttaaacctttttcaacatatgaagcttaagaaaatcttaagattttcccttcctttttcttaagaaatgcagtttacaataaaacccatagacgaaatgacccatgatatacttttgaaaggagtgtgagaaatcaatgaacgaatatgtggttttagtcgtagacgatgagcaagaaatccgtaatggtattgctatttatttaaaaaatgaaggtattaaagtctttacggccaaagatggaatcgaagccatagagatactaaataaagaaaaagttcacttaattattcttgatattatgatgccaaggcaagatggcatttcaacgacgtttaaaatccgagaacaaaaaaatatcccgattattatgctgagcgctaaaagcgaagatgcagataaagtgctcggtctgcagataggagcagatgattatgtgacaaagccttttaatccattagaactgatagcgagagtcaaatcacagttaagaagatatgtgacattaggtacatatgaggaaacaacgacgattgatatccgaggtcttgcacttgatattgaggctaagtccgtcactcttgatggggtattcattaagctgactcccattgagtataaaattgtagagttattaatgagaaatgcagggagagttttttccatacatgatatttatgaacgcgtatggaatgaaccaggctacaacgcagaaaacacagtagcggtacacattagaaaaataagagaaaaaattgagattgaaccaaaaaatccgagatatgtaaaggttgtgtggggacttggatacaaaatggaaaagtagcgtcatctcagctatagggattatcttgtttttatttggtttaggagcaactatttcttcaattagtaacgtgcataatctattaaaaacaaactatttacaaaaaagcagctatgtaaaatcagaagacttcaaaaaacaaataagtcgttttacaaatgatctctaccttttagaattgacacaaaaagataagaataccgttaatgcaaataagataacagaagaagagattgagtcgtatcgatatacggaaggaacattaacagaacaaataaaaaatgtgcacgataaatatgaagaaaaaatagaagacgctaagcaggcaaagagcaaaaacgttgaagctgcctatgcaaaacagcaggatctagaaattaaaaacattcaaaaaaagttccaagatgatcaatttattcgagaagaaatagtgaaaaacaaaaaactcgaaatgaagaaactttatgatgaagcttttgatcgacaaaaaacattatctcaatataaaaaagacatcatgtattatttaaaaggtaggaatacaaacaaaatatacacgaacatccaaaacgcaggcaaagaagatgttaatcaattagtaaaacagaaaaatatattgtataaacatacttattcagctcaatcaccgcttgtgtttcaagcagatgaatataaaaattcatcgttaagcagtgaggcagaatcagagatcccaacccggtatttaaagcagaggtttacgggtataattgctgttcctgaaaaagaaaccttcattagtcctttatttgatgaatataactattatcatcatcaaaatgtagcgtttctcgtgtatgcattgtcagggatactagctctgttaataggttactttatttataaaaaaacaataactggacatttaaaagaaataaccagacaaactgcagtacagagggtttataaaaaaatacctttagatatttgtataattgtttttcttttatactcattttttacattaagtctagttctgaacggctatcctgcttcattattagagtcatataagcatgttgctacgttcttcttttatatgatagcaatatccatagctatttccctatgggcacttcaagtatttctactgtttcagcgtatgcgcacaatagatgatataaaagaagaatataaaagaacgtgtgtttatcaagtaatttattttcttcaatttatttttattatcagacatattggcatgcatataatggttgtagtgctgcttttagtttttgccgtgtttgctgttgcagctctattgactagtggatctatgtttgcagaacaagtatccatactatacttagctgttggaagtgttgtaggagtggttaccttgatactgcttatgctacgaattaattatttaaataaaattattatttcaattgatcgaatcgccacagccgagtggaaagagccgttacctatcaaaggaaaatcagctttgactcaagcagcgataaatataaatcatatccagcagcagattcaaacatctcagcatgttcaagttaaaagtgaacgcttgaaaacagagttaattaccaacgtcagtcacgatttaagaacaccattgacttctattatgacatatacagcgttgctaaagtcgcaagatcttacttcggacgaacaacatgcttacgttgaaattattgaccgtaaatcaaaacgtttacaaacacttattgatgatttatttgaagtgtcaaaaatggcaagtggaaatgtagaattgcataaagataaaattgatattaaccagcttcttcatcaggctttagctgaatatgatgaagcaattgaagattcaactctgcaatttcgtattcaatctctcgaaaagccgatatttgctactgtagatggtcaaaaattatggagagtatttgacaatttgatagagaatatattgaaatattcacttgaacaaacgcgtgtctatatttctgttcaagaaataaacgaacaagtgaaactaacatttaaaaatgtaagtaaatatgaattaaatgagcaggcagatgagctgtttgaacgatttaaaagaggggacacttcaagacaaaccgatggctccggacttgggttagctattgctaagtcaattattgatttgcacggaggagaactgaatattgaaattgacggagatttatttaaagtaacgattactctttaatgtgagtgaatataaacagcatatctagtaaaaaaagagaagcaacctcattatgctggttgcttctctttttttagcgttcgtaattttattccgcaaccgcaaagcgtactgtgctttagtacttttatttctctatcacactgattacatcttatttcttgtccaatcatttcttcatcccttcctctttttacaagaatttaaataagtatccataaaatatggatacttatttagtgataaaatgttaatctaattgagaataaaagataatctacaatgagaaaaatacctttattttttcatctggaaaactgatatctttattttacttgctgcggaacagataatcctaaaccgtctgcaacgcgtgttccatactctggatccgctttgtagaagtgctggatttgacgcagtttaatctcttctttgtctacaggcttcatagcttcaacgatgtttgcaactagtcgtgtacgttcgtcttcgcttagaaggcggtataagtcacccgcttgcgtgtaatggtcgttatgatcatatgcaacactatcggcaacgcctgaaacagggtatgccgcttgtttgttttcatgagattctgtcggaccgccaaaactgtttggctcatagtaaacagaacggccgccgttatcgtcaaagcgcatttgaccgtcacgctgatagttatttacttcattgcgcggacggttaatcggtagcgcttgatggttagcacccacgcggtagcgatgtgcatcgctgtatgcgaatagtcgaccttgcagcattttatcaggtgatacgtcaattcccggtacaagcgttccaggtgagaatgtagcttgctccacttcggcaaaataattttctggattgcggtccaagaccatgcgacctacttcaattaacggatagtctttttgtgaccaaacctttgttacgtcaaacggatcaaagcgatacgtgtcagcgtcttctaatggcataatttgaacgtacagcttccatgaagggaaatcgcctttttcaatggcattaaataaatcttcagtatgataatctggattttcaccagctagctttgcagctacgtctggagagagattttttacgccttgctctgttttaaagtgatattttacccaaacgccatctccttcggcattaacccatttaaatgtgtgactgccaaatccatgcatatggcgtaaagttgccgggataccgcggtcagacattaaaatagaaacttgatgcaaagattcaggagataaagaccagaaatcccaaacggccgtcgggttttttaaatgtgtgcgtggatcgcgtttttgtgtatgaataaagtcaggaaatttaatcgcatctcggatgaaaaatacaggtgtattatttccgactaagtcgtagtttccttcttctgtataaaatttaacagcaaacccgcgagggtcgcgaacggtatctgctgagccgttttcaccagctactgttgaaaagcgaacaaatagaggcgttcgttttcctacttcagaaaggaaagctgcttttgtataggctgaaacatcatttgtcacttcaaaatagccgtgggcaccggcgccttttgcgtgtacgacgcgttcaggaacacgctctcggttaaaatgggctaatttctctaaaaggtgaacatcttgaattaaagtagggccgcgtgaaccagcggtcattgaattttgattatctccaaccggagctccccaactagtcgttaggttattcttgtttgttgtcatcttagaaccacctcttatttgaattttattatgttagaaataataataacatttttaaataaaaaatcaatactaaattataattattataatttaaagtgttaattttgagatgtagtcaatggggtatatagcatgtgaagtgtacgaactattttaaaaattttctgtatagtatatttagtttaataataaaaatgcctggtgtgcaattattttgaccggctattaccatatcaaaaacacgcttgcttatataagcaagcgtgttcgttttatatattttgtgttaagtttgctttcgctgccagctcagcctgaggcgtgcgccaaagctgtgtccatttttgaatcgcggctatcataataatgagaccgagtataagcatgacgattgaaagagtcgcatttaatatgctgtaacctgccgcagcttcatttaaatacacattcttaaccatccaataacccgcgtagttaaccgtcacgtaaaggtaggctaatggaataaggcaagtaagcatataggaacgtttatctgcaattctaagaatgacggttgctccaataattaaaccaatagaggccattaactgattcgatacgccgaacagcgcccaaacggagccaatatctcctgagaacaataagtacccccacataaaacaggctagggcgcttgcaaaaatggacccgggaagccagtctactcgcttcaaaggcttataaaattcaccgaaaaaatcttgaattaaatagcgggaaacgcgtgtgccagcgtcgatagcagttaaaataaacactgcttcaaacataatgacgaactggaaaaaataagaagacaggtggctgaaccaaggaatttccgtgaagatatacgtcatgcctacagccagtgtaacagcgccgcctgtacggccttccaagtttagaccaatctcttggctaagctgaggaagagctgtcacgttcataccgagcgttttaaacacttcaggtgtagagttgattgcaaaatagtctccaggatgtaaagctgttgcggcaattaatgccataattcctaccaagcattcgactaacatcgccccgaagcctacaactttaatgtcactccagcggtcaagcatcttaggggttgtccctgaaccaacaaatgcatggaagccggaaatagcaccgcaggcgatcgtaatggaaatgaacggccacacaggtcctgctaaaatagggccgcctccgtgaataaattcagtaactgcaggaaatggaattgctggatttacgaaaaacacgcctacaatcagcgcgataaagacaccaattttcataaagctgcttaaataatctcgaggtgctaaaagcagccaaacgggcaaggccgctgcgaaaaatgcataaacgggaagaataattgaaagtgttttaatatctagcgttaaaaaatctcctaaagctgttccttgaatataaggaccgctaaatacggcgattaaaattaaaatgaagccgacggtagaagccgcttttaaattaccggtttttttgtggtaaatacctacccccattgcaattggaatcgtaattccaacagcgaatgtaccccaaggatttttctcaagtgcgtgtaacacgaccatagataaaccggccattgtgatagtaatgataaaaagcatagctaaacctgtacaaaaaccagcgacgggtcctagctcttttttagccacttctgaaagcgactggcctttttggcgcatagatgcaaataacacaactgcatcgtgaacggctcctccgattacagctccgattaaaagccagagcagtccgggcaaatagccaaactgagctgctaagataggtccaacaagcggaccagcagctgcaatagctgcaaagtgatgaccaaatgttacccatcggttggttggcacataatctttcccatcttcaagctcatgtgctggcgttttttgcgaatcgtttagtttcaagaccttaacagccatgaatgttccgtatagccgatacgcaatcattaaaatacagatagatccaataacaatcgtaaccgcattcattacaaatccccctatcccttagttgtctgatgtttgtactactacacaacgttatgtaattgtgtgttccccttacaactttcattataaaagaagaaagcgcttttatcaccagtttttcccttaattatttaaaaaattagaaagttcaaattccctttgaaaaactataagacttttcgcataatctctgctataatttttaaaaaaattagtacgcatttaggtgtttttagttagggagatgaaaagagtgaaccatcgtcaagagttacaaaatagcaagcgtattgtagtcaaagtagggacatctacgttgacctatgataatggagatattaacttagcacgcattgaaaaactagcgcgtgttttatctgatttaatgaatgcaggaaaggaagttgtgcttgttacatcaggtgccgttcaagtaggagtaaaaaaactaaagttaaaagaaaagccaacttctattcgagaaaaacaagcagcggcctctgtcgggcaatgtgagcttatgcatatctatagtaaattctttggtgagtacagccacatcgttggtcaagtactgttaacgaaagatgtaattgaagatgaacatgtgcgcaataacgttgtgaacacgtttgaaaaattaattgaagacaaagtgattcctattgtgaatgaaaacgatacagttgcaatcgatgagattgaaaacatcgtgcgttttggagataacgataatttatccgccattgtttcagttttgattcacgcagatttacttgttattttatctgatattgacggtttctttgattcagatcccacaaaaaaccctaactctaaattaatgaaagtaatagatggcatcacaccggagcttgagaattttgctggagatagtggaactgacgttggaacaggcggaatggtcacaaagcttaccgctgctaaaacagctacaagtgcaggcgtgagcttaatcttagcaaatggtaaagagccaagtattttgcgagatattattgaaggccaagaaattggaacgttattcttaaaacaagctgaaggagtaatgaaatgagtgaattgcagcttaaaggaaagcaggcaaaagatgcctcttatttcttaggaaatgtaacgagtgaacaaaaacagcaagcgctttataaaatggcggctgctttattgagtcagcaagaagcgattttaaaagccaatgaattagacatagaaaaagccgttcaaaaaggcacgtcaaaagcgatgttagatcgtctatctttaaatgaagaacggattcatggaatggcagacggcctgcgccaagtagctgcgcttgcggatccagtaggagaagtgctgtctatggcgaagcgaccaaatggcttacaaattgggcagcagcgtgtacctattggtgtcataggaattatttatgaagcgcgtccaaacgttacgtgtgatgcagcaggcttatgcttaaaagcaggaaatgcagttattttgcgcggaggcagcgaggcgttttattcgaatcaagcgattgtttctgtattatctcaagctgcggcaagtgcaggattgcctgagcatagcgtacagcttattgaagatacgtcgagagaaacagcactggagttaatgaagctaaatgaatatatcgatgtattaattcctcgaggcggtgctggtttaattgaagcggtggtaaaaaatgcaacggttcccgttattgagacaggaactgggaactgccacatttatgttgatgaagaatatgacggtgacatggcggccaatattgtcattaatgcaaaaacatctcgtccagcggtgtgtaactcagctgaaaagctgattattcatgaacgagcggctcatgaatttttgccgattattgttcaagcgctacgagagaaagatgtagaattacgcggtgatgaacgtgcgctaacaatcgttccagatcttgttccggcaggaaatgaggattggaagaaagaatatttggatttcatcatggcggttaaaatcgtagatgatatcgatgaagcgatttcccatattaatgttcatagttcacatcactctgaagcgattgtaacaacaaattatgctcatgctcagcgttttttacagcgcgttaattcagccgctgtttatgtgaatgcttcaacgaggtttacggacggagaagagtttggtttcggggcagaaatcggaattagtacacaaaagcttcatgcgcgtggaccgatgggattaaaggaattaacaacgctaaaatatattatttacggagatggacaaattcgataaaaagaagaggctgggacgaaagtattttagacgaagtgaaaaacgaaccattaatcaaaatttttgattagtggttcgtttttttttgttagggtgaacgtagttttcatctgtttagattcttctagtagttaattggagggcgagacgaagctcagcgcccgcccgcggaaagcgaagtcttgcacagaaatcaactacggtgtcacaagctgtttagctcatgtatcccatttgttcatctttagattggattcatttatttatatcctgaactaacccttcatttccatatatgttcaatttcttcaagtaactttccttttgtttctggaacccacttccatataaacaaaaatgaagccatacacataatcataaagaataaaaatgtaaaagatcctccagctttgctccaaagaatagggaaaaactgagacacaaaccaattagctatccacaagaaaaacgtggaaatagacattgcatagcctctcgcgtgattaggaaaaatttcagaaatcacaacccatgcaaccggtcccatagaaatattaaaaagaaataaataaaaaacaataagtaaactagtagtcaacccttcagtaccttgagaatgaaacccaaaggaaacgagaagctgcgtaacagccataccagctgtgccaataagcaataaagctttgcggccaatccggtcgataagccacatggaacaaagaacgcctaaaaaggtagctacaccaatcatagacgtaacaaggagcgataaatctcctctagctccagctgcttcaaaaacttgcggggcgtaataaataatggcattaattccgacaagctgttgaaaggctgcaagtagaataccaataagcagcgcttttcgaagaccggcctctttaaaaagcgaaagagaagccggttgattttcttttaacgattgctcaatatgatacagctcttggcgtgcaatgtgtgtaccattgattttaattaaaatgtccatagcttctaaagtgcggtttgcttttaccagccacctcggactttcaggaacaggagaaaggataagaagaaataaaagagctggaatgccagaagcgccgataatgtagcgccaccccgtggaattctgccaagcgtcttccccaatagataaaatgtagtcatttacaaaatagacagaaacaatcccaacagcaacagcaaattgataaagagagcccaagcggccgcgcatgtgcggaggggctatttcagaaatataggtaatagaaagaacagaagccataccaatgcctagtcctccaataattcgagaaataatcataaaagagatggataaagatagcgcttgcataattgcagacacgataaataaagaagctgctaaaagtaagatgctttttctaccgaatcgatcactcagttttcctgaagcaagtaccccaacggcaccaccgagcagcagactagatacaacaaaacctaccatcgttggactaagattaaaatgcacttccatcaacccaatagctcctgaaatgacggctgtgtcatagccgtaaagtaaccctccaaaagcagctgcacatgaaatgaaaatcacgaaaaatagatttcctttttgctccttatactcgtcagaagttacttttactatccccatataaattcctcctttgaatcaagatcattattttaattaaaaaaacgttacacgtaaaacgttttcataaaagatgtttttatgttaaactaaaaattgtaaataatcaaactattttttaatttttatatgaattatgtacgttttgttatcaatcaatagggaagaaaaaataggggggaagagaaatatggcatttatgcaatgtgattttttttcagaagtattgcaaataagtacttcaatgaacgttttgataccgcagcaaacaaaatctcaaattggtttacaaaccaatacaagaagtgagaaacaccctacgctctatttattacacggtctttctgatgatcatacgatatggatgagaagaacttcgattgaacgctacgcatcagaattaggacttgcagttgtaatgccaaatgtagatcgtagcttttatagagatatggcttatggaaagaagtattggacgtttgtaacagaagaacttcctcaattggccagatcattctttccgttatcggaaaaaagagaagataattttgtagctggcctttctatgggggggtacggcgctttaaaatgggcgtttcgcaaaccacatcaattttctgcagctgccagtttatcaggagtgatggacgttgaagggtttggaggacgtggagaagtgcagttcttagattatcctttgatttttggcatgccgcctgttattagacctgaggatgatcttttctggctgcttgaaaatcgccgacgctatggagaagtgactccgcgtatttatcaatgctgtggaacggaagattttttatatcaggaaaataaacgtttttccgagcgttgtaagcaagagcctatttgttttacatatgaagaaggaaaaggaagtcacgactgggcatattgggatcaaaaaattcaagatgtgttaaagtggctgtttagtgaaaagtagggaaggtagttttcggtggttccggcttctagtagtataataaagaaaaatgcttacttggtcgatagactaaaagaaaataggagtcggtacgaatggggagaaaaaaagtcacgattacagaagtagcaaaagaagcgggagtttcattggctacggtatcaagaatcttcaataataaagacggtaaaattaaaatcagtgaaaaaactaaacaaaaagtactaaaagcagcagctcatttagggtatcagacgaatccatttgcggcagctctgcgggcccaaaaaacagggattatcgggatattaattagagatttaaaagatctgtttctaattgaactattaaaaaaggtacagcaacaagtccaaagtcgagggatggacgttcttattggacacacggattacgaagaagcaacggctaagcgtcaattaaatgttatgatgaaccattggtttgatggggtcattttattagactatgtagctgctcagcatccgtttgtagatgtattaaaacaatatcaaacgccttacgtttctcttacaggagacgcctcttctgcactttggccgattgtacatgtagatgatgcggtgggaatgcaattagctgttgctcacttaacggactttggtcataagaatatagggttcgttggaaaagctgtaagcggagtcgagcaccgtctgtctcttttttatcagtatgtaccgtcagcaaacgcaaagtttgtgaaagaagatatgaataactcagatgaactatatcagtttataaatgagctagctcatcatccagagcctccaactgcgcttatttgtgctacggattacattgctctgaaagtgatacactgtgcgtggcaaaacgggcttcacgttccagcagatttgtctgttatagggtttgatgatattacagaagctagtgaagcgcatcctccactaacaactatccgtcaaccaatggaaaaaatggctgaaaaagcagtaaacctcttacttcagcaaattcaggatcagcaagaaatagatcagatacagtataaaatggcacctgtattagtagagcgcgagaccacaaaacgtatgaattgataaggaatgtatatactattcctgaaagtgtgagacaaaaagtccacacttttttgtattaaccattgcgtccacttccctctttcttatacactgtatgctgtaggggaaaaaaccaagctttaatatgtttggagcgatttgatgacacaacaaaaattagataaatatgaaattatggacgttagcttactagcaggtaaaattatgttagaaagcggagcagaaacgtatcgagtagaagacacaatgatgcggattgcagcgtcttacggtataaaaaaatcccacagctatgtgacgccaacagggattatgttttcacttgaaacgaaagaaccgacgaaaacgaagttaattcgtatttccgaacgaacgacagatttgaaaaaagtaaccatggtaaatagcgtctcaagaacaatcagtcaaggaaacatctccttggaggaagcgtatgaaatgctacaagaaattgaagcaacgaacgtagcttttccactatgggttcaacttgcagctgcatccatttctagcggatgctttttaatcatgtttcaaggtttatggacggactttattccagctatgttttcaggagggctcggatttttaaccgtggtgtattttcaccgtcttattccgattcgcttttttgctgagtttaccgcttcgttagttattggacttttatcagctcttttagtcgcttcaggactaggcacgcaaattgataaaattattattggatccgttatgcccctcgttcctggattatccattaccaatgcagtgcgagatttaatggcgggacatttgctgtctggattatcaaaaggagcagaagcgtttctgacggcattcgctattggtgcaggtattgccattgtatttacgcttctatagaagggaggcatcatatgcatatcgtagagcagataattacaagttttattgcttcagcagcgtttgggatcatttttaatgttccacgtgaatcattattaaaaagtggctttgtcggaatgattggctggctcatttactatttgctaacgttctatggcgtagatgaaattccaagcacagttgcatcggccttctttattgctattattagtcaaatttacgcaaaaatttatcgaacgccgatcattattttcaccgtagcaggtattattccgctagttccaggaggaacagcatacgatgccatgcgtaactttgtagaaaataattataatgaagcgattagtcttgcagcaaaagcctttatgatttcaggttcaattgccattggtattgtattttctgaagtcattaaccaaattattcgtcaatctaaattaaatgccaaagcaaaatatcgaccgtagagaagcaagctcaaatcagagcgtgctttttttatgaaaaaataaagagacccttcacttttttgtcacaagaaagtcacgttttagtctaaaaacgttcaaaaaatgtacgtgcacagctaaaaaaatagactatactatgtaaatagaaagagagatattacatatatatgtgaagtgttgagcatatctctcgaattattatgctcaatgtttcacaatgtaagtaaaagatgctcagaaatgagcaaagtatctatggaaatgatgaatgttcttatatatgaaaggagaaagaagatggatacagttatactatcacgtattcaatttgcatcaacgacgctgtttcattttatctttgtaccgctatctataggtcttgtctttttagtagcgatcatggaaacgatgtacgtagtaaaaaaagatgaacagtataaaaagatggcaaagttttgggggcacttattcctgattaactttgctgtcggcgtcgtaacaggtattttacaagaatttcagtttggcatgaactggtcagagtactcacggtttgtaggagatgtattcggtgcgccgcttgctattgaagcactgctagcgttttttatggagtccactttccttggactgtggattttcgggtgggatcgtttgcctaaatggctgcactgtctatgtatttggcttgttagtctaggtactattttttcagcgttctttattttaacggctaattcttttatgcagcatccggttggaatggagctgaataatgggcgtttagaaatgaatgacttctttaaattgttaacaaacggtcagctgtgggttgaattccctcataccattttaggttcgtttgcaacaggcgccttttttatcacgggtgtcagtgccattatgctcttgaagaaaaaacatgtggcttttgccaaaaaatcatttcaagttgccattattgtagggttagtttcaggtgtaggaattgcgttatctggtcatgaacaggccggatacttagttaaaacacagccgatgaaaatggccgcaagtgaaggattatgggaaaacagcggaagtccaggcgcttggacggtaacagcaaatattcaccccgatgaaaagaaaaatacgagtgaaatcaaaataccttatttattaagcttcttatcatacgggaaattttcaggttccgttcccgggatgaacgagctgcaggagcagtatacggcgaaatatggagcaggaaattatattccacccgttcggacaacattttggagtttccgcattatggctggtctaggtggcgtattatgtgcattaggtatttggggcacgtacttgctttctcgcaaaaaacttcaagaaagcaaactatttttacgtattatgacgattgccattgcctttccgttccttggaagttcagcaggttggattatgacagagattggccgtcagccttgggttgtatttggctatatgaaaacggaagatgccgtgtctcctggtgtaacagcaggtgaattgctgttttctattatctcgttttcgttcttttatttaattttagctgtgattatggtgttcttgttcgttaaagaaattaaaaaaggtccagatcacgatcacgaagcacatacaaaagtagtatcaactgatccgtttacaaaggagggatacaatgttttctcttaatgaattctggtatttactagtatccattctgtttgttggttttatctttttagaaggctttgattttgggattggaatggtgtctcgttttttaggaagaaacgacttagagagacgagcttttattaatacaatcggtcctttttgggatgcaaatgaagtttggctaatttcagcaatcggtgctatgtttgccgcttttccaaactggtatgcaacgctattaagcgggtcatatgttctgtttgttcttctgttgctgtcgctgattggccgcggcgtagcatttgaatttcgaggaaaagttgaaaaacaagcgtggaaaaatgcgtgggattgggttatcttctttggaagtctttttccaccgctcatttttggtatcttattttcagcgctaatgaaaggactgcctgttgagcgcaacatgcaaatgaatgccggcttttcggatattgttaatctatataccatcacaggcggcgttacgttaacaatgctttgcttatggcacggacttatttttgccacgatccggacgatggacgatattagagatcgttcacggaaggtcgctatgaagcttttgcctataaatgccttattacttcttatcttttcaggcatgacgttttttgaaacagatttattcagtaatcatagccgcttgatgctatatacatttttcatcggtattttcgtgtatttactagcaggatttttccttgcacgtaaaaaagacggatgggcatttgctatgtctggcttaattttaattttatcaatttcctctatatttgcaggattgtttccaaccgttttggttagttcaatcaatgaaagctatagtttaacgattcataatgcagcatcagggaattattccttaaaaattatgtcttatgctgctattgcattactgccttttgtgttaggttatcaaatttggagctactacgttttcagaaaacgtgtagatcataaggagcatatggagtattaatgggtagaaatttaatggtttacaacggaataaaaatggttcttgccatgttaatagggcttattactattcaaagtgtagccattatttttcaagctaagtggctcgccgaagtaattaccgctctttttcatggtgaaagtttagcttcgcagacaaaagcaatcggcttgtttttgtctgcctttataattcgtcagatcgtaggttttatagtaaaaaaaacagcatatcaatttggagtcaaaacgactcaggaacttcgtttgatagtcatgaaaagcattttttcattaggaccgcgttttaccaaagatgaaggaacaggaaacttggtgacgctcatcaccacaggcctacagaaacttcgcgcttatctcgagctgtatttgcctaaactggccgcccttagcgttacaccttggctagtgctcgctttcgtttggtaccacgatcggctttcaggcattattttacttgtaaccatgccaattttaattttatttatgattttgcttggattggctgcacaaaaaaaaatagatagccaatgggagacatatcatgtgttgtccaaccactttgtagattcgcttcgagggttagaaactttaacatttctcgggaaaagtaaggagcatgctgaaacgattgaaagagtcagtgaccgttatcgaaaagcgacaatgggaacgctccgaattgcttttttatctacgtttgctttagatttctttacgatgttatctgtagccatcgtggctgttatgcttggtttgcggctggtgaatggttcgatgacattagagcctgcacttatgattttattgttggcgcctgaatatttcctgccgatacgagaagtcggaaatgattaccatgcaacattagacggaaaagaatccggagatgcattacttaagattgtgaagcaggctgaaaaaacgccagctaaaaaagaagatgttcctagttggactgaaagcagtgaacttcaattaaggcatatcaccgtcaaatatgacgaagagcatccaccttctcttgaagatgtgtcactgcatgttaaaggaatgaagaaaattggaatcattggaaaaagcggcgctggaaaatcgacgcttattgatatactaagcggctttgtgcaatctacagaaggctctgctgaagtaaacggcgtgccaattgatttacgctcagctgcttggcaaaagcagattacgtatatccctcagcatccatttatttttaatggaacagtaaaagaaaatattgaattttatcaagatagaggcggctcatatgattatgaagatgctttaacgaaagcaggacttttatcaacggttcaacagatgcctaagaaggaaaatgaaatgataggggatgggggacggcagcttagcggcggccaagctcaaaggattgctctagcaagggcatttctaagcgaccgtcctattattatgcttgatgaaccaacggcacaagtcgatattgaaacggaatatgaattaaagcaagatattttaacgatgttccaagagaagttatttattttagctacgcaccgtctgcattggatgaaagacatggatctcattgttgtaatagaggacggaaaggttgcagaaatcggtaatcatcaagaactgattcaaaaaaaaggagcttactatcaatttttacatgaagaggaggagatatgatgaaatataaaagttggatatggccctactttaaaacatataaatatcgtatcttttctatcttattactaagcatgttaacgattggttctgcttgcgcgctaatgttcacgtcaggttatttgatttcagcttcttccttacggccagaaacgattttattggtgtatgttccaattgtacttgtgcgtacatttggtttaagccgagcagctttccgttatgcggagcgtcttgtcagtcacgattttattcttcgtattttagctaaaatgcgtacacgtctttatcatttgattgaaccgttaattgctacatctcgctatcaaacaggagatgttttaggagttctcgcggaagatattgaaagtttacaagacttgttcttgcgtaccattcttccaacaatttcagctgttattttatacgttatttcgattgtagctttaggattctttagcctaaagtttgcatgtttgattgccatctatttatttttattagtagtagtgatgccgcttttttccctttggcatatgaaggcagccaatcagcgatataaatcaagcaaagcacagttatatgccaaggtcacagacggctttttaggagtgactgattgggtgttaagcggtcagcagcagtcattttttcattcgtataacaaaacagaaaatgagttagacggcatggatcgtaagcttaaactatggacgtattaccgagaattgtttggacaacttattgtagcaggtttaattgttacaatgctttggtttgggtcttctctttttgcagataaagagcttgcaggtgtgtttattgctgcttttattttagtagtatttcctttatctgaagcgctgctgccagtatctaatgcagtagaaaagattcctcagtttgaagaatcattaaatagagtacaggcaatggaaaagaactgggaagatgtgaacgaaaagaaaaaacatactctttctctaccttataaaggttcatggaattcggttaggttaaaagttgagcatgtaagctttcgctatagtaatgaggaggagtcagtaattcatgatctttcatttcaagtcgagcaagggaaaaaaattgcgattcttggcaagagtggaactggaaaatcgactctattaaagttgctgcaaggctccttagtacctacagaaggtacagttcagctaaacggtcagtctgttgctgaggttcgtgaagatgtaccaaaactcatctctgtattaaatcaaaatccttatttatttaatacaagcgtagccaacaatttattactagctaatgaagaggctacaaaagaagaagtaattgaggccatgaagcaagtgaatatgcactcccttgtggaaggtttgcaccatggatatcaaacgccgatgctagaaacaggtcagcgcttctcgggaggagaacgtcagcggattgcgttagcacgtgttttgcttcagcatacgccaattgttatgctagatgagccaactgcagggttggatgctatgactgaaaagcgtctgttatccactatctttgaaactcttcaagacaaaaccttaatttgggttacgcataatttagttgggatggaaaaaatggatgaaatcttatttttgcaagatggtaaaatagccattcggggaacgcatgacgaattacttgcgacgaacagtcactatcaaaagctatatgaattggatcacccggcaaaaagcctttagcagaagctaaaggctttttattatttgataataaagtgaaattcgacaaacacgagtaaaatatgtgtcgaatgaaagaaaacagcttggattcaaagaaaagagtatgcgtttagcatttttgaaaaagtggtaaaacaaggtaatgtttgtttcttcctgtataacatcggtttattttagggaaaatatatacacattatgcgaacgagagaaggaagatacaatggaacctatgcttatacatatcacgctcgtagtaggactaggagttctatctcagtggctggcttggagatttaagttaccagcaattgtcgtgatgtcaattatcggactactaacaggccctattttaggtttaattgatcctaaagcacaatttgctcagctttttgatccttttgtatcgattgctgtagctgttattttatttgaaggcagcttgaatttagacatgagagaggtaaggggaatcgaaaagcccgtgtttcgcattgtgacgctcggagccatgctagcttggattttaggctctttagctgctcattatatagcagatttatcatgggcggtggcaattgttatcggagggctttttattgtgacgggtccaaccgtgattttacctcttttacgacaagctaaattaaaaccaaaaccagcagcgattttaaaatgggaaggtattattgttgacccctttggtgcactgctggccgttttttcgtttgaaattgttcaatttttagtgctgagagaagtgagtggaaaaacaattctctttttcttcatagcctctattattgctgttttaatagggtggcttcttggccgcggaataggatggatgtttcaaaagggtcatattccagagtatttaaaatctccggtcgtatttattgtcgttattgcctgctttacgatagctgatgaaattaagcatgaaacaggtcttctagcagtaacagcgatggggattacgcttgctaatatgcatatttcatctattagtgatatgcgacattttaaagagaacatttcggttctattgacttctactatttttatcatgttaacggctggactgacgatgaagaccattactgaaatttttcattggaatattattttgtttgttttacttatgctgtttattgtcagacctgtctccatctttttatcaacggtagggacagatttatctataaaagaaaaaatactgattggctggattgccccgcgcggcattgtggcgttaacggtctcaagttactttgcgaaagtactaatcgatgaaggatttaaagatgcttctatcctaacaacgctgacatttgctttagtatttgctacggtttgtgcacacggtttttccctttcatggctagctaagaagcttgatttatcaattggagaagaacctggtattttgcttgtaggaagcaatgattttacggttgcctttgcttccaagttaaaacagctgggctatccagtgttagttgctgattcttcgtgggagcggttaagagttgcgcgcagagcggaagtagatgtgtatcacggagaagttctagctgagcaaacggaatatcatctagatttaactccttatgaatacgtgattgctgcaactgagttagatgcatataatgcacttgtttgtactgcttttcttcaagatatgggacggaacaatgtttttcaattaagtattcgtgaccaagaagattcaagagaagatgtcgatgaaattatgcacacggtaagaggacgcatgctctttaagaaaggaattacgtgggagtttctacatcataaaatggagcatggatatacgatttacaatacaaaaattacggatgaatatacgtatgaaacatatcttgaggagaaaagcgatgattctcttttactagcagtgagcaagcaaggaaaggcattgagtttttttgctcatgatcaagaaataaacgttaatgcgggtgatacggtgttaagccttcagccattaaaaagataaaaaaacaggccttcaatggcctgtttttttatgcttgtctttgtttgaaatgaatgacgaacagataagcagcagctgctgcaaaatagatagtaacggctggtgcggtgaagacatgcccagctacaaaagcaattccaagagctaatacaattgctgtactatacatcataaagctttcatcaagaagctgtgatgggtctttaaataatcgaaccaatacggttaaaccaactattagaagtggaagaacccatagtaaaaatccgatgatacctaaagagaaaaacagatcataaaaatccatttcaatcatctttggcggaagctgttttgtatagtcaccagaaaagcccatacctatcatttttcttgcaataggtgcttttgcatactcttccttatgatgagctaaaaattgctcacggctgcttagaattagattttgaatatctttgtcatctaaatttgattcctttttctttttagccggcttttctttttctttcttttccggcttttcttgctttgttttctcttttttagcctctaacatatcgatgtgcgtatatgtgtttttataagctggagaaatcggagtggttgctccggttacaattaaaagcagaattgagattactaagttggctttaattaagctgcgtttattcgtaaataattttgcaaataagacaactgttgctacaactaaagaaagaataacggcacctaagcctactttcgttccaagcatgatggacgaaatggctaacaagataaaaggaatccagtaataagcttttgaaaacgaacgtactttatctaaagctaaaagcagtgtgagaggaagcaaaatagcaatggttgcccctagctcattcgctgcataaaaccagcctttgaatccgattttattatactgataactctctagtgctgtacctgttagcattgtaccgataaaaacaatactgatgatgagtgaagcagtcaataagtttttgctcagtattctttttacatccacagacgatcgataatgtgaaaacattacaatcattccaagtagtgtaacgttcatataaacaaccttattgaaaaatttaatttcttgcccaatataataaggatctttccattgatgatttaagtagatattgagtccaagaaagagtgcaaaaacaataaggtagataatcgaatatctagcccattttgattgtttggcaaacactaaaagtaggacacctgcaaaaatcatatatagaaagcgaataacaaccccaattgagagaccactatccatgttcaaaaccatgtacgtcgttagcatatcaataattggctgaattgaaataaaaccaacgaacagaaaaaataaccagtatgtgttcttcatatagtactctcctgttttacgtgaattaacgttttcttttaactaaaagcataacaccttctactctgcataatagcgtcgacattaagtatactaaaccacctgcaatacagacaataccaaatcgtaagataacatgtaatgaattcaaaaatacgatgtccttcaagaagaacatgaggatagcaacaggtacggaagctaaaagaatttttcctgtttctttcactagatatccgtaatggaagtgattgatttgttttgccagcataacgaatacgatggctgtatagaaaaaggcaaccactgacatggaaagtgctaatccttggtatcccataaatttagtgaaaatcatgttaaagatgatgtttaacacaatggataataagcctgctctcataataagataacctttttgaagagaataaaatccttttgcaagaacagcttgcagcgaatagaaaaataccgaacctaggtaataataagatacatccgttgtttttaacgtcgaatgtgcgtcaaatgcaccgcgctgataagcaatcattacaatgtctttcatataaaagatcataataacaatcgtcggaatcagcagcatcagcataaacgtaatccctttttcaattcccgatttaaagcgttcttcatctttttcagaaatggctcttgcaatcagcggataaataatggttgcaaccgtaaccccgaatattgcctggggaatacttacaagtctgaaggcgtaatttaagtatgaaataacaccttcaccaaaggagccagcaaagaagaagtttacagttaaattaatttgaccgaccataatggtcacaccaacagggatgaatactttataaaaagccaccacttcatcacggtcaattttttgcttccataacaacagatgctgcggtttaaaatagacaactttaattaagaaagaagcaattgttcctataaaatagccaagagcaattgcatagccgcccataattgaatgtaataggattgtacttaaaatcgtaaatagtacaacaaccgtttgagaaaacacggagaaagaatattgacttcgtgcatcaaataccccttcgtatacggcattcactccaactagtgaaagagacaagaagtacataacgcccgtataaattcctagttcgattgctgctttggaaaaattagaatacgaagcgggaaagtaaaagaaagcggcaattgatccgagaatcgaaataatgaaacaaataagaaaggttgatttaacaatattagtcaaatgaacctttcctttattttctttttcataacgtaaataactaggaataaacgcatccttcatccccgttaacataaataaaataaaagcgtttggaatgatcattgctgcgttgtatgaatcgacgatataacttgtaccgaaatagttagcaataactaaatcacgaatcatactagaaaatttcaaaaataatgttgatatgagcagtaaaatgctcgcgaattttaagtttttcatgcgaaactcctaccttttcaagttatctcatcaactattagcaataaagaagcatccaacaattagaagaatacagccgataacttgttttgttgtaactttttctttaattaaaaagtaaccgaatgttaatgtccaaatatacgtaatagacgtgagcggaaatacaatagaataaggtaacagcgttaaaacatacacattaagcagagctgccgccccgtaaaaaaggccgccacccacaaagcaaataagcgctagccttatctttttttcatttaaatacgtagaaatatacttgaaaaagacagctccaactgaacctaaaagggtcataataattaaaagtgggatactattcatcttggccacctactaaaattacacttacgataataataagagtaccgaccagcttcatagggctaatggtttcatttaatagaaagaaaccaagagcaatgctgattacgtatcctaggcttaaaaatggatgaagtaaggaaactctttcaaatttaaaagcggcaatcataaaaaccgctcctaatccataaagaaaaaaaccaataattaaatttaagttaaatgaagcttcggacaacttccaaaaaagttgtccaacagctgtaaacagggaagccacgataatgagtgtgattcctagctttttgttgtaattgctctccatcaggaggtcacatccctttctttctgatcaaatcggataaaaggaagaccaataaagaagaaagacacaaatacgcttgctaataaatatcgaaaatcttgagccggcaatgccgcaagaacagaaagagtgttaagagcccaaggaatgacgataataagtgacgtaattcctcttcgaatcactagcattaatgaaaataataaaatgacacagtgataaaaagctggtttccataagaatgtaaaaacagggtgcttgaaaatagctaagtaagcattggcagtatgcgtaataaacggctcgattattttatttttaagacctaaatcattgccgtaataaatgttggttacatacgtatctgtgtagccatctttaaaaggattgatttgccatactaaagccgtttgtttgagaaagccttccgttgctagataaggattttttatgacaatgctaacataattcttaaagtaaagacctaaatcattaaaaataaaatcgcgatcgtagtatttccaagtaaatttaataggatcgcttttgtatggattgtacttttctttccacaattcaatagggagcactttattaaaatattcgcgctcttcttttgacatttccccatcatttgaaatgatgtttgcaatttgttgagttggaatagacaaagcttcatttggatccgaaggctgtacatcaagccacgtgaacacagggcctgtaacaatcttttgtaaaataaagacgactaagaaaatcgtgacaagaggtttccaattttttctgaataagacgatcattaaaaggaaagtcaaaacaaatacaggaaaaccattatgtctaaagaaagctactccaaatgcggaaagtaaaagtaagaaaaagcttgctttgcttttaatccaagcaccttttgacaaatagatttttgcaatattcaccgtaaaaaacagcagaaaagcactgtataaaatatctttccaaataataattgaaaagattaaaaagcttggaataatgacaataatagctgttaaaagtccaatcataacaggatgtgctttgcgtttaatgaaaaagtcaaacgtataggcgtatatgcttactacaacaacaatttgcgtgaacgctacaattcctgggttatcccatatttttgtcagcagcatgatgagccatgtaatcataatagggtgccaatcgttaaattctccgttatgtgcctgtctccactgtgctaatgaatcgggagtcatggccgctgggaaaaaggcgaaccagtaatatagactaacagctaaaataagaatcgtaacaattcctaggtaacgctttgggtgtgcaaatgtatagtgaaaatcgtttatctgtttgatagcgctgagtacagcggccgtcagcagcattgccaataaagtacggctgatggcatacaaaacgagtaagaaaacagttgagctcgtcatatgtaagttatctaaaagtgaaaactgtacgataaacgaaaaaacaatcagcaatagccattctagcggtttaaatgaagcataagctctatttttataaataaaaatagagcttatgatggtaaatacaagtgcagcaaaaaggtaaagatagtgaacaccttctggattaccaatacttaaaccgataagaataattaaagctgttactgtaaacagtaaaatactttttttattcttcatcattgttattctcctacttgttcaatctgttcaatttttttatttagttctaattcatattgcttgcgatttaatgaagcgattgtatctagaattaatccacagacgaaagataaaacacctaacaccatcaatccagttgctaagatagatgacggtactttggtaataaagcctgtatcaaaaaattcataaagtaccggagcaccaacagctaatcctgcgacaataaacaacactgtccaaatggagaagaactgaagcggcttgtactctttaaataacgtaaaaatcattcgtaacactttaaatccatcagagaacgtattaagtttcgattcgctgccttcaggtcgatcgcgataatcgatcgcgatttcttttaggcgaaagcgtttatctaacgcgtgaagactcatttctgtttcaatttcaaatcccgggctcatcacaggtattgattttacaaataatttatcgtacgcacgataacctgtcatgatatctttaatgttacttttgtacaggccattaattaaagaacgtactaagttgttaccaaaattatggaaagcacgtttgttttcttcgagatacgttccgtttgataaacgatctccaatgaccatattagcttctcgatttctaataggctcaattaattgatgaacaaattctgcagggtacgtatcatccccatctaccatgacataacaatctgcatcaatttcttgaaacatcgaacgtacaacatttccttttccttgcttgaattcttttttgacgattgccccgtgttcaagtgcaatttcacttgtacgatcttttgaattgttatcgtacacataaatgtctgcactaggcagttcgcgtttgaaatcgtcaattacttttccaattgttacttcctcgttataacaaggaattaaaactgcgactttcatttttccacctcatcaaaaaaaattgttgggagttgttcagcaattacatctactgtgtagcggtttgctgtttgtaacgcctgttgagacatttgctgtttcacatcttcaggaagattaataaaagcctgtagctgtgaagctaattcctctacatttttaggctcaaagaatagaccattctttccgtctataatgtaatcttttagaccaccaatctgactcccgattacgggtgctccgcaagccatagcttcgaggccgactaatcctaaactttctccttttcttacggtcggaaacacgaatgcttcaattgcattatatacgtaagcaagagaggactgaggaaggagagggaaatggatgactttttcctctagacctagagtcttgatcatttccttaaatgcagcttcatcttttccgcttccaacgtataggtatttataagaagtgggcatttgttgttcagcttttgcaattgcttgcaggtagtattcccatcctttacccacatcaatgcggcttacacatccaagataacggatagtagggtccaagtttagttcttgataagctttgcttttatctgcataagggtgaaacagatctttattcactcctccgcttggaaaaatatagattgggttatgaaccttatatttctcttcaacgagccctttataataaggagaaggagtaataattttagtagaatgttgcaataagtcatttactctcggctgatacttttcctgtgaaagtacttcaggtacaacgtctgaaccatgaacgtttgtcacaatcttcacattcttctttagctttttaagaatcaacagaggaagagcattatgagatgcataatgtacgtaaaggtagtcgtagttttttgtcaagcccgtcaagacgacattagcataatgagaagcatagctaaaaagcttgcttaatttgcttgtctttttttgcatgacaattttatcaacttgaataccatgttgaactaaaattttttcagtgttttgaacaaatacaccatagctcgggaattgttccgaaggatacatatttgaaatcaacaaaattttcatgattgtttcacacctatttttctttattagtttatgataatgacaacgggtgttcatttaaatagagcttacatgtatcatcttactattaagttgagcgatttcattgataaacatgcaaaaatgggttgcatatcgccaacatcacaatattatagcacacctactttttaaaatgcgaaagtttatcggacacttctaaaacgatagataaagcagtaaagaagatgatttttacatcatcataatcacacgaaaaaaagcgaacgctattcgttcgctttatgtcacttatttcacttcaacgcttaccccaaaatggtcggaaacaacgggataatgtatgccgttaaaaaccacagttgatgactgaatatcctgcgcatgactcgatagaattagatcaaggcgcagtgcctgttcattatcatcccatccagcaatgttacctttaactgtaataccgctgtcttttttattcgatagagtatacgtatcatagaggccttggctcaacaggtagtcgtaaccttcatttcgtctatgagcgtcattattaaagtctccgagtaggaaaaatgggttatctttgtgtacatgagctagcagtgtatcaacttgctgcttgaatggctcttcctcgtcatcccaccagccaagatgacaagaataaaacgtaaggagttctttttcatattcgattgttgctccaacaattcttctcgttttccaatagtcaatatttgacgtttgtgaaacaaaaaatgaatgctcttcaataatcgggtgtttcgttaaaatggcaattccttcttcatacacttcatagcctatatgagatacatcccataccaattgatagtcttcaccttgcttacccagttcttttgctaaaagccaagcgtaattatcgctacgaatgtagtcatatacataaggtgcgtctactttttggcttacttcctgtaaagcaatgacatcatatttttcttttttaattacttcagctagacaagataacttgtctagctgattttcctcttgccaagagtggcaatttaacgttaatagcttcattatgttaagctcctaacaaatcttgaatgtcggatttcaaaacatccgctttaggtccataaatagcttgtacccctttatctttcaagattaaaccaagggctccgttttgtttccactcactttctcctgcaacggcatgtatatcttttaccgttacacgtaagcgagtcatacaagcatcaacgtcttcaatattgttttctccgccaagcagtccaataatgactggggcaagcgaatcatttttcacctgcttgctgcttgttgcagttgtctcttcatcgatatagtttccgttacgtcccggcgttgggaagttaaaacgtttgattaagaagtttgccactccaaaatttaagccaaagaatacaaggcaggcgatgacaaagttcattaagtcagcccatagtccggctttgataatcattggtgtacgtgttaatagttcaattacaccaaatgagtgtacgcgaacatgaacaatatcaacaatggcaaaagccagtcccgtcataatggcgtatacgacgtatagaagaggtgctgcgaacatgaacataaattcaatcggttctgttacgcctgttaagaaaacagctagtccagctgaaaagaacattgaacgatatttcaaacgtttgtcaggatctacgttacgatacattgctaaagcgattccaattaatgacgcacaagataaaatcatctgtcctactttaaatcttgcaggtgtaacgtcatgtaagagctgcttgtagctgtccatatctcctgcagcgcggaaattatttaaatctgcaatccaagcaagccacaaaggatcttgaccggcaacagtggaacctgctccagaacccgttaaaatcttgtacgtaccgcctagctccgtgtagttcataggaactgtcagcatatgatgaagaccaaatggaagaagcaaacgctctaatgctccgaaaataaatggtgctagaataggagctgtgtctctagatgttgcaatccactgtccgaagctgtttaatgaaccttggataaatggccatacaatggataaaagcagtgccgttacaactgaaccaccgatgaccacaaatggtacgaagcgcttgccgttaaaaaacgaaagggcttcaggcaatttatcatagttgtaatatttattgaataaattcgcgcctaaaaaaccagcgataattcctacgaacactcccatgttaagagcgggagatcctaaaatagatgtgaagtagtcttttacaactaattcttgtccaaacagtgattgaaccgttgcttttgaatctgagagcatttctgctttaactccgaaaatggctcctgtaattcgattaataagaatgaatgcaatgagtgcagcaaatgcaccgccagcacgttcttttgcccaagagcccccaatggcaacagcgaacaagatgtgaagatttgtaatgataccccagcctatgtcttccatcacgcgtgcaattgtttgtacagcagtgatgtctcccccagtcattgcaactagttttccaagtgaaatcataataccggctgcgggcataaccgctactactactaataaagccttaccaaacttctgccaaaaatcaaatgaaaagaacttcttcatagtttttccccttcccctatgtatgggctttcattttattttttgataaactatatttttaagatagtgcaaccgtttgcataaccttattgtaataaaagggctttcataatgcaatactgtaattcctcttttttgaaaaatttattcatgaattataaatgatgaaaaaatttttatgataaagtgaacaatatcaacggcattttaacacgatagaatgtaataaaagcattcaagtaatggcataaagacaagtgcagaggaggataatatgcaaaaagaagggctacaagcgattatttttgatttagacggtgttattgcagatacggtacatttatattatagagcaaacaaaaaagtagcagatcaacttaacgtttcattttccgaagaactgaatcagcagctgcagggaatcagccgagtgaaaactgtagagctcattgctgcacaaggcaacgtacatctgacagtggaaaaaaaagaacagcttgctgatgagaagaataagcattatcaagcactaataaaggaaatgacgaagaatcacttacttccagggatacaattgttgttagaggattgtaaaaaacaaggtattaaaatgggaattgcttcttctagttcaaatgcaaatactgtagtggatgcgttaggaatacgctctttttttgattgcattgtgaatgtgagaaaaataaagaagggaaaaccagatccagaaatatttttgacagccgccgatcaattaaaagtaaaaacctatgcatgtgtggccatagaagatggagaggccggtataaaagctattaatcaaacagatatggtttctatcggcgttggtaagcatctgaaggaagaggatgtgaattttcacgtatattcaacagctgatttgcgtttaaagacgatcaaagaggttttcgaaaaagcaagaaaaggaacagattataacagcgcgtatacaaaaaattagtaaatcttttacatgcaagtagcaaagcgtaaaaaaacatatgctagaataaaataagagagcaaagatacataggaaggggtacatcatgattaaatgtattgcgatcgatatggatggaactttagtaaatagtgaacaagttgtaagtaaagaaaatgcccaagcgattaagacagctcaaaaggcaggggtggaagttgttgttgctacgggacgttcttatgaagaggcccgttatgttttagaagaagcaggacttcatacatatttaatttgtgcaaacggagcagagcttcggaacccacaaggggaaaaacaatattcagtaggcatgacgatggaatctattcgcgaagtagaaaatatttttaagaagtttcagctgtactttgaagtctatacaagtgaaggtacgtattcaaatgactatgaaaaagctttgtcggtattaatggatatttatttaagcgctagcttaaaagataattatgaaaaatcgttagaagcggcaaaagagcgtttcaatagcggcagagtaaagcttattgaagagtatgaagcgttatttcaagatccaaacaaggacatttataagctgcttgctttctcttttgacgaagaaaagttagaacaggcaaaaatagaacttgtgaagttagattcgattgcagtcagtgcatctggtaaagaaaatattgaaataaatgatgaaaatgctcaaaaaggaattgcagttacatcatttgttcaagaacgccatatttctttagaagaaacgatggccattggagacaattataacgacgtatcgatgtttcagcgagttggacgtgctgtagcgatggggaatgcccctcaagaaattaaagagtttgctcatatcgtaacaggaacaaatgacgagcacggcgtagctcaagctattttaaatgcgcttgaaacagttaaacaataagcaaactaaaaagcatgcctaaaggcatgctttttagtttgttactttctccttgttacgacggtatgcaccgtggtttgttggtccaacatattgatttaaagcaaatgaatgacgaattgcttctgtaataaattcttttgctgtataaatagcttgtttgacgtcactgccttttgccaattcagcagcaatcgcagctgagtatgtgcatccagcaccgtgcgtaaatgtcgtttcaatacgttcagactctaagatctcaaacgtctttccatcataaagcaaatcgattgctttttcatgcgccaatttacttccgcctttaatcaatacatattcggcaccgaggtcaaaaattttgacggctgcttctttcattttatccaccgttttgataggaccaagtccgcttaattgactagcttcaaataagttaggcgttacgactgttgcttttggaactagtacatcacgcaagctgacagttgtttccgggtgaagcgcttcgtcctctcctttacataccattacaggatctactacgacattttttaaatcatattcttcaattgtttttgcggctagttcaataatttccactgagccaagcatacctgtttttagagcttgtacgcctacgccttttacaattgttttcaactgctgttcaacagttgaaacttcttgtggaaatacgttatgagaccagctgttatcgggatccattgttacaattgttgttaaagctgtcattccgtaaacacccagttcttgaaatgtttttaaatccgcttgaatgccagctccgccgctgctgtcagaacccgcaatggttaatgctttattcattgtcataaaaaatcctcccgtattttaagttcatagagaaaatagggtaaaacttccaccggtcggtttttagctgcccaatgtgttttagataaatttcttccattcactttttcttctattttatcgcttttaatgtagatattcaatttctaaaaactgtatgaatcctaagtgtatacttttgtcttagcctcttttaccttatggtacaagcactctttcttttcatgaataaaataaagagaaacttaagaaagggtgattcacataaaaaaacattctaatcatgacagttataaagacgattcgtattctttcaataaatcacaacctcgcaaaaaaaaccacaaagattattatatgaattcaaatttaacaaacgatcacttcagaactgttaaggcaggcactttaaatgtttgtataattgtattaccgggagctaaagttgatagaaactccaaagataatcagtctatagttcctaatcgtgtaaaaagagacatagcggctgctaacaaaatatggaaacaatacgagaaaaaccgattaattcgaggtgttacatttactattacacgttcagttgtttttttggaaaacatcagtggcgttgttagtaatgcggaaaattttccaattggagggtctagtcatcttacaatggtacaagcaatgcttaaaactggccgaaaagtttgtcaaaatgctgatgtgtatgtattttacatgaatggaaatagatttgggcctgttaattttgattattcatctactctcgctgtaacttataattcttttccgcttattattatgacaaatgcaagtacagatgagtatcttctcgcacatgaattgggtcattttatgtttattacgaatcgttttaacgacacggatgatccagaaccttttcatgaattagatggaaatcataatagaacgcctagtaaccttatgtttcctactcctgaattctggccaatagtaccggagattaccagtgaacagatacacaaagctttaaatagtcgtgttttttatagctaattgttgttcatgcaaaataaaaacgcccttaacaacgggttaaggacgtttttcactatttattagatagaagctaattctttttcaagagctacgtttactgatacataatcataacctaaatcatgtgcaactgcttcgtacgtaatggctccgtttgcaacgttcactcctaattttaacgcttcgttttgagcgattgctttgtgaacacctttagaagcaatttgaagtgcgtaaggcacggttacgtttgttaaagcaattgttgatgtgcgaggaactgctcctggcatgtttgcaactgcatagtgtacaaccccgtgcttttcataagtcggctgatcgtgtgttgtaatgtggtcgattgtttcaacaataccaccttggtcgattgctacatcaacaataacagaacctggcttcattgtttttaccatttcttctgttactagttttggagcttttgcacctgggattaatactgcgccaatcactaaatctgactctgctactgcatccgcgatattgtaaggatttgacactagtgtattgatttggttgccaaagatatcgtctaattgacgtaggcgttcaggacttaaatcaataattgttacatcagcacccaggccgattgcgatttttgcagcatttgtaccaacaccgccgccgccgataatcgttacttttccgcggctaactccaggaacacccgctaataaaattccttttccaccgtttgatttttgaagaaattgtgcaccgatttgagcagccatacgtcctgctacttcactcataggtgttaatagaggcaatgtacgatttactgctactgtttcataagcaatggctgttacgccgctatcttttaatgcttttgctagtgctggttcagctgctaagtgaaggtatgtgaataagataagacctggtctaaaatagccgtattcactggctaatggttcttttactttcataaccatttcagcttgtgcccaaacgtcagctgctgtctcaacaatttcagctccagcttttacataatcttcgtttgtgaagttacttccaatacccgcttcattttcaattaatacacgatgacctgtaccaacaaatgatgctacgcctgctggtgtaatcgctactcggttttcgttgtttttgatttcttttggtacgccaataatcatgattaatttcccccttggtcgtttgtgtacctttagtataaagaaagttttatgaaatttctttgtctagaaagaagaattgaagaagtagtttttgtttaaacacacaaatgtaaacgcttacttatcagaatttttaatttttatgtaaggtcatctaacatcataaggaaataaaaagtaaaaaaagagctattcgtttattttctaataaacgaatagctcaatgttaaaagaagttacattatctgttattttttatatttcattaacttaatatcaatataaagagtcattttttgattaacgtcctttaagttaatatcaccaatctctgaaattcgctttaatcgatagctaagtgtattcatatgcacatttaattcttttgctgcttcgttaatgttattatcattatttaaaaatacttcgagagtctcgaccaagttactattatgacgaagatcgtaatcagttagcttctttaaagaatggttttcaaattgatcttgcacgcgcttctctaaaataacatcaagaaattgataaatacctaattcctgatagttaataatctctttcgtttcttctggaaacttacttttcatatctaatacgttcaaggcctctttataacttttttcgatatgatcgtgcgatgaataaatactgctgcagctggctttaatttgagtaacatcaaagcgttcatacatgttgcctctaaaatagtctacaaaatctcgctgttcatcaagagggttttcaaccgcatccaaagaaagcagtaagattaagtcattgcaatcaatcgtataaagaacgattttcaagcgatgcatcgtttttagcatatacgagatttgacgttcagcttcaggcgtaatatcttcttggaagcggaagatagcaatggaaaacgttgatggagctgtaatttgagcttcataaaacgcttctgaaatttcctggtgagacttaatgtgaccagtcaataatttccagaagaattcctgtgaacgttcctctcgtttatactttcgaatttgaagctgtagcaatttattttttaatacatttgcagctttttttaatagctctacttcttcgtcgcctaaggctttctcaatttcaacagcccagatgaatcctagaacttcttcatttttccagatggaaatagctatacgatctccaagtccaatttcatttatatttttcacacgcacaggttcatttgtctcaagcagtttaggaataatgccttctttccataagttgttgatgactttttccggaactcttcttccaataatcgtggcaatacgcgcctggtccgttctttcgtcatgagtgctataagctaataagcgatgattagcatcttcaatggtaataggacagttcaatacttcgctaatgcgatcagcgaattcttcaagcgtatcaaaattttccttgaacggatctttgattggtttcgtcatatataaaatccctcttcataaaacataataagtactagtacagcttttttagctgcaataaatatagtaaaacggtaacaaccgtgttgatcatcaattcattgaaatgattaactgcttaatattttaacaaaagtaattgtttaagaaaatgttaaaatgcgtctaaaggtagttaagaatgtacggatgattagtaactgcgttcatttcgcttattttatcgaaattttcttcaaaataatcaatgttcggtgagcatgattcttttcaaatgtgtataataaaacgtatgattatggttatatcaaacttgaatctgtaactttctttatgatatgttcagttacgattaggttgaccaattcatattacacatgaagggaagaatttaacatggcaaaacaacaaatcggtgttatcggtttagcggttatggggaaaaacttggcgctaaacattgagagcagaggctattctgtttcagtttataaccgctctcctgaaaagacagaagagttcctaaaaacagaagcagaaggtaaaaattttgcaggtacatacagtgtggaagagtttattaattctcttgaaaaaccgcgtaaaattttattaatggttaaagctggtgctgctacagatgcaacaattgattcgttaaaaccatacttagaaaaaggcgacattttaatcgatggcggaaatacattcttccaggatacaattcgtcgtaacaaagagctagaagaattaggtatccatttcatcggtacaggcgtatccggcggagaagaaggcgcattaaaaggaccttcaatcatgcctggcggacaaaaagaagcatatgaacttgtaaaaccaatcttaacagctatttcagcgaaagttgaaggcgatgattgctgcacatacattggaccaaatggtgcaggtcactacgtaaaaatggttcataacggcatcgagtacggcgatatgcagttaatttgtgaagcatacttcattatgaaaaacgtattaggtttagaaacagatgaactacatgaagtatttgctgaatggaataaaggcgagctagatagctacttaattgaaatcacagctgatatctttacgaaaaaagatgaagaaacaggtaaagcacttgtagacgttattttagacactgcaggtcaaaagggtacaggtaaatggacaagccaaagtgcgcttgatttaggtgtacccctaccaatcattacggaatctgtatttgcgcgctttatttcagctatgaaagaagaacgtgtaaaagcaagcaaagtattgagcggtccaaatgcagctgcgtttgaaggtgataaaaccgaattagtagaagcaatccgtaaagcattgtacatgagtaaaatttgttcatatgcgcaagggtttgctcaaatgaaagcagcttctgaagaatatgactggaatttacagtatggtgatattgcaatgatcttccgtggtggttgtatcatccgtgcacaattcttacaaaaaattaaagaagcttacgatcgcgatgcagatctaacaaacttattattagacccatacttcaaggatatcgtagaaggctatcagtcggctcttcgtgaagttatttcaattgcggttaaacaaggtattcctgtaccaagtttctcaagtgcattagcttactatgacagctaccgtacagaaacattaccagcgaaccttttacaagcgcaacgtgactacttcggagctcacacatatcaacgtgttgataaagagggcatattccatactgagtggttaaaataaaaaacaagaaaagcagctgtatactacagctgctttttttatttactctttaggtgagaagttgtcttcgccgactggccaccagtgaaaaccgtcttcagcaagcaatgcgtctgactcttttggtcccattgaacctgattcgtagttcgggaagttttgtgcttttgtgctttcccatgcttctgaaatggtatcaacaaacttccaagaaagggctacttcatcccagtgagtaaagtttgttgcatctccaagcatgcaatcataaataaggcgctcataagcttccggtgtattcattttatctccacagttattgcaatagttcaagttaattggtgtggacgatgttgcacccggcgttttacgcgcgtttaagtgaagcgtaatgccttcttccggttggatatgaatgacaagcaagtttggatgaatttctttatctttattgaagtacaggttcattggtaagtctttgaactgtacaacaattgtcgttgctttttctttcatgcgtttacctgtacggatataaattggtacgccagcccatctgaagttatcaatcataagcttaccagatacaaatgtagcggtattagactcaggatcaaccgagtttccttcgcgatagccgataacttcttctccttcaagtacacctttgccgtattggcctcgtacaaaataatcatctacttcatctactgataaagagcgaagagcacgcaatacttttactttttcactgcgaatttcttccggtgttaatttaattggcggttccattgcaagcaatgccaccatttgaagcatatggttttgtaccatatctcgaagggcacctgaagattcatagtaacggccacggtcttctacaccaagcgtctcgctagatgtaatttggatgtttgaaatgtattggttgttccacatcggttcaaatagagcatttgcaaaacggataacttcgatattttgcaccatttctttaccgaggtagtggtcgatacgataaatttgatcttccttaaatgcatggcgaatttgttcatttagttctttagcagaaggataatcatggccaaacggcttttcaatgactaggcgactccaaccgtctgtttgtgttaaaccttcattttttaaattcgaagcaattgttccgaaaaattcaggtgccattgctagatagaaaatacgatttccaggcacgttgtattgctcatcaaggctttctgttaggctttttaattcttgataagaagcgacatctgttacgtcaaacggttggtaataaaaatgtgaagcaaacttttcaatgtcagcgtcactgtttttgaaactgctcactgatttttttacattttcgcgtaattcgtcattagtccaaggtcttcttgcgacaccaacaacagcgaaatcttccgatagtttgttcgctttatataagcggaaaatagaggggaataacttacgttttgctaaatcacctgtagcgccaaaaattacgataatggattttggttgtacatttgtcattacttctaggacctcactttgtcgtagttacgttcaatttttttccgctttaacagacaacacttaaatgaaatctggggattcatcgcccgttaaactcggcctttataaacaaacgaatgattgcttgtttaccttttcctttatgtatagaactactaataaattgtaacgattttaaagggttaacgcaaatagattaaaacaatttgtagttattattccatgtttttaacaagtttaaaagtattttgtttcgaatacggagaaaaagctaccgttattttaacagtagcttttctcatttatttatattgatacagggaaccgatagatttttttgttgaaaatggcaagtcaggactatcggcgatgataaaaataggacagtgcattaaaagtggatgtttttcgaaaaaagaagcatcagcgtgatagatggacgatagaataacagggagctgttctaaaaagtgaaggtagcgtgtaatggtttcatctgttgatgtatgcgcaccgatgtaataatacacagtaagggaataaaaacctttatcaaagacgaaggatgctaaatattcgttccgctctttttgcatatgatcgtaggcaaattcaatgccgatttgaatggaaggaacagaagtgtgttgacctgggaaaacggtgtattttcttggtatcatcggttccacgggtgtaacacccaggctgtaggttacatctatttggtggggattgctgatgatcatatggaatccctcctttaatataaaaatacactctttataagtgtatacaaagtttcattgaacatgacaatattaaaatatggccaggctctcagcatatttaaagcaggcaacgtttgagcagggggcagagtttacgataaaataacaaaaaagattattatgaggtgataagcaatgagtattttaaaaaatgactgggctcctttattagaagaagaatttcaaaaagactattacatacagcttcgagaatttttagtggatgaatataatcaccacaccatttaccctgataaatatgatatttttaatgctttacactatacggattataaaaatgtaaaagtggtcatattgggacaagatccttatcatggaccaaatcaagcgcatggactgagcttctctgttcaaccaggagtaaaaacgccgccttctttagtgaatatttacaaagagctgaaaaatgaaatggattatcacattccgaataacggttatttagtcaaatgggcagaacaaggcgttcttttgcttaacactgttttaacggttagaagaggagaagcgaactctcacaaaggaaaagggtgggagcagctgacggaccgtattattgaattagtggcacaaaaagaggagccagttgtgtttttgctgtggggcaagcatgcacaagctaaaaaggagcttattcatcattcgcaccatttaattttggaaagcccgcaccctagcccattttcggctaatcgaggcttttttggtaataatcactttcaacgagcaaatgagtttttgctccaacacggacgtcaatccattgattggcaaattgacgatgtgtaaaagtgagcatttcatgaagattagcttcagacatagcctcctatttcatcttttgataaaatagctgtataaagtcataatgaatgtaagatgaggtgtctacatggatataaaaatggcgcagctccttgataaaattagtgcagaagtacaaaaagcaaagcaccattcgaatagtgcgaacgttcgagatcaattggttgccataaaagcactgtgtgagcttgcattagatcaaaatggagaggtttcagtatcgaaacctgtctcggtttcaaaacctgttgtaatgtcttcaccggaaatgatgcaatctcctgagattatgcagcaacagattattcagtcatccaaacctaattttgagggaacgaaattgaaatcagatgatgcaaatggcgatagtctgtttgatttctaaagtgaggagaaaaacatgaaactatttttaataatcggtgcaatcaatgcgatgttagcggttgctcttggtgcttttggagcacacggtttagaaggcaaaatctcagagaaatatttagaggtatggaaaacgggagtgcagtaccaaatgttccatgcaatggggctgtttgtcattgcgtttctattaagcaaatttcctcaatcttctttgttaacagcttcgggctggattatgttcgcggggattgtgctgttttcgggaagtctctatgtattaagtacgtccggtattaaagttctcggcgcgattactccgctaggtggagttgcgtttattgtggcttggattttaattgttgttgcagctgtgaaatggctataaaaaaacccctgaaaaggggtttttttaacgcggagaataattgctcaactgctggcctccaccgctaaacggataattatatttgattggaccctcaaaagtgatgtaatcgagataaaccataagcagtaaataacgagtgccagtttgtggatcacttaaaatgatatgatcgcgtccggctgcttcaatttcccctctaaagaccttagcgttccactgcgtgttattttcaaacgtcatatatacagtcgctattttccctcgatttaaacgtaaaatattttcaatatatgattgttcaatgggcagttgatttgggtcttgcggggcaccactgcctccagaagaggtagggggcggacctccttggctttgcccttgaacctgctggccgcctggctggggctgctgcggctgaggcatataataagggtagtttggactcatatacggattttgcatatattgctgttgcggttgattagactttggttttttcataggaacctccttcaaacaaaaagaaattagtaaactcctggacaatcagcttgagttggtgcaaagaaacagtgagatttaaatcgtcctgtgttattttggttataccattgagcaggacagtcgccactgggcttgaaaacccacagtgagttttccgcggggttaaaactacacgtcgtgcaagtgtaatttcagactggcgggcacgctgataaaagtagcctttttgagttgcttcaaatcctcctgggttttgaaacaccatctgacgaatggttcttatatttctaaaatctaaacagggagctttagcgcggttcacgcctacatttcctaccagtaacatcccttgttttccttcactttcagcttcagctcgaatgagtctggctaggagcttaacatcttcttcgttgtgtgcaacgactgccattatcccacctcgcttacttgtgacactgttgtatatatatggtcctgtaagtgcgaatatgccatggctagaaaataaaaaacctgtttccacttggaaacaggtttttttagataaagctcattgatatttattgctctaggcgttacaaaagagatgagcgcttttgcggcttagtttaaacgtgtaaaaaacgtgcaatagcttcttcttttaataaatttccgacaaagaagctgccaaattccccgtagcgagcacttacttcgtcaaaacgcatttcgtatactaattttttaaattgaagtacgtcatctgcaaaaagagtaacgccccactcataatcatcaaaaccaacagaacccgtaatgatttgctttacttttccagcgtattgacgtccaatcattccatgactgcgcattaagctgcggcgttcttccataggaagcatgtaccaattgtcatttccttgacgacgtttatccattggataaaagcaaacatgactagcttttggtaaagttggatatagtctagcttggatttgaggattttcataaggatcctccccagcaggtaagtagttgcttaattcaactactgatacgtatgaataagtaggaatggtaaactcagcaagctttgttttattaaattctgtttcaatttcatttagttcttccatagtaggacgaacaagcattagcataaagtctgctttttggccgacaatggtatataaagcatgactgccttgcttctcagcttcagttcctttccatttctcaatcaaccctaaaaattcatggatagccgcttggcgatcgtcgcttgataactgcttccaagcgccccaatcgattgaacggaaatcatgaagtgcataccaaccgtctaatgtttgtgctgcttctgccatttcgtttcactcctattgtccgattatgataaattccaattctactatatcatagtttgtccgaagaactggaatgaaaaacctgtgattttgtgactaaactttaaacaattgtcgcaaagtaaaaacaggtttcattttaggtgttagcggaaaattaagaattaaaagactttttttgtgatcatggattcttgaagaacatgcctttgatttttaaaaaaagtggagtatcctattatgagaaaagttttttacatatcgaggaggatttactttgagtgatttatttacaggtttaaaacaaaaagtatcagctagcgatgtatcaatcgtattcccagagggattagatgagcgcgtattaggtgctgtttcacgtttagctgccgacaatatcttaaagcctatcgttgttggaaataaagacgctgtagcatcaaaagcagcagaactaaacgtaaaattagatggtgttgaggttttagatcctcaaagctactctgaatttgatgaaatggtggcagcatttgttgagcgtcgtaaaggtaaggcaacagaagaagatgctcgcaaaattttattagatgaaaattattttggcacaatgcttgttcatatgaataaagctgacggtcttgtaagcggagctgctcattctacagcagacacagtgcgacctgctctacaaattatcaaaacaagacaaggtgttaagaaaacatctggcgtatttatcatggttcgcggcgatcaaaaatacgtatttgctgactgtgcaatcaatatttcacctgacagccaagatttagctgaaattgctatcgaaagtgctcgtacagctgaaatgttcgatatcgatcctcgtgttgctatgctaagcttctcaacaaaaggatcagcaaaatctccggaaacagaaaaggtagcaaacgcagtagaaattgcaaaagaattagcaccaagcgtaacattagacggcgaattccaattcgacgcagcatttgttccttctgtagctgaaaagaaagcaccaggttcagtgattaaaggtgatgcaaatgtatttgtattcccaagccttgaagcaggtaacattggttacaaaattgcacagcgcttaggaaactttgaagcagtaggcccaatcttacaaggtctaaacaaaccggtaaacgatctatctcgcggttgtaacgaagaagatgtgtacaagcttgctttaatcacagcagctcaagcattgtaataaaaaaactccgtcctagggcggagtttttttattcggctaatgaacctaatgctttttcgttgcggtcatacatgcgctgcagctgcgtctcaaacagctcttgttcggtagcatttaaaggcatatttacaagagaagagctcatactattcagtgtttgtaataaaagcagcatgacatcagatacagttaactcaatctgtaatagttcagatagagaagccattgtgtgaggctcgatatctgggtatgaaaatttagtttccgtgttttggagaccttttttgtaaaactcttgaatgagagaagcacgtttagaaccgcttcctttaacgcataagtaaatttgtacagccactccgccgcgaacgcgtcgctgtgaaatgcctgcaaacttttgattgcgaatgcttaaatcaaagctgccgggacaataagagcctacgatttccttcgcttcaattgctgtcccataagatgcaaacatgaccttaatcaaatcaaacatggcttcatatccacgatcaatatcaattcctttttctgcatcaggaaaaattaaagaaatgtttagaacatcctgatcaagtacgacagcgaggccgcctgaattgcggacgattgttttatatccttgttcatgtaaatatgctgcaccttcagctaaatgaggtagctttgtatcttggatgcctaatacaatcgtatcgtgatgcacccatgagcgcatgacagctggagattcacctcttccaacggttgtacaaagcgtgtcatcgatggcaaaagaatgacgggcatcaaaatgaggacctagactggattgatcaataatacgccaagcgggctgtgctaaaagctttaaactattctgctgcatatctcaaacccctttataaacagtaaacgaacatattatagcataaaggcgtcgtgtcattggctgtaaaatagaaaaagaagaaagaagagccaagtttgacatccatctttcttcggtcatgtagcttattcagccattttctcaagatttccgttacgatccattttaaatgtagtagaagaacgttcttcttcatcgaatagagctaactttcgcgcacggttcatgatttgcattaatgtttcatagtcttcttgaatagtagtagcatttgcctcgagatgtttgatttgtttttccaactctgtgtttttcttagctaattctgtattttcttgcatcaagcgtttgttttcgctttgcaatgcctgtaaattgctcgcttgatttggcattgtttgcaaaaagcgaataacgtcagccattgaaagctcctcgctgctgcttttttctacttgtgtttcagataagctatatgttgctgtaggtgcagacatcatttgttccacatgctctacagatgctggtggcgtatataataatttctttttgccttgctcttgtccaagtgcacgcatgcgctgttttcgctgttttttggctagctgaagtgctttttcatactggtggcgtaccacagcattccatctgaatccacatgctgctgaagtgcgatttaattcatctccaacttcttcaaacgcattcagctgggtacttccttcgcggacatggcgcaatactgtttcagctaataataagtcgttttcttctgtccaagcatcttgtctatctttcactttgttcactcctctattttccatgactcatagtaatcatgttttgtagtatcatcatgtacaaaaaatccatactttataccatttcttctaggagtatgatagattttgcttccttctttaacttgcatcggacttcaaataggggtaaaataccccttagacaaaatgatgaaccaattttgaaaggattgtgtcaacatggcaaatgaatttagaatttgtgatgattgtcaggcaacaaacgtcaaaacgttgttacctcgacttaaaaaaatagatgaacaagctgaagtacaaatcggctgccagtcttactgtggacccggacgtaaaaagtcatttgcatttgtaaacaaccgtcctgtagcagcgccaacagaggatgaattaatcgagaagattgagaaaaaagtaaaaaaatagatagtgaaacaataaatagctgcttttctgctacttatttgtcgaacgagcttcttacaaacagaatcgccttgtttgttaggtaaatcaccttggttgcttgacaaggtgattttttattctgaataggaaaataggaagtgagtgtcgaaaaattatagcaacaacaaagtgaagatagagaggtatgtaaatgacatatcctaatgaaaaactcagtgaagaaaaagtatttaaagatcctgttcaccgctatatccatgtaagagatcgtgttatttgggagctaattgggacagccgaatttcaaaggctgcgtcgtattagacagctaggaacgacatacttaacgtttcatggggctgagcacagccgttttagtcattccttaggtgtttatgaaattgtgcgccgtattattgatgacggttttcaaggacgccctgaatggaatgaagatgagcgtcttctttgtctttgtgctgctttactgcacgatttaggtcacggtccgttttcacattcgtttgagaaggttttccacttagaccatgaagaatttacacaagccattatcgtaggtgacacagaggtaaatcaagtgttaacgaaagtaggaaaggattttcctaaaaaagtagctgaagtaatcgcgaaaacatatgaaaataagcttgtcgttagtttgatttccagtcaaattgatgcagatcgcatggattatttgcagcgtgatgcgtattacacaggagtaagctacggtcactttgatatggaacgaattctgcgcgttatgcgtcctcgggaagaccaagccgtgattaaacacagcggtatgcatgcggttgaagattatattatgagccgctatcaaatgtactggcaagtgtattttcatcctgttacgagaagtgctgaagtgattttgacaaaaattttacatcgtgcaaaagagctccaccatcattactatgagttcaagcaggagccaactcatttttattcaatttttgaagaagaaatatcgctaaaagagtatttgaaattagatgaatctgttattttattttattttcaagcgtgggaagaagaagaggatgaaattttatctgatctatgccaaagatttatgaatcgtcagctttttaaatacattgagtttaatccgaattcacaaatgaagatgtggatggagcttacaacattatttaaaaaagcgggcattaacccagattattatttagtcgtcgattcttcaagcgacttaccatacgatttttatcgaccgggtgaagaggaagaacgtttgccgattcatctgttgatgccaaataatgaagtgcgtgaattatcacgtcagtcggagattgttgaagcaatttcagggaaaaagagaaccgatcataaattatattttccacaagatctcattgatcaattgtcgtctaagcgaaaagttaaagatcagattataaacttactaaaaggagatcagagttaaatagtataggagttgaaggggctgtgttaaacgatcacgcaaagattgtgaaagtattttccgcggcgggagaagttgttggcagaaaaaagttacaaaagatgatatttatcggaaaaaagctgaagtttcctttttatgaaaagtataattttcacttttttggaccttattctgaggaattaacgcttcgaattgaagagctgtgtaacttaggctttttaagtgaaattaaagagaaaaaaggcgggtatatgcagtatcgctacgtattaacagaagcgggggaagggtttttaagccactatgacttagaacttcctcacttgcaggaatgtatgaaggatatgaacgaacaaagctctaaatttttggagcttgtctctacgattttatatttcgataatttaccgaaagaagaagtaaaagaaaaagtgtttacgctaaagcgtaagcaaaactatacagaagaagacatttcagaagcatacaaatatattgaaaaacttcaggcaacgctgtctgtccattaaaaaaatgccataggttcactcctatggcatcttttttatgtaggcgttattgatcactcatgcgcttgcccgctacagcgtaatggtttttagacatttcttcgatgataatggatactttttcaggtgctgcacctgttgtttccacaacagcatccgttactttttcaacaagagctcttttttgatcatctgtacggccctcaagcattttaacagttacaactggcataatgtgtacactcctttttgatcattatatgattagtgtacccgttttctgaataaaatgacagtatgagatagtgatggaggccataatctgtagtatacttttataataacatcgatataaaaaaacaggtgtgcccaaaggaagcccatcgctggtctttgagaacttttagggcatatttgaagaaaccttgtatctttcttaccgcaaaaaaagattcatctagtagatgtgataggtagaaattattttaaaataaaggagataaagagtggaacattttttagctttttcattgcaagaccttccttacgtggtaatgacgcttattgttgcattcacgctgcatgagtttgcacatgcgtatgtagcttatttatttggagaccacacggctaaaaagcaaggaaggctaacgctttctccgctggctcatttagatccatttggaacgcttttgttaattatcgcaggttttgggtgggcgaagccggttcctgttaatcgctatttctttaaaaagcctcgtttagctggtattctagtatcgatagcgggaccgtttagtaacttggtgttggcatttatcggcttgcttatttattatttgatgaataacgccgcggtggacaacgatgcgctttatcgtttttttacattatttattcaaataaacctaacgctaggtgtatttaacttgttgccttttccgcctttagacggctaccgcgtgattgaagatctcgttccgccgtccacgcgagccaaaatgacgcagtatgagtcttggggcatttttgtatttttgattcttgtgattacacctctggatcgaattgtgatctggccgcttctaaacggagcagcaacgtttgttatgaatatctttcagcagatattagcaccactgatttaatcaatagaggaggcttactatgactcagccaaaaaagaaaagtataggatttaatatcataaaagacgattcaaccgacggtcacggcggttacggtgttggagcgttaagtttagaaaacatttcacccgtttttgtttgtccgagcgacgaagaagtatttgtagatatcggtgcgatgcatgcaagaagtgtagtggaaaaaggaattaagttcttaccgaataaagacgaggtgccaaacggcaagttatattggcttgtgtgggtaacgattgatcgcaagcaagaaggaccttactacgcaggtatgacagcatgtgaaatgaccgttgatcgtgaaattcgccgcggctataagtcacttcctgaacacgtgaacaaaatggataaatccttaaaacgacgcattatggtagaagaaatggataacaagtctaaggatttgcttcgtgagtttttgaggtctcataatgaagaagtttggacgttatctaatgatgacttaaaagaagcgcttcaaacatcgtaatgctaaaaaaagcttaaggcctcagccttaagctttttttaatcaaaccatttgggtaaccagtgaaactttttatcttctttttcacgctcttttttcttcgtttttgctgcatgatcgatgtgatcagtacaatatgtttttggctgtgttccagttaaataataagctttatattgaacagggcatgatttggatgctaactttccattttgaggattaatgtttacgctcattaatccgtttggtgctttaaacttttcttttttcttcccttttaaagcatcttccataaataatgcccacattttttttgcgtatcctttttcagctacatcatccattgtccttccttgatcatatccaacccaaacgcctgaaacgagctgaggagagtagccaatcatccagctgtctgtagaggttgtgccggattttcccgcgtaaggacgagatacatatttagaaataggctttcctgtgacggttgtatagccatttagcttttgattaaacatgcctgtcattaaatgggtagtaagaaaagcatagcgcttatcaatgacttgtttctgttcggaaggagcttgataaacaacttctccgtcatgggtttcaattcgtttaataaatgttggacgaatttcttttccgccattagcaaagatgccgtacgcattaaccatatcaataactttgacaggcgaagttccaagagctaaagatggaactttctttaaaggtgatgatattccaagtgttttagcagtttcaatcaagcggttttccccaatgaacaaatgcgtttttacggcataaatattgtctgaaagtgcgatggcttgagccattgtaataggagcatctgcataataattgtgatagttactaggcgtgtatgtcgaaacgccatcttccaatttgaacgtcgtttcttcacttttcattggagtagattcagtaaaaccgtcttttaacgccgcatagtataaaaatggcttcatcgttgagccaggctgtcttattgcttgagttgcgcgattaaacgggctcttttcataatctcttccaccaataagagctttcacttgtccatttttaggattcatcgcaacaaatgcactttgtacgtctgaagagctgctgataacatccttcatcttttcttctgccgttcgctgcatcttttcatccagcgttgtataaacgcgaagtccatttgtgtaaatcatggtttcatcaatgcctaaatcttgctttaattctgctagcgctgcatccataaagtaagaagcatcttctttattaggatctttttcggcaggctttgcgaatgctagaggtgttacaagcgcttttgttgcttgcttcgctgtaataattccatcctctttcataagggataaaatgatattttgtcgtttttttgcattttcttgatgaataagaggagagtagtagctagggccttttggaatacctgctaacatactcgcttcacttaacgtcaaatttttggcgtgcttatcaaaatacagcctagctgccgcttcaattccataagctccatggccgtagtaaatcgtattcatgtagccttctagaatttggtctttactataattcatttctaaacgaatcgtatacagagcttcttgaagctttcgagtccacgttttgtcgtgctctaaaaacaagtttcgtgcatactgctgagtaatggtactcgcaccctgtactttccccatagcttttatatcagctataactgctccggcgattcgatgcatatcaaagccgtgatgctcatagaagcgcttatcttcaacagccaaagtcgcatcttttacgtaaggtgaaatttgattaagtgaaacccagtaacgcttttgtccattgtgaacttcatcaagaactttaccgtttgctgagtagaaaacagctgtttgagaaacgtttagcggaggggggccagcgattttggcgtagagaaagatgcttatgtaggcaaacaataataaagcccccgctaatataccaaggacgagaagaattcggaagatgcgtcttgccttttttaaatgttcggttaataccgtttccatttctattcaccaccaatatgtgtcactatgcaccgtacatgttgttttcaacacaacaaaattctattaaaagagcgatgcaagtagattctaaagcttgtatctatcatcagtatgaaatagaaaaggtggttttaaacctccattgctaaaaattttacttgcttttttgctgaattcatctatacttttttcatgtttgtataaattatgttagggtaatctatgcataggttaattctcaaaatagaagggaagagtttgaaatggaattatggttcacagaaaagcaaacaaagaactttggtattacagctaaaattaatcgcactttacatacagagcaaacggagtttcaaaaattagacatggttgaaacagaagagtttggtaacatgctcctacttgacggtatggtaatgacaacagaaaaagatgagttcgtttatcatgaaatggttgcgcatgtaccgttatttacgcatccaaatccagaaaacgtactagttgtaggtggaggagacggaggcgtaatccgtgaaatcttaaaacacccaagcgtaaaaaaagcaacgttagttgatatcgatggaaaagtcattgagtactcaaaaaaattcttaccttcaattgcgggcaaactagaagatcctcgtgttgatgtacaagtagatgacggatttatgcacatcgctaaaagcgagaacgaatatgatgtcattttagtggattcaacagagccagtaggtccagctgtgaatttatttacaaaaggattctatgcaggtatctcaaaagcacttaaagaagatggtatctttgttgctcaatcggacaatccttggttcacgccagagcttatctcaaatgttcagcgtgatgtaagagaaatcttcccaattacacgtctatacgtagcaaatattccaacgtacccaagcggtttatggacatttacaatgggttcaaagaaacatgatccattggaagtaagcgaagatcgtttcttcgatattgatacaaagtattacacaaaagaattgcacaaagccgcatttgctttacctaaatttgtgcaagatcttattaaataagttatcacatacaagtgagatgccagaggtttaaggctggcatcttttctatgaataatgaaggaggaacaaaatatgcgttttgatgaagcttattcaggtaatgtatttatcggcagtcaccccgtttttgaagaaagtgaagcggttctttacggaatgccaatggactggacagttagctatcgtccaggttcacgatttggcccaactcgtattcgtgaagtatcaattggattagaagaatacagcccgtatttagatcgagagctagaggaagtaaaatattttgatgcaggagatattccacttccatttgggaaccctcagcgcagcttaaatatgattgaagagtatatcgaccagcttttagcagcagacaagttcccattaggcatgggcggagagcatttggtttcttggcctgttatgaaagctatgtataaaaaatacccggatttagccattatccatatggatgctcatacagaccttcgtgaagagtatgaaggagaaccactttctcattccactccgattcgtaaagttgcagaactaatcggaccggaaaatgtttattcatttggtattcgttcaggaatgaaagaagaatttcgatgggcaaaagaaaacggcatgcatatttcaaaatttgaagttctagagccgttaaaagagattctaccaacacttgcaggtcgtcctgtttatgtaacaattgatatcgatgtattagatccagcgcacgctcctggtacaggaacagtagatgcaggcggtatcacatcaaaagagcttttagcttctattcacgcaattgctaaatcagatcttcgcattgtcggaggagatttagtagaagtagctccaatttatgatccgtctgaacaaacagctaatacagcaagcaagcttattcgcgaaatgatcttaggctgggtacaaaagaaataaataaagtaaaaggcggccgctgtggctgccttttttatttggaatatgtgaatgcgtcacgtactgtaaaaaggtgaattctctgcgtatctatcatatttcctttgaagtattattgaattctttctttagaatgtttatactatttaagttataacgtattcattttaataaggaagtgtcttttgtgagtaacgcttcagaagtcaagaaacccattgaagttaaaattgtgacggatatccgcgatggtcaccgaaaagagacaacatcggtaaatgcaaaaggtatgtattatgaaaaaggatcgaaaatttatcttacatacacagagcgccaagaggaaatcggagatattagaacaatggtgaaaattagcgaagatgaagtatcaattaatcgaaccggtgctgttcaaatgaagcaatcgtttcgtaaaaaggtacagatcgaaggaacttatataagcccttatggacgtatggatttactaacattcgctcataacattgaatataaacaaatgactcaaaaaggtcgattatttttaacgtatgatctagaagtacagggtcagcctaccgggaaatatgcgttaaccattacattcaaggaggagaaaaaatgaacatcgtcgaacaagtgcagcaaaaattaaaagctgaaattcaagatgctgtggtcaaagcaggacttgctgaaaaagcagaacttccagaagttctattagaaaccccaaaagataaaacacatggtgattattctaccaatatggctatgcagctagctcgtattgccaaaaaagcaccgcgtgttatcgctgaagagcttgtagcaaacttcgataaatcaaaagcatctatcgagaaaattgacattgcaggccctggattcatcaacttttatatgaataactcttatttaacagagcttatcccaacgattgtaaaagctggtgaagcgtacggccaaacaaacgtagggaacggacaaaaagtacaggttgagtttgtttcagctaatccgacaggagatttacatttaggacatgcccgcggtgctgcagttggagactcattatgtaatgttcttgaaaaagcaggttacgatgtgtcacgtgaatactatatcaatgatgctggtaaccaaattaataacctggcttattcagtagaagcacgctacatgcaggctcttggtttagagaaagaaatgcccgcagacggctatcatggtgctgacattataaacatcggaaaagagctagcaaaagagcacggagacaagtatgtaaatgcctctgaagaagagcgttttgaattcttccgtcaatacgggttagattatgagttagctaaattaaagcgtgatctggaacagttccgtgtgaaatttgacgtatggtattctgaaacgtctctttataaaaatgataaaatctcagttgcacttgaaacgctgaaaaaacaaggccatgtatatgaagaagaaggtgctacgtggttccgttctacgacatttggtgatgataaagaccgtgtgttaattaaaaatgacggttcatttacgtacttaacaccagatattgcgtatcaccaagacaaaattcaacgcggatttgataagctaattaacatttggggagccgaccaccatggatatattcctcgtatgaaagcggcgattcaagcgcttggttatgaaaaagatacgcttgaagtagaaattattcaaatggttcaactgtatcaaaatggcgaaaaaatgaagatgagcaaacgtacaggtaaagcagtaacaatgcgtgatctagtagaagaggtaggccttgatgcaactcgctacttctttgcgatgagaagtgccgatacacatttagactttgatttagatttagctgtttctcaatctaatgaaaatcctgtatactacgcgcaatatgctcatgcccgtatttgcagtattcttcgtcaaggtgaagagatggggattcaatcaacatctggcgctgacctttcattaattcgtgcagaaaaagaaatggaactgctgaagaaaatcggagagttccctcaggccgtagcggaagcagcaacaaaacgtattccgcaccgcattacaaactatgtatttgatcttgcttctacgttccatagcttctataatgcagaaaaagtattagatagcgataatgtagaaacaagtaaagcgcgtattgaactagtgaaagctgttcaagtaacgcttcaaaactccttaaaactaattggtgtttcagcacctgaaaaaatgtaacacaaaaaagagcctcttggctctttttttatttaaaaaacaagcgtagcgcctcccgtacgctttactcctctcattgatgctaaatcttccactaattttagcagcgctttatcttttaactttgcttcaatcattacgtcaaaatcttctccgatatctttagctatttgcaaaaaaggtgcgataaaatcagttgagacataatcagagtgacttctaaattctttttcagatttaggagaagagatatgtatttttggttttaagccgatatgtttccacgtgtcaaagatgcgagggagcaataatgcaagaggttcttctccttcatttgctttgtggtggtgataatcaaagaggagagggactttctctttttcgcatacagctaatgtttcttcagttgtgtatgttttatcatcattttcaagagtcatgcgctttttaatgacaggtggcagcgtttgaatgttttcatgaaatcgaccgatcgctttttctttattgccataggctcctcctacatgaatattaataagagcttgatcggctactcccatcgcttcaagcattctatagtgataatccatatcttttaccgcattttctgtaatatgttttttgtcgcttgtaaataatgtgaactgattggggtgaaaactcacgcgcagctgatgattccgaatcaattctcctatctctgaccaatcgtcttggaacgcatcaatgtaattccaatctacttcaggatgagtagctaaagggacaagagaagatgataatcgatacagcataatttcatgggcaatattaaaatgtaaagcgcgcttagtatgattcaaattttgttttgtgacgtaatgaagcttatccagcctctcgtcttttttcatttttttccatctggtaaacgtgagggttttagcaggtgagcagtcccaaagcgacagggcatgtgatacatagccaaatctaattttcattataaattttcctcttttcgttcattaaagtaacggagaaataaaggttgcaaatccttgctttagtttttcactccattttcgatttttgacatcttctaaagacaaaattgggcattcccccatacaagctttaaagctgttctttacctcttcaatgtatgtggcatcgtagattaaacagttgatttcagcgtttaagaacaagcttcttttatcaaaattagccgttcctacatcgcagataacattgtctgcaattaatacttttgcgtggtaaaaaccgtaataatattgataaatcatgcagcctgctcgaagcaatgtaggaagataggcaaatgcagcatgatgaacaagcggttgatctgcacgcattggaatcaatatatgaacttgtactccccgtgcacgggcttgcagtaaagcattcatcaaaggttcacttggaataaaataaggagtacctatgtacaattccctattggcttggttgataatcgataaaaagctttcttcaagtgaaaaaccttcagtcgactgtagctgaataacatagtctccttcagaggttgatggaaagtatctttccactttacgcaggtctatgccggtagcagcataccaatcgctcaacagctgcatttgaagatcttggataccttcaccttccatacgcaggtggtaatctttccacaccccaagcttggcgtcgagtcctaaatattctcttccgatattaaaaccgccaatgtaaccaactttcccatcaataacggctattttacggtgattgcgtgcgttgagtgtataaaacaaataaggccaccgtagcgttcgactgtaagcaaaatgaacaccttgtttctttaagaatgcaattttgtttttcttgattttatagcttcctacacggtctaccaataacctgacttcaatattttgctgtgctttttggactagtaaatctaaaaaatcttggctaatttcatcattttgtacgatgtaaaacgataaatggataaatgaagaggcattttctatttcgtgaaataaatctttatacaagacattcccgtctgcgaacaaaaaaagagaagcacggcgctttggaaatgtattttcagcttgagaaaatactttctttccaacgccaaggtcaattgcaagccaagcaataaaaataataaaaagtaaaattacaaccatgccgctcatcatgtcacctcttttcccgatgtaaatacattttgtgttgttcttagtgtcaccttgtttaaatagaatatgaacaaaagaacgaaaagatattgactgaatgctcattcattatatacaatgaaaacagatatattatcagaaaatttagtcgtcaggaggaaagaagggtaacaaattattcaaggaggggacgagatgacagggttgctgtgggtgaattttctcttttttattattgtaaccgcttacgctgtttctttgtttgtatatttaattcgcacacgcattgagtatattcaattagggaaaaaagttgaatttgatcagcggttaaaagaaaggctgcaaaaaatttgggtgaacgtgtttggacaaaagaagctgttaaaagataaaaaaagtggaattatgcacgtcatgtttttttatgggtttattttagttcagttcggcgcgttagacttcattataaaaggtttgcttccaggtaaacatttgccgcttggacctttatatcccggctttacattttttcaagaaattgtgacgtttttgattttagtagcagttgtctgggcttttcaccgccgctacgtcgaaaagcttgtgcgtttaaaaagaggatttaaatctggtttagtactgatttttattggagcacttatgctgtcagtgcttgttggaaacagtatgtcaatcatctggcataatcatgaaccatcatggacagaaccaattgcgtcatcgattgccatcttatttaagggaatcaatgacgttgccgctatctccattttttatgtttcatggtggattcacttagccgtgttattgacgtttttagtatatgttcctcaatcaaaacatgctcatttattggctggaccggctaatgtattttttaaccgtgtttctaaaccaggtaagcttgaaaagattgattttgaagacgagacccaggagacgtttggggttggaaagattgaagaattcacgcagcatcagcttattgatttatatgcctgtgtggaatgcggtcgatgtacgaatatgtgtccggcaacgggtacagggaaaattttatctccaatggatttaattttaaagatgcgcgatcacttaacagaaaaaggagcggttgtgacatctaaggctccttgggttcctacgtatgcattttccaaaacaaaaggaaatcaactggcgatgatggccgccagccaaggcggagaagaagccgcagcaacagcggaatataatcccgctttaattggagatgtcattacggaagaagaaatttgggcatgtacaacgtgccgaaactgtgaagatcaatgtcccgtgatgaacgagcatgtagataagatcatagatttacgacgttttttagtattaaccgaaggaaaaatggacgcggatgctcagcgtgccatgacgaatattgagcgtcaaggaaacccttggggattaaaccgaaaagagcgtgaagaatggcgacatgtaagagaagatgttcacattccgactgttaaagaagtaagtaaagccggtgaaacgttcgagtatttgttctgggtaggttcgatgggatcttatgataaccgcagccaaaaaatcgctctatcgtttgcaaagcttctcaatgaagcgggtgtttcatttgcgattttaggaaataaagaaaaaaattctggtgatacgccgcgcaggttgggcaatgaatttttattccaagagttagcttctaaaaatatcgctgaatttgaaaaaaatgaaatcaaaaaaattgttacgattgacccacatgcttacaatatcttcaaaaatgaatatccagatttcggttttgaaggagaagtgtatcatcacacagaattattagctatgttggtgaaagaaggtaggctgtcaccaaaacatgcggttaatgaaaaaattaccttccatgattcctgttatttaggaagatataacgaagtatacagtccaccaagagaaattttgaaagcgattccaggtgttagtttgattgaaatggatcgcaaccgtgaaaatggtatgtgctgtggagcaggaggagggttaatgtggacggaagaaacgaccggccagcgcattaatgtagcgcgcacggaacaagccttggccgttaacccaagcattatcagttcaggttgcccgtactgcttaacgatgctaagtgacggaacaaaagcaaaagaagtagaagaaaaggttcatacgtatgacgtagcagaactgcttgaaaagtcaatttatggtgacgtgcaagaacaggtttcataaaggagaagtagagatggtcttcatctctactttttacagaaaggaaattgagcaagcgttcaatcggcaaggacaaagattaggaaaaagaggaggaaacaatagtggggaaaacagttattgtgagtgcagttcgaacaccttttggaaaattaggtggtagcgtaagtggactaaaagcggcagaactaggcgggaaagcaattcaagcagcatcaaagggacgtacagaaattgattccgttattatggggtgcgtgctgcaagggggccaaggacaactgccttctaggcaagccatgcattatgcaggtttaccgtggcaagtagagacggaaaccattaataaagtttgtgcatcgggcatgcgcagcattacaactgctgatcagctgattcgattaggagaagcaaaaacaatcattgcaggtggaatggaatcgatgagtaacgcaccgtatctttttccaaaagcaaggtggggattccgtatgggagatagtgttgtgacggatttaatggttcatgacggattgacatgcagctttacaggagttcaaatgggtacgtatggaaatgaaatagcttctgaaatgaatatttcccgagaaaagcaggatgaatgggcccttcgcagtcatcaattagcggtggagtcagaagaaaaagggagatggactgcagaaagaatttcagttgatattccgtctaaaaaaggaacgataacggttcaaaaagatgaaggaccaagaaaagatacgtcgttagaaaaactctcgtctcttcggcctgtatttggtcacagcggaactattacagcaggaaatgcacctagcgtgaatgacggagcagctgcgctcatgctaatggatgaagatgtggcaaaagcaaatggctatgagccgttggctacgattgtaaaccatacttctcttgcgatggagccaagggaatttccgaaaacgcctgggtttgctattaacaagctactgcaaaaaacaaataagacagtagacgatattgcgctgtttgaaatcaatgaagctttttcagcagtagcgttgatgagtgtggaaattgcagggcttccggctgaaaaagtaaatgtgaacggcggggctgtagcacttggacatccgattggagcaagcggcgcccgtattgttgtaacgctcattcatgaattaagacgacgaggcggcggactaggcattgcttctatttgcagcggcggcggccaaggtgatgccatcatggtagaagtataaaagggggataccaacttgaatattgaaacagttatggttattggagcaggtcagatgggagcaggaattgcacaagtatttgctgcgagcggatatcaagtttctttgtatgacgttgatcaaaaaaatacacaaaaaggaatagaaggtattgataaacgtctgaaaaagcaggtgggaaaaggttctctctcagctaaggaatatgaagaaattatggagcgccttcacctggcaaatgaaataacagcagcacaaaaagcagatttaattgtcgaagcggttgtggaaaagatggaagtcaagcaagccatttttgcggagttggattcgttagctcccagtcatactgttttagcaaccaacacgtcatcgcttcctattactgaaattgcagctgtgaccactcgacctgaaaaagtaattggcatgcactttatgaatcctgttccggtgatgaaactcgttgaaattattagagggctggctactaccgatgaagtgtatcaagcagtctatgaaacaacggaaaaattaaataaaaccccggtggaagttcatgattttccagggtttgtttcaaatcgaattttaatgccaatgattaacgaagctgtgtttacgctctatgaaggtgtagcaaacgaagaggatattgatcaagtgatgaaactaggaatgaaccatccaatgggacctttgacattagcagatttcatcggcctcgatacatgtttatttattatggaaacccttcataaagggtttggtgatgacaaatatcgtccttgtccattgcttaggaaatatgtaaaggcagggtggcttggtcgaaaaacaggaaaaggattttttacgtacgaaacataaaggagtggcgaaatgatcttttttacgtctgaacaacacatgattaaaaagatggtagctgattttagtgaaaaagaagtcgctgcggctgtgccaaacatggaaaagggtgaatttcctcgaggtttattaaagcagatggctgatcttggcctgatgggcattcccgttcctcaagcatacggagggggcggactggactttgtgtcgtacatgattgccatccacgaaatatcaaaagtaagtccagccctcggcgtcattttgtctgttcatacttctgtaggtacgaatcctattgtcgtatttgggacggaagatcaaaaacaaaaatatgtaaaaaaactggcgacaggtgagtatttaggtgctttttgtttaacagaacctagtgcagggtctgatgccgcaagcttaaaaacaaaggcagaacgaaaaggagaccactatcttttaaatggctcaaagcttttcattacaaacggcggagaagcggatacgtatattgtatttgctaaaacgaaccccgaacgcgggtcgagagggatgagcgcttttatcgttgaaaagacgatggagggattttcagtaggaaaagatgaacataagatgggtcttcacggttctcgaacggttcaactgcactttgaaaatatgcaggtgcctgtagaaaatcgtctcggagaagaaggtgaaggctttcgaattgcgatggctaatttaaatgccggaagagttggtattgctgctcaggcggtaggaattgctgaaggtgcgttaacggcagctaaaaactatgcaaatgaaagatatcaattcggaaaaccgattttatctcagcagggtattgcctttaagctggctgatatggaaacggctgttgaatcagcgaagcttttaatgtatagagccgcttttttatatgatcaaaaacttccttgtaaaaaagaagcctcaatggcgaaattatttgcttcccaaacagcgatgaatgtagcaatcgatgcgattcaagttttgggaggctatggttatatgaaagattatccagtagagaggtattttcgcgatgccaaagtatgcgaaatctacgaaggtacaagcgaaattcagcgcatcgtcattagcagtcaattatagggggaataatcatgttttttaaactttcagaagaacacgaaatgattcgaaaaatggtgcgggactttgccaaaaacgaagtggctccgacagctgcacaacgagatgaggaagaacgttttgacagaggaatctttacgcaaatggctgatctaggattaacaggtattccatggccggagcaatacggaggaattggcagtgactatctagcttattgcattgccgttgaagaactgtctagagtatgtgcatcgacaggcgttactttgtcggctcatacttctctagccggctggccaatctatacattcggaacagaagaacaaaaacaaaagtacctgaaacctatggcaacgggtgagaaaataggtgcttatgggttaaccgaaccgagtgctggatcagacgcaggaggaatgagaacgctcgctgtaaaggacgaagaagattatattttaaatggctctaaaatctttattacaaacggcggcgaagcggatatttacgtcgtatttgctcgcatcgaccccaatgaaaaacgcacgagcgctttcattattgaaaaagatatgccgggattttcagttggtaaaaaagaaaagaaactgggcattcgctcttcacctaccacagaaattattttcgaagactgccgtgttccaaaagaaaatttgctgggaaatgaaggagaaggatttaaagttgcgatgatgacactagatggcggccgaaatggcattgcagcgcaggctgtaggaattgctcaaggggcattagatgcggccgtagcttatgccaaggaacgtcagcaatttggtaagccaattatttctcagcaaggaattgcttttaagctagccgacatggccacgagtatagaagctgcaagattgttaacctatcaagctgcttggctggagtctcaagggctgccatatggcaaagaatcagctatgtcaaaattatatgctggggatacagcaatgaaagtaacgacagaagctgttcaagtatttggagggtacggttatacaaaagattatccagtagaacgttttatgagagatgcaaaaatcacgcaaatttatgaaggcacacaagagattcagcgtcttgtcatttctaggtatcttgctaaataaaacacttgttgtaggagaggtgaaaaaatgaaaaagagagaagttctcacatcgattaaagatgaaaagctgattgtagagcgtcgtaatcaaatgattaaaggggccgtcacgctatttaaggaaaaaggttttcaccgaacaacaacaagggaaattgccaaagccgctgggttcagcattggtacgctttacgaatatattcaatctaaagaagatgttttatatcttgtatgtgacaatatttacgatgaagtgagagagcgattagaagagatggtagtggatcgttatacaatcgctgagcttcaacaagcgattcagcactattttaaagttgtggatgagcttcaagatgaagtattagtcatgtaccaagaagcgaaatcgctgtctaaagatgcgcttccatatgtattaaaaaaagagctagatatggttgaaatgtttaaggttattatcgaaggctgcgtagaaaacaatcaatttgcacttacggataaagaaatttcgctgtttgctcatcatttatttgttcaaggtcagatgtgggcatttcgcagatggtggctgcaaaagcattattcattagaagaatatacaaatatgcagttagattttttacttaaaaatttttcatttcaacaactgtgtgagggggagacagtttgaatacaagcaaaagaccgcttcgttttttaaccgcttctagcctgtttgacggccacgacgcgtccattaatattatgagacgaattcttcaagccaagggggtagaagtcattcacctggggcataaccgatctgttgaagaaattgttaacgcttccatacaagaggatgttcaggggattgccatttcttcttatcaaggcggccacgtagaatattttaagtatatgtacgatttactccaagaacaacaggcttctcatattaaaatttatggcggaggaggaggggtaattattccgagtgagattcaagagcttcatgattacggcatttctaaaatcttttctccggaagatggacgaaaaatggggttagaaggcatgattcaattcatgatcgatgattgttattacaccaatccccctgcactgccgaaggatcgaaccttaacgccggctaatgaccgtttaattgcccagcttattacatgcgctgaaaatgaggcctatgaatatacaaaagagcacgcagccgctcttgaaaaaatccgagaaagtgtaattgaaagcgagacggatcaaaaaataccggttattggaatcacaggaacaggaggagcggggaaaagttcgcttacggatgaattagtaagaaggtttattgaacatattccagatattcatgtagctgttttatcagtcgatccaactaaacaaaaaaccggaggagcgcttcttggggatcgaattcgcatgaacatcgcagcgtctcctcgtgtgtatatgagaagtttggccacgcgttcatctggacatgagctatcggcggccattcgagatggaattgccgtcgtgaaaaaagcgggtttcgacattatcattgtcgaaacaagcggcatcgggcaagctgatgctcaagttaaagatattgcaaacgtctctctttatgtaatgacaagcgaatttggcgcgccgtcgcagttagaaaagattgaaatgattgattacgcagactttattgtaatcaataaatttgaaaaaaaaggttccgaagacgcaaaaaaacaagtgcagcgtcaataccagcgcaatcatcagctgtttgaaaataatctctctacgatgccaatttacggaacaattgcgagtcagttcaacgacgggggaacaaatattttatttgaagatcttgtaaatcatctgcatcaaacatgccgtacgtcttggcacgtagaaaaatcatcagagcgcgtaagtgaaaagaaatataccattattcctaatgatcaacagcaatatttacaggagattgtaaacagcgttcgctcttatcaccgcaatacggatgttcaagtgcaaacagcgcgtaaattttatcagctagagggtgctttggaagaagtggaaacagaaacagccaagcaagagctcactcagctaaaggagaaatatcaaaaacagctaacggctgaatcgattgaaaagctggaaaactggcctaaattaaaaagtcagtatcggcaagaagaacttattacaaagataagaaataaagaaattaaaacctctttgcaagttgatacgctatcaggactgcgtattccgcgcgtggcccttccaaaagttgaagaatacggggaagttcttcgttttctttataaagaaaatgtgccaggcgcgtttccttatacagcaggtgtttttccgttcaaacgaaaaggtgaagatcctaagcgtcaatttgcaggcgaaggaacaccagaacgaaccaatcgccgctttcactatttgtcaaaagatgatgaggccaagcgtttaagtacagcgtttgattctgtaacgctttatggagaaaatccggatccaaggccggatatcttcgggaaaattggcgaaagcggcgtaaatgtctgtacgcttgatgatatgaaactcttgtataagggatttgatctttgccatccttcgacttccgtttcgatgacgatcaatgggccagctccaatattattagctatgtttatgaatacagctatcagtcagcaggtggaaaagaaggaagaggagctgaagcgtcctttaacagaagaggaatacgaggaagtaaaatcgggtacgttgaaacaagtgagaggaaccgttcaagcggatattttaaaagaagatcaaggccaaaatacgtgtattttttccacagaatttgcattaaaaatgatgggggatattcagcagtactttattgacgagaaagtgcgcaactattattctgtgtctatttcaggctatcatattgctgaagcaggagcgaatccaatttctcagctcgcgtttacattagccaacggttttacgtacgtggaatattacttgagtcgaggtatgcacattgatgattttgctcctaatttatcttttttctttagtaatggacttgaccctgaatacacggttattggacgtgtagcgagaagaatctgggcaattgtgatgcgtgataaatacggcgcgaatgaacgcagtcaaaagcttaagtatcatattcaaacatccggccgatcacttcatgcacaggaaattaattttaatgatatacgtacgacgctgcaagccttaatggctcttcatgacaactgcaactctcttcataccaatgcgtatgatgaagcaattacaacaccgacagaggaatctgtacgaagagcgatggccattcaattaatcattacaaaagagcatggattaactaaaaacgaaaatccgctacagggctcttttattattgatgaactaacagacttggtagaagaagcggtattggctgagttccaacgcttaaatgatcgaggcggcgttttaggtgcgatggaaatgcagtatcagcgaggtaagattcaagatgaatcgatggaatacgagatgcaaaaacatacgggagctttacctattataggagtaaatacgtatattaatccaaatgaagaggagagttcctcagttgatgacatgcagttagcccgcgcatcaaaagaagaaaaaaatcaccaaattaatcagcttcagaagtttcaacagcagcatgaaggaaaaagagaagatgcgctgaaaaggttaaagaaagctgcaacagaaggagagaacattttcaaagagttaatggagaccgttaaagtagccagcttaggagaaattacgcgagctttatatgaatgcggtgggcaatatcgccgaaatatgtaataatgtatcgttagtatatagtgatatattaaaagccgagatgaccgtttgttggtcgtctcggcttttatagacctaacctcaacggagtcagaataactgatggtgaattccttttgatcaaaggatgctgttggcgtattaagtagaatgtattatagtgataaaatttctattttttcgttgttttatgcgaaattctcgagaattttagaaacgaggctagcataaatgtattgaatttgtttataatgaatggtatgtatttattcgtttccatcatttacacatatgatgaattgatttaatagattttcgatatacatagccatagaaaggatgtgccagatttgagtttagcacagtactcaaaaacggatttaaaagaaatgtcgatgattgagattgcttatgcgcttctagaagaaaaaacagatcgtcaagcaatgtcattccaagaaattattgctgaaattaaagcagcagctgaaatgtcagatcaagaattaaaaacgagattagctcagttttatacagatattaatattgatggtcgctttttaacagtaggggacaaccactggggtcttcgtggatggtatccttttgaccaagctgaagaagaagttattccggttgcaaaacctaaaaagaaaaaagcgaaaaaagctgttgttgaagaagttgaagattttgatgatttagaagaagatttggattatgaagatgatctagacgaagaagaagattttgaggacattgacgagctagaagaagatgaagatgatcttgcagaagacgattttgacgatttagaagatgatctagacgatgatgatgaagatgaagaagaagattatgaggacgacaaagaaaaataatccttcttgactttttcaagcgaagtaggtagaatcttttttgggctctttaaacaagcatttaaaaagtttttatttaaaatagactattgctcccaatccagttttggtattgggagcaatttttttattttatctatccatgttttacaccccgatatgttcttataaatccttgatagaaactttcttttggttcttgaacgtttcacattcataaggtttcttataatttcgcatgcacaatgaatgaattgtgattgtttatgtgaaaacttttaatattgtacagttcaaattatttagagggggaagtatagatgacaaagtatattttcgtaacaggcggtgttgtatcatctctaggaaaagggattacagcagcttctttaggccgtttattaaaaaaccgtgggttgaacgtaacgattcaaaagtttgatccatatattaacgtagacccaggaacaatgagtccataccaacacggtgaggtattcgtaacggatgatggcgcggaaacagacttagacttaggtcactatgagcgttttatcgatattaacttaaatcgctacagcaacgtaacaacaggtaaagtatattcaacagtattgaaaaaagagcgtcgcggtgattatttaggcggaacagttcaggttattccgcacatcacaaatgaaattaaagaacgcgttttccgtgcaggtaaagaaacaaatgcggacgttgttattactgaaatcggcggaacggtaggagatattgaatcacttcctttcctagaagctattcgtcaaatcaaaagtgatattggccgtgacaatgttatgtatatccactgtacacttgtgccatatttaaaagctgctggtgaaatgaaaacaaaaccaacacagcatagtgtaaaagagttacgtagcttaggtattcagccaaatgttatcgttgttcgtacagaaatgccaatttctgaagatatgaaagacaagctagctttattctgcgacattgatccaaaagcggttattgagtgtgcagacgctgaaacattatatgaaattccactatctctacaagagcagcacctagatcaaatcacatgcgatcacttgaaattagattgcaaagaagcagaaatgactgagtggaaagcactggttgaaaaagtaaaaggactttcaaatacaacaaaaattgcattggttggtaagtatgtagagcttcaagatgcttatatttctgtcgtagaagcaatgaaacatgctggatatgcattcgatgcagatgtaaacatcaagtgggtaaattctgaatttgtaacaaaagaaaatgttcaagatttacttggtgatgtagatggtatcttagttccaggtggatttggtgatcgtggaattgaaggtaaaattgtagcaacacaatatgcgcgtgagcaaaaggttccattcttaggtatttgcttaggtatgcagctggcatcagttgagtttgcgcgtaatgtattaggcttagaaggcgcacattcagcggaaattgcacctgaaacagattatccaattatcgacttattaccagaacaaaaagacgtagaggacctaggcggtacactgcgtttaggactatacccttgtaaattgtctgaagatacgcttgcatatgaagcatatcaagatgaagtggtatatgagcgtcatcgtcaccgttatgaatttaataacgaataccgtcaacaaatggaagagaaaggctttatcttctctggtacaagcccagacggccgtttaattgaaattgtagagttaaaagaccacccatggttcttggcttcacaattccacccagagtttacttctcgtccaacaagaccgcaaccattgttcagagaatttattcgcgcatcaatggaatcaagtcaaaacaaataagtgaaataaaaaacacgctgtctttagacagcgtgttttttattcatattcttctacgatttcttttaatgtgaaagttaaaccgtagtacgcgtataaagagaccatcattgctggaaaaccaaatcttgagccgtcttctccaggaataagcggctttaacaattttgtatcaatatgagcatctgcgagtgctgttaaagaaggttcggctatctctttaggaacagcagcaatgctaacaaatggaatatcgtgtttctttaaacgttcagctatttccactgctttattatctgttgaaaatcgagagacaagcagtacgcgatcaacgctagtcaactgatctaattcatgtaaaggcaaagcttttgcctgacttaaaggttctgcactgcttagtgcttcaagcgtaatggcgtgcatttcttctacgccataaatataaataaatccttctccgacagaggcttgtgctaaaatacgcgcggcatcttcaaattggaattcttcttgttcttcaattcgtttaaaaaaacctgaaagttgagttgtgaaaattttaagcatagaatctcccttcaatttaagcggctaaagccgtctatctacacattataacgaaaaaagctatctgtattctatcttgaaatgagctacaatgaaagtaaagtgcaatgaagttggatagatgacaaaaaaagctatgttttgtaacaatttctctaattagcagggatttttgttttaaaggcgaaatacatatgttagttttgtctgtagaagaggaatataaaaggtgggattatattggcagagaaaattttaattgttgatgatcagtatggtatacgtattttattaacggaagtgctgcaaaaagaaggctatacgacatttcaagcggcgaacggcttccaggcgattgatattacaaaagagcaagcaccggatcttgtcttattagatatgaaaattccaggaatggatggaattgaaattttaaaaaggttaaagcagcacgatgaaacgattaaagtcatcattatgaccgcttatggtgaattggatatgattcaagaagcaaaagatttaggagcattaacacactttgcaaaaccgtttgatattgatgaaatccgaaaagttgttagggaatatataccagtaaagtcgaattaaggttttggtagggttttcatcctaacaaattttgaatatcagcctaaaaatgttgctgttttcattgttagttggtatcctaattactgtattcataattcgacaatctattatgtaaagatgcgcgttgtttctacatgaaacactcaattcaagagcatactatttgagtgtgccttttggttagcatctaatctaaggttgattttaaggaggatttcaatatgcctttagtatcaatgaaagaaatgcttattacagcaaaagaacaaggctatgcagtaggtcaatttaacttaaataacttagagtttactcaagctattcttcaagcagcaaaagaagaaaactctccggttattcttggtgtatctgaaggtgcagcacgctacatgggcggtttcaaaactgttgtagcaatggttgaagctctaatcgaagattacgacgttcaagtaccagttgcaattcacttagaccacggttcaagctttgaatcatgtgcaaaagcaatccatgctggattcacttctgtaatgatcgatgcttctcaccacccatttgaagaaaacattgcaattacttctaaagtagttgaactagctcacttccacggagtatctgtagaagcagaactaggaactgttggtggacaagaagacgacgttattgctgagggcgttatctatgcagatgctaacgagtgtgaagaacttgttaaccgtacaggtatcgattgcttagctccagcattaggatcagttcacggaccatacaaaggtgaaccaaacctaggctttgctgaaatgaaagaaatcggagatcgtacaggcttaccattagttttacatggtggaactggtattccaacaaaagatatccaaaaatcagtttctttaggtactgctaaaatcaacgtaaacactgaaaaccaaattgcttcagctaaagctgttcgtgaagtattagctgcgcaacctgaacaatatgatccacgtaaatacttaggacctgctcgcgaagcaatcaaagaaacggttcaaggtaaaatgcgtgaattcggttcttctaacaaagcataatttgaaatcttcggattgcctgtttgcagttagttgagtctgaaaaataaaaccgtcttatttttattgtaaggcggttttatttttactataattttcttatcattctgaatacataacacagggggatggcattcatgaagttttttattgatacggctaatttagacgaaattaaggaagcgcattcattaggtttgttagcgggggttacaacaaatcctagtttagtagctaaagagaacatcacgtttgaagatcgtcttcgtgaaattacagagttcgttgaagggtctgtaagtgcagaagtgattgcgcttgatgcagaaggcatgattcgcgaaggaaaagagcttgctgcgattgcgccgaatattacaatcaaggtaccgatgactccagatggcttaaaagcagtaaaagaatttactagtttaggtattaagacaaacgttacgcttattttctcagctaaccaagcgttaatggcagcaagagcaggtgctacttacgtatcgcctttcttaggaagattagacgatattggttttaatggcctcgatttaatctcagatatcgcagatatttttgcgattcatgacattccatcagaaattattgcagcatctattcgtcatccgatgcacgtaacagaagctgcaaaaaatggagcacatattgcgacaattccttacaaagttttaatgcaattgttcaaacatccgttaacaaatgcaggaattgaccaatttttagcagattgggaaaaacgaaatgtctaaacatgtataaatttgtgtggcatttaccatcctgacaggtgaatgccatatttttcttttatcttgtcgaaactatacatgattttttcattttcgtgtacactagtaggtaataggaaaaataaccattcttttaggtattctttgtaccaaaattttcctcaattactaggtgagaaactttctttcactagaagggagctataaatggaaaagttaaaaatacaaggtggctttaccttaagtggatccgtccgcgtcagtggtgctaaaaatagtgccgttgcgcttattccagcaacaattttagccgagtcacctgttaaaattgaaggtctgcccgatatttcagacgtgcagttattaggggatttagttgaagaaattggtgggaaagtaaccattgataacgacgaattaacagtagatccatccggaatggttgcaatgcctttaccgaacggaaaagtaaaaaaattacgcgcttcttattatttaatgggggcgatgttgggacgctttaaaaaagcggtagttgggcttccaggaggctgttaccttggtcctagaccaatcgatcagcacattaaaggctttgaagctcttggcgctaaagtaacaaatgagcaaggagctatttacatccgagctgaggaactgattggtgctcgaatttatttagacgttgtcagcgtaggagcaacaatcaatattatgctcgctgctgtaagagcaaaagggcgtaccgttattgagaatgctgctaaagagcctgaaattattgatgtagctacgttactgacaagtatgggtgcccgtattaaaggtgcaggtacggatgttattcgaattgatggagtagatcaattaaaaggctgccgtcattccatcattccagaccgaattgaagcaggcacgtatatgatcatgggagcgagtatgggaaaagaagttgttgttgacaacgttatccctcagcatttggagtcattaacggctaaaatgcgtgagatgggtattcatatcgaaacaagctcagatcagattcttgtagcgactcgccagctattgaagcccgtagatattaagacgctagtatatccaggttttccaactgatctacagcagccatttacgacgcttctaacaagagcgtctggtacaagcgttgtgacggatacaatttacggtgcaaggtttaagcatattgatgagctgagacgaatgaatgcatctgttaaggtagaaggacgttctgccattatcaatggtcccattaacttacaaggtgcgcgtgtgaaagcgtcggacttacgagcaggagcagctctcgtaaccgctggcttaatggccaaagggattacagaggtaacgggtttagagcacattgaccgaggttacagtcatttagtagacaagctatcggatttaggggcaatgatttggcgtgaagagatgactcaagaggaaattgagcaatttcaaaattcatagaggcaaatcggtgccacagtcatgaaaccaaagtctagaaatgagctttttaataagctacacaggcgtaggagcgttcttctatgtctgtgtagcttatatatttatgaatagggtaaatagataaaaagggaagctaaaagataaatttcacttcttattttaacgtccagtttatttcctttaatgtgaaattatgaaaaggttttcctcgcttctcgtaagctattaaatttccttttttttattcatcttctaaagtaaaaaaagattgattaaaaagatagaaaaaggttagaatataaattgctacgttaaatttatcaagataatataaatggttttatgtcggaattattcttctaaaagtgtatagttaatcaattgattctacttattatacttcaaaggttatattctccattttcacagatttattccatccatatcatctctcaattttatatttgaatttaatatgggaggaacggttaaaaattattcattataaagcgtggtgtcctaatgaacttaacattatccagtttagaaaatatgaaattaaaagagctatatgaacatgctcgtgagtataaagtttcgtactatagtaaattaacgaaaaaagaacttgtctttgctattttaaaggctcaagctgaacaagatgggcttttatttatggaaggcgttcttgaaattattcagtcagaaggattcggtttcttacgaccaattaactattcaccgagttcagaagatatttatatctcggcttcacaaattcgtcgcttcgatctgcgtaatggagacaaggtatcggggaaagttcgtcctccaaaagaaaatgagcgctactacggattattacatgtagaagcagtaaacggagaagatccggaaacgtcaaaagatcgcgtgcattttccagcgctaacgccaatttatccaaatgagcaaatgctgctggaaactcagccaagaagtttctctacgcgtattattgacttgatttcaccaattggatttgggcaaaggggactaattgtcgcgccgccaaaagcaggtaaaacgatgctgttaaaagaaattgccaatagcattacaacaaatcatcctgatgcagaattgattgtccttcttatcgatgagcgtcctgaggaagtgacggacattgagcgttcggttgacggtgatgttgtcagttctacatttgacgaagtgccagaaaaccacattaaagtagcagaacttgtccttgaacgtgcgatgagattagttgaacacaaaaaagatgttgtcattttgatggatagcatcacaagacttgctcgtgcttataacttagttattccaccgagcggtcgtacactatcagggggtattgacccggctgcttttcaccgtccaaaacgattctttggagctgctcgtaacattgaagatggaggcagcttaaccattctagcaacagccttaattgatacaggctctcgtatggatgatgttatttatgaagaatttaaaggtacaggtaacatggaactgcatctagatcgttcactagctgaaaaacgtatcttccctgcgattgacattcgtcgctcaggcacacgtaaagaagagctgttaattccaaaagagcatttagaccacttatgggcaattcgtaaatcaatggcagatgctcctgattttgcagaaaaattcttaaaacgtttacgtcaaacaaagacaaatgaagagttcttctcgatgttaacggaagagaaaaaaacgcttctagcaaataaacgataagttataaaacatgtggttgcaaaagcatacaacccttgttataatttcatcatgtgtgttgataaagtacacagtgaaatagttattatttcatcactatctttatcaataaactctgtttcagaatgattcagggcggaaggagatgaaacgaatgaaaacaggaattcatccaaactataaaacagttatggttaaatgtacttgcggaaacgaatttgaaagtggttctgtaaaagaagagatccgcgttgagacttgttctgaatgtcacccattctacactggtcgtcaaaaattcgctgaagctggtggccgtgttgatcgcttcaacaaaaaatacggtcttaaataatcacattgtcgaaacaaacaggcaagtagcttaacttcttgcctgtttttttgcttataaaagtagaaaaacagggtctgcttgataaaaaagtgggtactttatcataggaataagatctacatagaagacgtagattaagttagtagcggttcgctcagaaacggaacgagaagaagggagagtcccgcagtggtgtacgtaatgaaacaaagcggttggatagaagtaatttgtggcagtatgttttcagggaaatcagaagagttgattcgacgtgtgcgccgtacgcagtttgctaaacaaaaagcacaagtattcaagcctgcaattgataatcgatatagcgaagaagctgtcgtttcacataatggtacatctgttatggcttattcaatctcggcatcgcgcgatattttaaagcgagtaaatgaagagacagacgtagtagcgatagacgaagtacagttttttgacacagatattttagaaattgttcaatctttagcagatcaaggctttcgtgtgattgtagcggggttagatcaagacttcaaaggtgaaccttttggacaaatgccgcagttaatggctattgcagagtcggtaacaaagctacaggccgtgtgcgcttcatgtggctctcctgcgagccgtacgcagcgtttgattaacggtgagcctgcttcttatgacgaccctattattttagtcggtgcgtctgaatcgtacgaaccaagatgtcgtcattgccacgttgtgcaaaagtctaaaggacaggttgtgtctgtggactcaagcgaaatggtcgaaaaataaagcaagaattttatgatgataaaaacagaacgcgcagttctgtttttttgttcatatacgtgtattaacaaggttttgactctattttaaagctatactataattacaatgttatggataaagaatgaggtgaatgacgtgtttgatcgtttagaagcggtagaggcgcgctatgagaagttaaacgaacttctgagtgaccctgagatcgtaaacaacccctctaagttgagagaatattcgaaggaacaatcagatatacaacaaacggtagctgcttatcaggaatacaaagatgtaaaagagcagttatcagaagcgaaaacgatgcttgaagataagcttgatgcagatatgcgtgacatggtaaaagaagaaattgccgagttagaaacgcagcaagaagagctagttgaaaagctacgtattttattaattccaaaagatccaaacgatgataaaaacgtaatcatggaggttcgtggagcagctggtggagatgaagcagcattattcgcagctaatttgtaccgcatgtattcgcgctttgctgaatcacaaggctggaaaacagaagtaatggaagcaacgactactggagtaggcggttataaagaaattatctttatgattaacggtaaaggtgcgtactcaaagatgaaatttgaaaacggtgcacatcgtgttcaacgagttcctgaaacagaatcaggcggtcgtattcatacatctacagcaacagtagcatgtcttcctgaagcggaagaagtcgaagtggacattcatgaaaaagacatccgtgtagatacatttgcttcaagtggacctggtggccaaagtgttaatacgacgatgtcagccgttcgtttaacgcatttaccaacaaatacagtggtatcatgtcaagatgaaaagtctcagattaaaaataaagaaaaagcaatgaaagtattgcgtgctcgcgtgtacgataagttccagcgagaagcacaagcagagtacgatgcaacgcgcaaacaagcagttggatcaggagatcgctccgagcgtatccgtacgtataacttcccgcaaaatcgcgtaacggaccaccgtattggtctgacgattcaaaagctagatcaaatcttagaaggcaagcttgatgaaattattgatgcattagtcatggaagaccaagcgcgccgaatggaagattcgaactaatgaaagtatttgaagcccttaagtgggcttcttcttttttgaaagaggcaaagcgagatgaaaacgcgggagaactcttgcttcgccatcacttgcagatgacgagaactcatttgctaggttctctgcaggaagaactagaagaagaaagtctaaaaagatttgaacaagatgtccatgctcataaagcaggtatgcctgtacaatatctaatcgggacagaagaattttacgggcgttcatttattgtaaacgaacatgtattaattccaagacccgaaacggaagagctggtatacggaatgatttctcgaataaaaaaagaatttcaacaccagcctattgagcttgtagatattggaacgggaagtggggcaattgctatcactttagctttggagcttgacagagtggaagttacagcaacagatatagctatagaatctttaagcgtagccaaagaaaatgctcaaaacctcgacgctgccgtcacgtttatacagggagatctattacaaccatttctattatcgaatcagaaatttgatgtaattgtgtctaatccgccttatattccagcagatgatgagttgtccacagtggtaaaagatcatgagccaaaccgagctctttttggtggaaaagatggcctggatttttatcggcgtttcatggaagagttgccatatgtgacgaagtcaaatagtattattggatttgaagtcggggccggacagacaaaagatgtagcagagatgctgcaaaaaacgtttccgacagcttttgtagaatgtgtatatgatattaatggaaaagatcgaatggtttttgcacaacttcgcgagaactaaaaaatcagagggaatgattttccctttgatttttgaaaatcatgcatttttttactaaattactagtttaagatatcttgctttcggccatactgttcctatgaaagggcggtggccgaaatgaagaaatatgctatcatttattttattttattaattattggagcaaatgctcaacttatatatacacataaccaagtgcaggcagagcagcctgcagtcattccagacgaggcaattcgactgcgcattttagcaaacagcgacggtgaaaaagaccagtacgtaaaacgtctgattcgtgaccgcgtgaacgaacaaatcacagaatgggtaaaagatttaacatctgtaactgtagctcgaaaaacaattaaagaaaatttgccggcgcttgaaacaattgcgaaagaagtgctaaaagaagaaggcgtaaatgaatctgttcatgttaaattcggaaaagtagagtttcctactaagttgtacggtcagtttttatatccagcaggtgagtatgaagccgtacttattactcttggcaaaggagagggagcaaactggtggtgtgtactatttcctcctttatgcttcttagatttctcaaacggtgaagcggtaaaagcgccggagccatctgaagaagagccaaaggaagaaaaagagaaaccagcagcttctgaatcaaaatctgcaggcaaaacagatgacaaatcggctgaaagtaaagagcctgcagtgaaaacagaaattcaatctgcaactattacatcggattctattgagcagaaagctgaggagtcttctcaaccaacagtatcttctaaagaagcaattgcaaaagatacaagtgcagtaaaggaagacacaagtgttaaggctgaaaaaaaggaaagtaaagaagctgaaaagtctgtttcatctaagaaaaaagctgattctaaatcaaaagaagattctgtagaagttaagttttttgtagtagaatgggtatcgtcagtatttaattaatagaatcattaaaaataaaattcagttctactttttttaatcatctcatagatttgttactagaaaacaagttgaggtgattaaaatgagagaacaattaaagattgccagtgaaaatgattatattcgaattcagcagtttttacaaaaagcgggcatcagcacagcaggtgtggaagagcatattcatcaatttgtcataatggaaaatgaagaaggcgagttgctagcaacagttgggtttgaaaaagaaggtgtggatggaattctccgctcccttgtcgtgtctccttctttaatgcaatctgatattctgctgctatttaaaagcatcgtccaactggctcaaaagcatggcgtaaagcaactatatttactaacaaataaggcatcttctctacatttttttcaaatgatgaattttcagcaaacatcttacagtgcattgcctgagttgttaaaagaacattcttatttaaaaaagttaccaaaccctcaggatgtctatgtgatgttttatgcagctagttaaaagaaaatgtggataaatcattttaatggggtatccacaatgttattcacaaaaacataagctttatccacattttgtggataaagcttgtttgttgatataatgaatgcatgtattttactatctttgatacatattgtacttttaaagtaaaaaaaacctagatatagaaagaaaaaggagttgaagaagatggaaactaagttatgggttgtggataatcttacgaacgaaaaagatatttatccacagatagaagaagcagcagatttgctgcgcaatcacgaagtggttgcttttcctacagagacggtgtatggattaggaggagacgcaacatcggataaagctgtggataaaatttttgcagcgaaaggacgtcctagtgataaccctcttattgttcatattggagataaagagcagcttcatacatttgtagagtcgattccttcaaaagcagagaaagtgatcgatgctttttggccgggtcctcttacagtaatattacccaaaaaagatcgagtctcagataaggttacggctggtttaaacagcattgcagtgagaatgccctcacatccagtagccctcgcattattaaaaaaagtggctttgcctatcgcagctcctagtgcaaacctttccggcaagccaagtcccactctagctcatcatgtaatgaatgatttagaagggcgtattagcggagttgtagatggaggagcaacaggggtaggagtagagtcaactgtccttgactgtaccgaagagattcctatcattttacggccgggcggcattactcagaaagagttggaaaatgtcattggtcccgtaaaagtagatcgagcgttactaagtgataaagaagcgccaaaatctccaggtatgaaatacacgcattacgcacctgatgcaccgcttgtcattgttgacggcagttcagattttctccagtctattattgattgctataaagatcagggtaagcgagtgggggtattaacgacatctgaacatgaagatgcgtataaagcggatgcggttatcacatgtggatctcgttcaaatttagagacggttgctagccatttatacgagtcgcttcgttcatttaatgagtgtgacgtagatattatcgttagtgaaagtttttctgaagaaggagtcggtcatgccgttatgaaccgattaatgaaagctgcaggacatcacgtgattaagcaataaaattcatcttctaaaccttttcgaatgtgcatattttgaaataggagcacgtccgaggagggtaaagatgaatgtatctcagttaattagtgaaatgatcacgttagtcattatggcgtttgccttaggaatggatgctttctcagttggtttgggaatgggattaattcgtttacgctttcgccaaattttctacattggtgttgttatcggtgtatttcatatttggatgccgctgttaggcatctttattggacgacttttgtctgataaacttggaatgtttgctacctatggcggtggaattttattgctgattcttggggcgcagatgatttattcctcctttaagcatgacgatacgccgtttatcaaaccagttggttttggactgttattttttgcgctcagcgtgagtctagatagtttttctgttggacttagcttaggtatttttggagcaagaacgtttttgaccattattgtttttggcgtagtgagtatgctattaacttggttaggactgctgctaggaagaagagtacaaggctggcttggttcatatagtgaggcactgggcgggagcattttattagcttttggaatcaaattgttactacctttttaactatataaataggtaaaggatcatgaccatgcaggttatggtctttttttgcttcttttggatcgtagcgataaaagaaggaaagcgaagtcgttttttcgagatggatgaagcgataatggataaaaaatacccggaaaagctaactggatttatgcaagcaatagagatacaatagggtggaatatcaacatagtcgaacatagtgaaagcaagggaggatgtatcttgaaaaacatcttatttgtatgtacaggaaacacgtgccgcagccctatggcagaagcgttgctcaaagctaaagagatagatggaataaacgtgaagtctgcaggcgtattcgcttcaaatggaagtgaagcttctgttcatgcacaagttgcccttcaccagaaaggcatagcttgttctcatgcttcggcagcattaacggaagaacaattgatgtgggctacttatatttttacgatgacggagcagcataaaatgctgattttgaaccaagctccgtacgtaagtgataaattatttacgctaaaagaatttgccgacgagcaaggtgaagtatctgatccgtttggcggatcattacagacgtacgaacagactttagaagagttagagcgtatgattaacaaaatagtcgacaaattataaaaggtcccataaatttttgctggcttaaaatgaacagaaatttaatataagacaaaggtatgtatgaggaggaaacaaagatgaaagtagctattgcatctgaccacggcggtataaatttgcgacaggaaattatctctttaatggaagaattaaatattgaatatgtggatttagggtgtgaatgcacggcgtctgtagactatccggattatgcacttcccgttgctcaaaaagtggcgagccaagaagtaagtcgaggcattcttatttgtggaacaggcatcggtatgagtatagcagctaataaagtaaaaggaattcgctgcgctctagtgcatgatacgttcagtgcaaaagcgacaagagaacataatgatagcaacattttggcaatgggtgaacgtgtcattgggccgggacttgcacgtgaaattgcgaaaatttggttaatgacagaatttgaaggcggccgacatgaaaatcgcgtgaataaaattaaacagtatgagcagcaaagcgatgcaacagtaactgtataatatgaacgtattcaatgaaagaaaggaagaaaaacgtgtctgaacttacgaaatggaaagagcagttggaaacagttttatctgattttttagcacaagtgcagttttcttcagaacatacacttgtcattggatgcagtacgagcgaggtaattggtgaaaaaataggaaccgcaggcgcaatggaagtcgcagaaatgatttttgatacactagcagattttcgaaaaaaaacgggtgtccacttagcatttcaatgctgtgaacatctcaatcgagcactggtagtagaaagagaattagctcgcaaagagcgtttagaaatcgttagtgttgtgcctattcataaagcaggcggagcgatggctacacaggcctatggccagcttaaagatcccgttttggtagagtttattaaagctgatgccggtattgatattggagatacattcattggtatgcatttaaagcatgtcgcagtacccgttcgttgtacgttaaatgcagttggacacgctcatgttactttagcaaagacgcgcccaaaactaattggtggaatgagagcgttttacgaacttttgtaattaaatatattaaaataatacacattttttcttttttattctaaataaatcatgttacaatgtagttgaatcaacaaataacgaacattgtgaatacgaaatgaggagaggattttgatggagaaacaactaatgcaacaagatccagcagtttataatgcgatcaaggatgaattacaaagacaacgtactaagattgagctaattgcttcagaaaactttgtaacaacagcggtaatggaagcacaaggttcagttttaacaaataaatatgctgaaggctatccagctaaacgttactacggcggttgtgaacacgtagacgtagtagaagacttagctcgtgatcgtgcaaaagaaattttcggagcagagcacgtgaatgttcaacctcactcaggtgcacaagcaaacatggctgtatacttcactgttttagaggctggagacacagtacttggtatgaatttatcgcacggcggtcacttaacgcacggaagtcctgttaactttagtggtgttcagtacaatttcatcgaatatggcgtagatcgtgaaacacatcgtattaactatgatgatgtattagaaaaagctcgtacacataaaccaaaattaattgtggctggtgcaagcgcatatccacgcgcaatcgacttcaagcgtttccgtgaaatcgctgatgaagtaggcgcttatttaatggtagacatggctcacattgctggtctagtagctgcaggacttcatcaaaatcctgtgccacatgctcatttcgttacaactacaacacataaaacactacgcggaccacgcggcggtatgattttatgtaaagaagaatttgcgaaaaagattgataagtcaatcttccctggtattcaaggtggtccattgatgcacgttatcgctgcaaaagcagtagcatttggtgaagcattacaagatgattttaagcactatgctcaaaatatcatcgacaatgctaatcgtttagcagaaggattaaagaaagaaggatttgctcttgtatctgaaggaacagacaatcaccttgtgttaatcgatgtaagctcaatgaatttgacaggtaaagtagctgaaaaagcacttgatgatgtaggtattacaacaaacaaaaatacaattccttacgatgagcaaagcccatttgtaacaagcggtatccgtattggtacagctgcggttacaactcgcggatttggcttagaagagatggatgaaattgcttctatcatcggattaacgcttaaaaatattgaagatgaagaaaagctagctgaagctaaaacacgcgttgaagctttaacaagcaagtttgaaatgtataaatcactttaagagagacaggcctttgtgcctgtttttttatggagaaagtggtagcaattcaatcattttttgaataatgcttgaactcaaaaacttttttctgtaaaatgaatgcaatgtataaatttaattagcaagagatatgtttttactagtacgtaccattcaattcgttgaatggtattttaatgtgtacatctttatatataaggagagatatcaatgggcaaagtatacgtatttgatcacccgcttattcaacacaaattaacttacatacgcgatgtgaaaacgggaacgaaagagtttcgtgaattagttgatgaagtggcaagcttaatggcttttgaagcgacacgtgatttaccgctagaagacgttgaaattgaaacaccggtttgcaaaacaaagtcaaaagttattgcagggaaaaagcttggtatcgttccaattcttcgtgctggtatcggcatggtagatggatttttaaaactaatgccagctgctaaagttggacacgttggcttatatcgtgatccagaaacattacagcctgttgaatattatgtaaagctgcctaatgatgtagaagagcgtgactttattgtagtagatcctatgcttgcaacaggagggtcagctgtagaagcaatcaactctcttaaaaaaagaggcgccaaaaacattaaatttatgtgtttaattgctgctcctgaaggcgtggaaatcgtaaaagaagcacaccctgacgtagatatttacattgcggcattagatgaaaagttaaatgaccatggatatattgttccaggtttaggtgatgcaggggatcgtttattcggtacaaaataatttgtagattcgggtgatgaacatgaagcagccaattaaagtaatgacgatattcgggacaagaccagaagcaattaaaatggcccctctagtgctagaacttaaaaagcgaccggaggagttcgaagcgattgttacagtaacggctcagcaccgtgaaatgttagaccaagtattgagcatttttgacattcagcctgactatgaccttaacattatgaaagatcgccaaactcttatggacgtaacgaccagaggattagaaggtttggacgacgtaatgaaaaaagtaaagccggacatcgtacttgtacacggcgatacaactacgacgtttattgccggactagcagctttttataatcaaattcaggtgggacatgttgaagcaggtttgcgcacatggaataaatattctccatatccggaagaaatgaaccgtcagcttacaggcgttctcgctgatttgcactttgctccaacagataagtctgcagctaatttgcaagcagagaataaaaaagaagagcgaatctttgtgactggaaacacagctatcgatgcgttaaaaacgacagtaaaagagacatatgagcatgaagtgttaacgaaattgggagacgatcgtcttattttattaacggcgcatcgccgcgaaaatttaggcgaaccaatgaaaaacatgttccgtgctgttaaacgtattgtggatgaacatgaagatgtgcaagttgtgtatcctgttcatttgaatccggtagttagagaaacagcaaacgatatcttaggaaacgaccgacgcattcatttaattgaaccgttagatgtaattgacttccataacttcgctgagcgcgctcatattattttgacagattcgggcggtgttcaagaagaagctccttcattaggcgtacctgtattggtacttcgtgatacaacagagcgaccggaaggaattgaagcaggaaccctcaaactagcaggaacggaagaagaaacgatttatacgctagcaaaagagctgttaatagatgaagacgtatataagcaaatgtcacaagcatcgaatccttacggagacggcttagcttctaaacgtatttgtgatgctattagctactattttaaccgccgtgaaaacagaccggaagcttttaatccactttcgtaagatttctaaacacctttcacatgaaaagtgtctctttgagacacgatagtgtgagaggtgttttttatgtggattaaatggttaatgattagctttatattaggaagcgggggagggcaaatgtcgctcaatccgacatttccttctataaaacaagaaatgaatcatcaggaaaaatcaataattgtcatgattgaaaaagaaaaattcgcgaaatttaaaagtcagctacaaaaaaattatcctaatataaagattaagagcgaatttcacacggtgtttacaggactttcattaaacggctccatctcggatttggaaaaactatctcataatccttctattattggttcacattctattaaaaaataccaggttgcagaagaaaatagcgtaaccttcattggctcagaacaggtaagaggcttatttgatacttataatcagcgcttaacaggaaaagggatcaaagtaggcgtcatcgatacgggtgttgattattctcatcccgatttaaaacaaacctataggggaggatatgatgtaatagataaagattatgagccgatggaaaccactcgggagcaaggagagcctactctgcatggcactcatgtagctggtattattgcagcaaatggaaatattaaaggtgtagcacctcaagcagagatctacgcataccgagctcttggacctggtggagctggaacatctgaaagcgttattctagctatcgaaaaagcaattcaagatgatgtagatattattaatttatcattaggaaatgatgtgaatggccctgatttaccaacaagcttagctttagatcgagctgttgaaaaaggaattgtaacggttacatctagcggcaattcaggtccaggtttatggaccgtgggctctccaggtacagcgggaaaagctatttcggttggcgcttctgtttccccgacaacagttcaatttctaacaattggatttaacaaagaaaaaattatgatggcgccagtagaagggtctcgtccatggacgtttaatcaaacgctgcgtgtaataaatgaagaatacttcaaagagcaaaagcatgcgttgggtaacgtcattttgctaaaagcagaaggaaatgcggttgaaaaaaagattaaacaagctgaacaggcaggagcaaaagccgttattttatatagcccgactgaaaaaagcataatcggtaaactacaagagtcagtaaatattccagtgatatgggtaagtaaaaaaagcggtgataccattaatcaacacattcagtctcaacagccatacttacgcactggcaagcaagtgatgcaagacttgctcacatctttcagttcaagaggacctgtaacgactacttggggaatcaagccggacgtcgtcgcacctggttacttcattaatagtacagttcctgggggatatgaacgtatgcatggaacaagtatggctgcgccccatgtagctggagcgtgcgctcttattttacaagctcacccgaactggtctcctgaacaagtcaaagcttcattgatgaacacaagtagagtaatgcagcagctaaatggccaaacgtatcgcgtatatgaacaaggagccgggagaattcaaatagcaaaagctgtcacagcagactctttattttatccatcttctttatctttcggtatttttacgcgcccatcaaagaaagtcttatcatttaaaattgataaccagtctgataaagcaaaaacgtatcgcttaaacgttccgaaaagggatgaaggagtgaactgggttgttccattacccgtcacggtgccgccccatcagacaaaagaaatagctgtcactttatcggtgcagccccgttttaaaaataaaggtatatatgacggatatttggaaataaatgattcacgtgaaacattttcgcttccttatatgtacatggttagcattccagattatcctcgtgtcatgggattgcaagtagcagcggaaaaagagaaaaatacgtacagctatgaactgtttttgcctgaaggagcagaagaattaggcgttgctctttttgataagcagtctttacagtttatatcgtatttagatgttgacgttgatgtagaaagaggcatgagaaaacgaaaaataacgattgatgaatcgcttgtaccgggggcgtaccaaatatttgcatttgtgaaaaagcatggacaagaacaggttgtacacagtacaataacgattgaatgaacctctttaaatgttttcatttgaagaggttttatgtgtggcagaaatgtgaacaataagaagagattgtgaagtttttagcttaaacacattgacattaaatatacgctattgtatgcttacagggaatataaatgataaggttttcaacctgtgaaaaccgttgatatttctgcatattttattagctgtttttaccttttttagcaattttttttgcctttctatcatatattgagctataaaaacgatagagaattcggaaaaaagaaaattttgcaaaaggggtatgagcttatgaaagatcgcaaccgtcatcctttgcaagcgatggcattagtgtcaatcattctatcacagttagcaggttcagtcttaattggcttattctctggaagatgggctgatcaatggcttgacaccgaaccactatttttgattttaggccttcttttagggctagcagcaggtgtttttatgatgctgcggacagtccaccattttttttcaggagattaataattcatgcaggatttgcagcacgtttttccaagacttcgttcatacatattgtatttgttagcattatacgttctcggctggggatttacaagttataaggctgtttttgcaggtttaattttaggaaccgccctgagtttgtataatttgtggaacttagtaagaaagtttgagcagtttggacaggcgttggatgaggggaaaaagccccgttcaattgggactgttgtaagatttgcaacagctgctctcgcagttgtgattaccatctcttatccaaaaacctttcatattattagtgtagttgtgggattaatgacgtattatgttgtcattatcatagatttagttgttcaaaatatgcgtagaagatagaaagagaggtgaacacagttgggtcatgaatcaccaactatagagtttctaggccttacttttagtcaaagtaacttgcttatggttaccgtagcttctgttattgtattcttaattgcagttttatgtactcgtactcttgctatgaagccaagcggtgcacaaaactttattgaatgggtcttagattttgttaaaggactcgttaatagcaatatggattggaaaacaggtggccgctttttgacgctaggtgtaactttacttatgtacatttttgtgtcaaatatgttgggtcttccatttgccatcgtgattgaccataacttatggtggaaatcgccaaccgctgatccagcaattacgctgacgttagccgttatggtagttgtactatcacattattatggtattaaaatgcgaggtttctctgcatacacgaaagattacttcaagccaatggcatttttattcccgcttaagattatcgaggagtttgccaatacgttaacgcttggccttcgtctttacggtaatatttatgctggggaaattttgttaagcttgctagctggtttagcaacaacaggcttcctaggtacaattggagctgctattccaatgcttttatggcaaggattcagtatttttgtaggcgcaattcaggccttcattttcacaatgttaacgatggtttatttatctcacaaagtgagtagcgaccattaatttataaagctttgttcaagtaatacccaatttggacaaaacaaaacttagttaaacaaaatcatatatattaagggaggactttataaaatgggtttaatagcatctgcaattgcgattggtttagcggcactaggtgctggtattggtaacggtcttatcgtttctaagacgattgaaggcacagctcgccaaccagaagcacgtggtacattaacttcaatgatgttcgttggggttgccttagttgaggcgcttccaattatcgccgtagttattgcattcatggtacaaggtaaataataatgtgttacatgtggcgaagatcattcaaaagaaccttcgccattactttatgtctttaataagtaaattatatatgtggagtctctgaagggagtgaacatggccgtgtcgaacatgtttgtgttaggagcagcaggcattaatggtggagatattcttttccaattagtgatgttccttatcctacttgcgttacttcaaaaattcgcgtttggtcctgtaatgggaatcatgaaaaaacgtgaagagcatattgccggtgagattgatgaagcagaaaagcaaaatgaggaagcgaagaagcttgttgaagagcagcgtgaaatcttaaagcaatctcgtcaagaagtgcaagtaatgatggaaaacgctagaaagtctgcagaagataaaaaagaagaaatcattgcggcagcacgcgaagagtctgagcgtctaaaagctgcagcgaaacaagaaatcgaacagcaaaaagatcaagcagttgccgcgttacgtgagcaagttgcttcattatctgttttaattgcgtcgaaagttattgaaaaagaactttctgaacaagatcaagagaagttaattcatgaatatatccaagaagtaggggatgtacgatgagtcaaccagctgtagccaaacgctatgcactagctctttttcaattagcaacagaaaaacagatgatcgatgaaatgcaagaccagctacaaatcgttgaagaggtgtttgctaaaacacctgaattaatggatgtattaactcatccaaaaattacaattgagcgaaaaaaacagtttgtaagtgaggcatttgctgaactttcaccaactgttcaacatacggttcttctattattagagcgtcaccgcattcaaattgttagccaaatggtacaagagtatcggttcctagcgaacgaagtacgtggcgtggcagatgcaactgtttattctgtcaaatctttaagtgcagatgagaaaagagcaatctcgcaatcatttgcttctaaagttggaaaacatactttaaatatttcaaatatagtagataaaagcctaatcggcggcgtgaagcttcgcattggtaatcgtatctatgatggcagcattagcagcaaattagaaacgatccaccgaggacttcttgcacacagatcgtagataggggtgaaattcatgagcatcaaagctgaagaaattagtgcgctgatcaagcagcaaattgaaaactatcagtctgagattaaagtgagtgatgtaggtactgttatacaagttggggacggtatcgcacgtgctcatggcctcgacaatgtcatggctggagaactggttgaattttcaaatggtgtcatgggaatggcacaaaacttagaagaaaacaatgtaggtatcattattttaggaccatatacggaaattcgtgaaggtgacgaagttcgccgtacaggacgcatcatggaagttccagtaggggagcagttaatcggtcgtgttgttaactcattaggtcagccagtagacggcttaggcccagtagaaacaacaaaaacacgtccaattgaaggtgctgcacctggcgttatggatcgtaaatcagtacatgagccgcttcaaacaggtatcaaggcgattgacgcacttgtaccgatcggtcgtggacagcgtgagttaattatcggtgaccgtcaaacaggtaaaacatcggtagcaatcgatacaatcttaaaccaaaaagatcaagatatggtatgtatctatgtagcgattggccaaaaagaatcaacagttcgtaacgtagtagagacattacgtaaacacggtgctctagattacacaatcgttgtaacagcatcagcttcacaaccagctccactattattcttagcgccatacgctggggtaacaatgggtgaagagtttatgtataacggtaagcacgtacttgttatttacgatgacttaacaaaacaagcatcagcttatcgtgaactttcattactattacgccgtcctccaggtcgtgaagcgtatccaggggatgtattctacctgcactctcgtttattagagcgtgcggcaaagttatcggacgcaaaaggtggaggttcattaacagctcttccatttattgaaacgcaagcaggagacgtatctgcttatatcccaacgaacgtaatttcgattacagacggacaaattttcttacagtcagatctattcttctcaggcgtacgtcctgcgattaatgctggtctttctgtatcacgtgtagggggatctgcacaaattaaagcaatgaaaaaggtagcaggtacactgcgtctagaccttgcatcttatcgtgagcttgaatcgtttgctcagttcggttctgatcttgaccaagcaactcaagcaaaattaaatcgaggagcgcgtacagttgaaatcttaaaacaaggcttacacaaaccgcttcgcgtagaaaaacaagtagctgtgctttacgcattaacaaaaggcttcttagatgatgttccagtatcagatattacacgctttgaagacgagtacttaacatggttagaatcaaaccgtaaagaagtactcgaatcaatccgtacaactggtggccttcctgaagctggcgtattcgaatcagcacttgaagaattcaagaaaacatttattgcatctgaataatatattgtcagcatggtatgttaagacaatctttcaataaggtgaaggtgaacttttgttcacctttcataccacgtgatcttctaaaacaaggtggtgaaacctttggcatcattacgtgatatacaaactcgaatcacatcgacgaaaaaaacgagccagattacgaaagcaatggaaatggtttcagctgcaaagctgaatagagcggaacaaaatgcaaaatcgtttgttccatacatggaaaaaattcaagaggtagtctcaagcgtagccctaggcagcagaggcgcttcacatccaatgttaactgcgcgcagcgtgaagaagactggttatatcgtaatcacttcagatcgcggtctagcaggagcatataacagtaatattttacgaaaagtatctcaagctattgaagaacgccatcaatcacctgatgaatatggtgtgattgcaattggacgagtagggagagatttcttcgtaaaacgaggtattccggttttgcttgaaatcacaggcttagcagatcagccagcttttgctgacattcaaggaatcgcttcacaaacagttcaaatgtttgcggacggtacgtttgatgaactttacttatactacaatcactttatcaatacgatttcacaagaagtgacggagaagaagctattgcctctaacagatcttcaaccttctggtaaacttgttggttatgaatttgaaccatcacaagaagagattttagaagtattacttcctcagtatgcagagagtttaatttacggcggcctgcttgatggaaaagcaagtgagcatgctgctcgtatgacagcgatgaaaagtgcaacagacaacgcaaaagatcttatcaataatcttacattgtcatataaccgtgcacgtcaagcggcaattacccaggaaattacggaaattgttggcggagcggcagcgttagaatagaaagtttaatggaaaagcaagttaggagggaacacgatgacaaaaggacgcgttactcaaatcatgggtccagttgtagacgtaaagtttgacaacggacaccttccggcaatttataacgcccttaaaatttcacataaaccgagcagtgtaagtgaagttgcaatcgaattaacattagaagttgcgattcacttaggtgataacacagttcgtacagtagcaatgtcatccactgatggcttagttcgtggattagaagtagaagatacaggtgcagcaatctcagtaccagttggtgacgttacgttaggtcgtgtatttaacgtattaggtgaaaaaatcgacttagatgccccgatcgatgcaggtgcacgtcgtgatccaatccaccgtcaagcaccaaagttcgaaaatctatctacacaagctgaaattcttgaaacaggtattaaagtagtagacttattagctccttacattaaaggtggaaaaatcggtctattcggtggtgccggtgtaggtaaaacagtattaattcaagagttaatcaataacattgctcaagagcacggcggtatttctgtattcgctggtgtgggtgagcgtacgcgtgaaggtaatgacttataccatgaaatgacagattctggtgttattaagaagacggctatggtatttggacaaatgaatgagccacctggtgcacgtcaacgtgttgcattaacaggattaacaatggcagaatacttccgtgacgaacaagggcaagacgtattattctttatcgataatatcttccgtttcacacaagcgggttcagaagtatcagcattacttggccgtatgccatcagcagtaggttatcagccaacattagcgacagaaatgggtcagcttcaagagcgtatcacgtcaacaagcgtaggttctgtaacatcgattcaagcgatttacgtaccagccgatgactatacggatccagctccagcgacaacatttgctcacttagatgcaacaacaaacttagagcgtaaattatcagagatgggtatttaccctgcggtagatccattagcatctacatctcgcgctttatctcctgaaattgttggagaagagcactatgcaattgcgcgtcaagttcaacaaacgttacagcgttataaagagttacaagacatcattgcaatcctaggtatggatgagttatctgatgaagataaacttgttgtacaacgtgctcgtcgcgttcaattcttcttgtctcaaaacttccacgtagcagaacaatttacaggtcaaaaaggttcttatgttcctgtaaaagaaactgttaaaggatttaaagagatcttggaaggtaaatacgatcatttacctgaagatgcgttccgtttagttggccgcattgaagaagttattgaaaatgcgaaacgtatgggagtagaagtttaatttaagggacataggaggttttttaaatgaagacaatccatgtcagtgtagtgactcctgatggcccagtttacgaatcagaagtggaaatggtaagtacccgagcacagagcggtgagcttggtattttacatggacatattccgatggttgctcctttacaaattggagccgtccgcttgaagaaagcaagcagtacagaacttgtggctgttagcggaggatttcttgaagtaagacctgacaaagtaacaattcttgcacaggctgctgaaacagctgaagcgattgacgtagctcgtgcagaagaagcgaaaaagcgcgctgaaatgcgccttgatagcaaacaagacgacgttgatgttaagcgtgctgaaattgccttaaaacgggcagtcaatcgtttagatattagtcagcgtaagttctaaaaaaagccctctcaaacgaatgagagggcttttttgctctattatacaaaaggggaagagcaaatagcatttatctatgattatatattccagttaactaagcgcatccatcttctttattttgctcaataatggaaaaggatcttaaaatagggaataaaataaatgtttttcatgttaccgtttacgaatttgcataagtgtgctttaatatgaaaagaagagacgatgatcgtctcttcttttcatatggtgtttaaaaggagtgcttttattgtttggaggaattgaacagcaaacgttactaaccatgatttcacacttgatttttattgtgattacttggtatgctttgcaaggctttcaaattgaaaagctgatgaaacccaatcatgtgtttcaagcaaaattaatgcttattttattgaccattacgatttcatcaacggtaagtaatttctttttggattatttattttggtcacagcgcattccctcattttttcaatgattggcaggctatgagtctatgataaaatagacgttcattcattgaagatatacgaatttatacgctaatgtatgtcgctatgtctaaatatgacgacccttttcatgtatgtatcatcgccttctggaaagactgatgagtacggagagggagtggcgaaatgtttaaaaaaattagtgtctttttggctattttcattactggcttattcgtatatcatggaagttatgtgagcaatgcccaaaacaatgaaactactattgagaagattgttcacaccttaaataagcagcatgtttcgttaactgaagtatcgttgtatgcaagagaagaagtaaaagctgttactgaccaaaaaaccttttattcgcaagctaaaagtattaaaagtaattttagaggttttaaatgggaagtgaagagggaaagagacctatggaaagcaataggtacacgcaaaagtgaagatgtgaacgaagtcattctgttaacttatgcgatcgatgaacacagcaatgcgtacatatcgtatcatgtaacgggacaaggtttaaaagaaaaaaatatgacccattttcaaaatgtatttcagacaaattatgaaaaaattttcctatcagaacccataattttctcttgtgcaacaggggaaatcaatggtaagatggaaagtgttttgtctgttgaaattcaagacctattacgagctttcaatgctaaaccagtggaatctctagtggaagagtcatttacctctgtttcagcatatactggactgtggaaagaagctcttcaaacgaaaaagcaggaaatgaacttacaaattgcattacgcaagacaagaatgggcggtcaaacaaccatagttgttggcacacctatcattacgtctgaatattaatatagagaaaatggacgcggaggggaataccttggaaaaaatcatcgtccgcggtggaaatagattaagcggtacagttaaagttgaaggagcaaaaaacgccgttttacctattatcactgcaaccttattagctagtgaaggaaaaacaattctaaatgatgtaccagctctctccgatgtatttacgattggcgaagttttaagacatctgaatgcagaagtagattttgaaacaaatcgtgtagttgtagatgcatcaagagagttaaaaacagatgcaccttttgaatatgtaagaaaaatgcgcgcttcagtacttgtaatgggtcctttattggcgcgtacaggtgaggctcgtgtagctttacctggcggatgtgcgattggatcaagaccgattgatcagcatcttaaaggctttgaagcaatgggtgctaaagttcaagtaggaaatggttttattgatgcaaaagttgaaggaagactaaaaggtgctaaaatttatttagacttcccaagtgtaggtgccacagaaaatattatgatggcagcagcattagcggaaggcactacaattatggaaaacgtagcaaaagaacctgagattgtcgacttagcaaacttcttaaacgcaatgggcgctaaagttcgcggtgcaggaactggtacgatccgtattgaaggtgttaataaattatatggtgcagaacatgcaattattccagatcgtatcgaagctggaacattcatggtagcagcagctattacaggtggaaacgtacttgtacgcggtgcagtagcagagcacatcagttcacttgttgctaaaatggaagaaatgggtgttgaaattactgaagaaggcgacggcttacgtgttgtaggacctgaaaagctaaaatcagtagatattaaaacaatgcctcatccagggttccctacggatatgcaatctcaaatgatggcattattattagcagcagaaggcacaagtatgattacagaaacagtttttgaaaaccgctttatgcacgtagaagagtttcgccgcatgaacgctgatattaaaattgaagggcgctctgttattattaacggaccttcccaactacaaggcgctgaagtagcagcaacagatcttcgtgcagcagcagcgttaacattagcaggacttgtagcagacggctatacgcgtgtaacggaattaaaacaccttgatcgtggttatgtaaatttccacaataaattagccgctttaggcgctgatattgaacgtgtaaatgacgaaacaaagcaagtagaacaaactcaacaggcttcagacgtcaagtaaatatgtcataaaaaagcatctcatagcgagatgctttttttgtcgctggacgacccttatggccggtttgctgtcataaaaggttgtccacctccatacatatggaatatagggatataggtgttccttttcaaaataatagatatggaggctaggcgttcatgaaacaagcaaagccaatcgtcgtactaggagtcatcttttttttcgttgtgttactcatcccaacacttctcgttgttccttttactgaaaagacagatggaaagctacatgaaaatgtcaaacagaccccaaaaaccgaaaaactacaaaaagtgacagcgtctcctcttgacgtcagcgtttatcgtacggaaacgaaaaaagtagaaaaactgtcgctcgaagactatcttgtaggggtagtagcagctgaaatgcctgctacttttgaacttgaagcactcaaggctcaaagtttggcagccagaacctatattgtgcaaactatgatgaatggaaatagtcatcttcccgaaggagcggatgtgactgatactgtagagtaccaagtatatttaaataaagatgagctaagaagcagatggaacaaagactatgattggaaaatcaaaaaaattcaagaagcagtgaaggacacccaaggtcaaattcttacgtataaaaataagccaattaatgctacgttcttttctaccagcaatggttataccgaaaattcagaagcgtattggaagaattccattccttatctaaaaagtgtagctagtccatgggataaaaagtcccctgaatttacaaatcagaaagtaatgtctgttgctagctttgagcagaggcttggagtgaaattaacaaacagtggatcagtaggtgaaatcgtctctagaacgccggggcagcgcgtagattatgtaaagataaacggtaaagaactgtcgggaaaagatgtccgggaaaaactgggcttatcgtcagccgactttcattggacaaaaaaaggtaatgaaattatcatcaatacaaaaggatatggacatggtattgggatgagtcagtatggagcaaatggtatggcactggaaggaaaaacgtataaagatattgttactcattattatacaggcgtggcgattacccctaacgatcagtttgttgcacaattgacagctaaacgctaattcaaagacccttatagaagggtctttttttatgtttttcactttttttaaataaaatgtatattttagattcatctgttgaaaaataatcgaaaaaaattttttatcgctgtgtatatattcattcaattgtgttcagactgattgctgaggtgatgatatatgagagaggaagaaaagaaacgtacttctccaaaatcgaaagttcaaaaattagttagaaagcgttgggtgttcccggctatctatttagcgagtgcagcaattattcttacagcagtcctttggtttcaagctaatggaaacgatattagcaaagaagacaaaagtggctatagccaagacggtacggcttatcgagacgacgctgtagaggtaaatgcttcgcttgaaaatttaaaaatgccagttgctagtgaagcatcagctattgtgaaaaagcctttctacgacgatcaagcatctgaaaaacagcaagaagaagcactagttttctacaacaatacgtatcatccaaacacaggtgttgacttagctgttaagggagataaatcatttgatgttgtagcagcagctagcggtacagtaacaaaagcagcaaaagatcctttactaggttatgtagtagaaattgatcacaaagatggtttagtaacacagtatcaatctcttgagaaagctgatgtagaagtaggagatattgttaaacaaggccaaacaatcgcaaaagctggaaaaagcttatataatcaagaagcaaaaacacatgtgcattttgaagttcgtaaagatggtgtagcaattaatccaagcagttattttggaaaatctgttagttctatcaaagaagtcaaagcagctgaagtgacagaaccaaaagacgactcttcttctgaagaatcaaagggtagcgaaaaatcatctgatgaaaagactaaagaagataaagattcaaaacaaacttcaacagatgcgtctaaaccaaatgcataaggcaagaccataaatatgaaaagaagctggataaaatcgagcttctttttttatgaattttttctaaaatgagatgcattatgttaaaaaagtaaataaaaaacactaaattttcaaaaaaatataagaaatcacttgtccttactgacttttctagcatatatctgcacacaagctaataaactgttacaaacctataaagagaatgttagaaaagggataatatatacattcccttggatacttctcatatccaatttggggagggcgagtagtgtgcacgattacatcaaagagagaactatcaagattggaaagtatattgtagaaacaaagaaaacagttcgtgtaattgcgaaggaatttggcgtttcgaaaagtactgtccataaagatttaacagagcgtctaccagaaataaatcctgagttagcaaatgaagtaaaagaaattcttgattatcataaatctattcggcatttgcgtggaggagaagcaacaaaattaaagtacaaaaaggaagaagaaattgtaaaatgaaaaaatgcccaatattgccttttttatagaggtagtatagggcattttattttttggataaaataggtatataataaatatttttgctaataacaacatgcatatacaaattgtgataaaatagtaaattaggaaaaaagaatggttatcatgcaaagatatgtaaatagaaggaggatttaaggtatgttagcaaaagacattggtatcgatttaggtacagctaacgtcttaattcacgttaaaggcaaaggaattgtgttaaatgaaccgtctgttgtggcgattgataaaaatacaaatagagtgctagcagtaggggaagaagcgagacgtatggtaggaagaacgcccagtaatattattgctattcgtcccttaaaagatggtgttatcgctgacttcgaaattacagagtctatgctcaaacactttattaacaaattaaatgtaaaaggttttttatccaagccgcgcattttaatttgttgtccaacaaatattacctctgttgaacaaaaagcaattcgcgaagctgctgaaaagagcggtggaaaaaccatttatttggaagaagaaccaaaagtcgcggctattggcgctggaatggatatttttcagccgagcggaaatatggtcgtagatattggtggaggtacaaccgatgtggccgtcctttcaatgggcgatatcgtaacagcagcttctattaagatggctggtgatcgttttgatgccgaaattttgcagtacattaagcaaaaatataagctcttaattggagagcgtacagcagaagaaattaaagtgaaaattggtacggtgtttcctaaagctcgtaatgaagagctggacattcgagggcgagacatggtttcaggcctacctcgtacggttactgtttattctgaagaagtagaggaggcacttagagagtctgtcagcgtcattgtacaagcttcgaaaagtgtattagagcgtacacctcccgaactttctgccgatattatagacagaggcgttattttaactggcggtggagcattgcttcacggtatggatcagctgttagcggaagaattaaaggtgcctgtgctaattgcagaaaatccaatgggttgtgtagctgttggaacaggtattatgctcgataatattgataaattatctcgtcgcaatattgtttaaataaatgaagactcctctattggctcgtttcatacagaggagtctcttcttttatctattatactctgtgagctggctataacgaacaacgtttacttgtaaggaggatgaagtatgtttaaagggttttacacggcagcagcgggtatgctgtctcaacagcgtcaaactgacttattaacgaataacatagcaaatgctaatacgccaggatttaaagcagatcaaggtacgttaaaggcatttcctgatatgtttctgcagcgaatggaatctgaagatttacctactgaccgtagcatctctgttcagaacaaaaaagacataggtgcgattaatacgggcgtgtatatgcaagaaacagttccaaattttacacaaggtgattttcagcaaacgtctcaatcaactgatattgcattgatggagcaaaatatgcctacaaaagagggcggactattttttgtggtacaaagccctgataataagcctcaatatacaagaaacagtaattttacattagatcaggaagggtttttaactacgtctaccggagcttatgtattaaatacaaataataaaccaattcaactaaaaagtgaaaaatttacagttgattcacaaggtaacgtaacggaaaataatcagcaggttgcacaagtcgatattgcttatgttagtgacttacaaacgattaaaaaggcagggaatggattgtatgaaacgctgaacaatcagcccttgccttcagcaaggaataatccaggcatttcttatcaggtaaagcaaggatttgttgaacgttctaatgtagatgctgctcaaagtatgactgatttactaacggcttacagagcttttgaggcaaatcaaaaaataatgcaagcttacgatagaagcatggataaagcggcaaatgaaattgggcgtgtgcgctaaaagcaacaggggagatgagaaggatgaaccgtacaatgataacagcggctaatacgatgggacagctgcagctgcagcttgatgtcattggtcataatctatctaatacaaatacgacagggtataaagcgagagatgcttcatttaatgatatgctgtatcaacaagtaaacaatcaagaagataagggaacagaaaagcggcttacgccagctggaattcggcaaggcacaggcgcttatttaggtcaaacgagcttgaatatgacgcagggtgcttttcagaatacagataaactattagatgtagctgcatcaaatccaaacgtttattttcaagttgccgtaaacgattcccaacagcctgtacaatatacgcgagatggttcttttcatcttagccctgaaggtccgaacaatgttaaattagtaaacggttctggtcaggatgtgctcggggaaaatggtcaagctattattttcagtaacgcgttcaaagatatacaaattgatggaagtggaacgataacggttactacgaataccggcgttgaccagtttacacttggattaacaaatgtccaaaagccgcaggtgctagaagctaaaggagaaaatctatttgcctttccagcagggatgaaccaaccgaatatgtttacagatttgactggaaaagcccgagaaacagcaggcgtggagcaagggaaattggaacagtcaaatgtagatttgagcaaagaactcactgatatgtccattgctcaacgtgcgtatcaatttaattcccgctctatttcaattgcagatcaaatgatgggcttggttaatggaattagagcttaagcaagtagttgcttctcaaatgagcattctgtatattgataatagtaccgtatgttacatgcggtttgaaaggagacttatttatgcttgatattgaacaaattaaagaaattattccacaccgatatccatttttattggtcgatcgtattttagaagtggaagagggaaaaaaagcagttggtttaaaaaacgtatctgccaatgaagaattttttaacgggcatttccctgactatcctgtgatgccaggggttttaattgtagaagctttggctcaggtaggagcagtagctatgctaaaaaaagaagaaaatcaaggacgtttagcattttttgcaggcattgacaactgccgttttaaaaagcaagtaagacctggtgatcaactgcgtttagaggttgaaattgtacgtgcgcgtggatctattggcaaaggaaaaggtatcgcaactgtagatggagagttagtctgcgaaacagatattatgtttgctttaggcgataaaaaagaatagtacacaagagctgctgatgcagcttttttattggcgctgcaaagcagaaaaaagcttctttaataaaggtataatatccgttagcaactctttttgaagtgttggtgacagagatgaaaattgtaagagcacatgtttcaataagggctgtttatctatgagggttaaaatggtctcgtcgtgtgaatccgattcacattttcttgttaagtaaagaagttggaagtcatgtaaatgatcttgtttataagaggaaggctcaataagttggtccagcgtaatttgaaaacaattacatagagatagaaaatcaaaaatggaaggcgtttgtttcgaacattcccattttgaaatagttgtacgagaaacattcaactgatttgctaattcttcttgtgaaaatcctccttttagtctgaaatgtttaattctttctccaaaatccttcatatgcatcacctgatttcgtaaagataagtatatgtcttattgttcgaatgtagttcatgttctttgtaacatgctgaattcgcacaatatgaaacatatacactttaccttctgcaataaagggaataaaacctgtttttatttcttttttttctctaaaaagattcatttttcttcatggatataaaaaaaagaacaaaaatagaggtttttatagtaaaaaaatcctattttttgttcggcatattgaaaaaaatggttgaataaaggggaaaaatgcattaatatacgaattacaaagaaaaaggagtgaaaaaatgacaaatttttatttgaaaaggcaaggcgctcgcataagagataatcgcttcaaacgttctagttgtgctcatttatttttaggaaaaaaagaaaggtacctctccaatgagttctcttttctttacccttctcatggaccaacgaaaaagaccgcaaacaataatcctctcttttaaatccagacaccttgagatgacttgacttattttttagatgtactactttttatcggtctgtttcgaagctgcagtttgaactgttgaagtaaatcttgacctgataacccttggttaattaaatcctctaagagcatttcagcataatgaagtctccgttcttttaaaacacctttcatcaacaaactaatacgattttcaccaattgaagtaatggaagccacggtagctataaaggtagccggatcatttgtttctttcgtaattttagcttctaccgtcatttttcgtttatctttcaacaaaacatgaaattcatcgtaccatttcttatcgataactgcttctaaaatccagttattttcgccgtcttctttattaataataaggccattagttagtgagacagactgacgcttttcttgatcatcaaccaattgaaatgacacaagtttaaatgttttcattgatgtttcctcctttatgtaaatagtaggttatccatattataacatgaatgagcttaaagattcccattattcaatcagttggagtggtagactatgattaaccatattgttcttgtaggaagactgacaaaaaaacctgagcttcgatatacccatgaagggattgcagtatctactattactttagcaattaatcgaacgtttcgaaatgttgaaggtgaatatgatgctgattttgtcaacattactctgtggagaaaaaatgcagaaaatacggctgcttactgtgataaaggagcggttgtaggtgtggtagggcgtgtacaaacgcgcacatttgaaaataatcttcagcaacgagtatatatgaccgacgttgtggctgatgctgttaagtttttaagtggaaacccatccggttcttcttcatttgattcaaatcagcaagaagaataacgttatctagtatgaaagggggtgattagttcagctaagattctaagtccccttatctatcgtaatagaagatagatcctctttaagagcaaggctctttctatattctcaagagagaaaattaaagtatttactatccccgaactattcctctatttcagccgttaaatcatttaacggtttttttctgtatataagagattaagaagtaactgaatcaatgcaatctaaagacaaacaaatgggatgagctagtatagatcacttgttacaccactgttgatttccgtgcaaggcttcgctttctgcggacggccgatgagcctcctcgtcacttgggcgcggtctcatctattctgcttttctcgcaggagtcttcgctttgccctccactcaacagctagaagcacctacatatatgaagcctacaatgaaaagatccgaacaagtttgattctccatcaagaatcaaactcgttcggatcttccttcaactaacatacttttgtttcagcttctatcaattatttagatatttagaaaatctttttgcacctaagtagcgcttgctccagtagctgttatctaagcttgcaatggttacacccgtagaggatccagcatgaataaattgacgattaccaaggtaaatgcccatatgtgtaggaccgctagaatatgtattaaaaaacactaagtctccaggctgtggattactgacgggtgttgatacactccaataaccagccgtcgtatagcgcgttgtagaaatttgttgtttcgttacgtaataaatgaatccgctgcagtcaaaaccagaaggagttgtaccaccccatctgtaaggaacacctatataacgttttgcatctgaaatcatttgcgatacatttaatgttccgttagaagttgaaggtgtggatgtacttggttttgttgtcggcgtagttgtttggctgctttttgatacctttaattgttgatttacataaatcgtattagacgttaatccgtttatttgttttagctcactgacgctcgtgtgaaatgtcgaagctattttagataagctatctccacgctgaactttgtaagatccatttgcatccttagaaggagtttctgctggtttattcgtagttggagtcgatgcgctattgcttccatttacttttaacgtttggttaatataaataatgttagaagaaagagcgttcaaacgttttaattcttctacgctcatattaaaacgagtagcaactttccaaagggtatcgccgctttgaactttataggttgaaccagtagcaggagctgaaggcttttcttccttattagatggttgagaggttgaagcagaaggaatcgataacgtttgtcctacacgaattgtatttgaagataacttatttacgctttttaaagcttctaccgttgtatggtatttgatagataatgaccaaagtgtatctccagctttcacttgaacagttgaagcagatgcttcagctgaagcttgatataaaaatgtcccgccaacaatggcgcctagagataaagcgagctgcctttttttcattaataaatccccctaattatgtaaatgtttcgtgtttatttttccaatatgtctattaaattacaaaaatattatatgtataaatatgctagaatttaaagagaaagtaaagggtctttttcgctataaaaatacctttttattcaaaaatcgctatttattgcgctttttgtatctttatcagtagctagagaatgatttacacttatttttttgtgtcgaatgatctaataaaaaaagaggacaagtaaaaaagtcctctttttagtaacgttgtaacacactttataatttttcttattcatttctgtacgcaagaagctcttgtagttctttattagaaagttctgttacccattgatctccttggatgagttcattgtttagatgttgtttttgattgatcacttcatcaattttttcttcaatcgttcctcttgtaataaacttatgaacatgaacaaatttattttgcccaattcgatgggcgcgatcggttgcttggttttcaacggctgggttccaccatcggtcaaaatgaataacgtgatttgcagctgttaaattcaatccagttccacctgcgcgaagagaaaggataaagatggcttttttccttgcttgaaattgagcaaccattgcatctctttgttcttttgacaaacttccgtgaaggaataaaaccggctcgttgatttctttttctaaggttctttgcagcatgagtcctgtttcaatatactgagtaaagattaaacagctttcttgctgtgtgcgaatgctctctacgagttcaataattttttcacttttatgagatcgccgtaccgtttgtttagctgcactttcctttaagtacaaagctggatgattgcataataattttagcttatttagtgtttgcaaaatcatgccttttcgttcaaatcctgttttttcctctgtttcttgaagcattccttgaactagctcctggtaaagtgaagcttgttccgctgtcagcgggatatattctttttgttcttgtttatcaggcagtgagcgggcgatgtttttatcttgttttgttcttctcaataagaaaggctgaatgagtgctttaagctcaacagttcgttcaggtttctcgcctttttcaatgcctgctacaaatcggtttttaaatgaattgattgttcctaagtaaccaggattgatgaattcaaataatgaccatagttccagcagacggttttcaattggagttccagtaagcgcaattttgtgtcttccttgcagctgacggatggctctcgcctgtttagtctgctggtttttaacatgttgtgcttcgtctaaggtaatgctgttccacataaaccctttcaacaattcgacatccaaaagagcaacttgataagtcgtgatcacaacgtcaatactttcacatatcttctcaaatgcgtatccgttggttcttttcggcccgtaatgaacatgaacacgaagagaaggggcaaatttctgtaattctttttcccagtttccaattaaagaagttgggcaaacgataagagaaggagagctatgtaacggatgaatatttgttaaataactaattaattgaatggttttacctagccccatgtcatctgctagacatcctcctaagttaaactttctcaaaaacatgagccaattcaaaccttgctgctgataaggtcttaatgcacctttaaattcagagggaggcagcacttccggcagctgttctaaatccgttaaggatgtaataaatgattgaaaggaagcggggagttggaactcaacttttacctcttcttcatcggttttactgtctgccatgtaggttagcttcgtttttaaaatttcataaattgagacgccttttttactagcttctttaacaattttctgcgcttgtttaattaatctagaatccagttgaatccactgtccgttaatagataataatcggcgtttttgttcgactaatttccgaaactcttcttgtgagaaagtttgatcgccaatagaaaatgaccagcggaagctgctgatagcttgcttaccaaacaatgcagatgaagtattttctatagcgccagatactttgatggtggctttttttaatgattcccaccagcttggcaaatggatagagacaccttgtttaatcaatgctgcactatcttgagttagaaattcccatacttcctcatctgttaggacagactgaataaacgctcctttttggtataaagtaggagccaatgctttccatcgttcgtgttcgtaagcgatatatgattcgtagtggttccactctttaggaagcgttcttcccagtataaaaggttctttggattcatcgtggggaatcacgaatgtttcagccgtccatacatatccatcggtcgttggctctacaatacgcaatgaaaggtcaaagggaggattatagctctcgccttctatgcttattaaaaagtcctttccttctttttttaataggctctctttaatttgtgctcgccactcttgctcatcagcttgtgaaagcgatccagtcatttgttttttaaaaggaagagaatgaaatttcccttggataatcctctttgtcatatcgactgcaatttgctgataagcttccgctgaagcggacaaagccggtttcaacacatgctgttgaataggtaattgtatgaaagtgaacatttgccatgcagaaagaagaattcctttttttccattaatctcaacctgtgtagcttcgcttccgtaataggtctgttcatgccatagaaacagcgcatctttccatgtatcagggagcaaaatttggccgctaggtgatacacagtagagaaaaaagtcaccgtgtacaggttcgacttcaagtgttaaatgaaacaaatcaaacattcagtaaatctcctttttctaatagttgttgaaacgcgcgctgtttcttcgtttttatcactaattcttccatataatgttcccatagtagagagcgattcatttgtagataaagtctctttaattcttgtaagtagatataggcttcttgataactgcttttctttttttcataaatcagctttgaaatcatttgatgataaagaggaataaccagcttttcatctttttgttttaaggtttctatcgtttgctcgtcatatttgatgctgtcatattgaagaagcacctgtaattcaacccactttttcaattggtcagaagcatatagaaaatcactgtattcaataaaactatagggaagtaatgtttgtaatgcttcagtatacaaagtttgatcgttcgttaagtctttatagtgctgaaataaatttacaatcatggagaccatgtttcggcttccttgataagtagtcggaacggtgcgtacgtaatctcctatataggccattatataagagccccactgagcaaagcggtcagtttctttttcgtgcaataaatcatttaaccaaggaataaaatagggaaccatttgtagtgtttcatcgctcaaacgttcttttgcttcgccatctttttcttgaaggaataaaagataggaaagagctgtattgtttataaaagaaccgtgcttggcttttaattcgctttcctcagtttttcgccacttttctaacgtgaagactttttgccaaataacgcgataaatctcaatacgttcgtattgtaaaggcatatctttatgcaataattctcggatgtatggaatgctgtcctctataatagataatgcatctccatcgtatttcgtttgctttaatgaatcagcggtagcataaatttcatttgttattttgtagacgtgactatatacaaatgattcctcgatgttagtagaaagctgatgtgcctgtaattgagctgatagtttatagaatgtatggaccgctccatacatacaaaataaagcataaagcaatgggtgctcaggagcctttttcactaaagcacggtaatagtactggtaatattcgtgataaatggaacggtcattttcgttccgcccctgcataaaaagcgtatactgctcctcaaaagtttgtctccactcttgaaaagttgccttcggcttttttaacacttgtttggcagatagcatagtcaaagctgctttttcatggtttcgccattctttgaataggggcgcaatcggttctattaatgaatacatataaaaaaacgctgcaaagcagtgttgacaaaatccgttatgctgacaagaacaggtactttcagggagcagctgcttgtttagttcaacataaaacgaatcgactttaacatttaatatctgttcatcattttgcaaaatgaagaatgaatgggtacggtaaaggtctaatcctgcttgggcattcgtacgatagcgtgcatcactgtacgggaaatgatgtataaattggtgctgtaagtgatctgaaaacgaactcataatcccattcctttctatatataagcggagcataaaattatatttataagtgattaattttcttttcattataaatgataaaaatagaattatacaaaatcttttgttatgataaagcagaatccaacatgactctttataaaaagaaatggactcaacatgactttgtgtacatactcaatcgcagacttactatactataaccaataagcacgattgacattgacaggaggaaaagtaagtgaaaattcgtaaagctattattccagcagctggattagggacacgctttttgccggctacaaaagcacagcctaaagaaatgctgccaattgtagataaaccaacgattcaatacattgtggaagaagcagtagcatcaggtattgaagatattttaattgtaagcggtcgcggaaaacgagcaatcgaagaccattttgataaatcatatgagttagaagaaacattagccgcaaaggaaaagtgggacatgctcgaagaagtgcaggggatttcgaatttggctaatgttcactacattcgtcaaaaggaacctaaaggattaggtcatgctattcactgtgcaagaagttttatcggagatgaaccttttgctgttatgctaggcgatgatgtagttcaatcagaaaccccttgtttgaaacagttaatggacgtatacgaaaaatatgaatgcgctgtagttggtgtacaggaggtgcctaggaaagaaacttcaaagtacggaattgtaggtcctaaaggagagcctcttgaaaaagggttattagacgtagaaacgctcgttgaaaaaccgaatccagaagaggccccttcgggctatgcaattatggggcgctatattttaacaccggaaatttttgatatcttaagcagagaagagattggcgcaggaggagaaattcaattaacagatgctattttacgtctgaatgaattccaacgtgttcttgcttattattttgaaggaaaacgttatgatgttggagataaatttggattcattaaagcaacaattgatttagctctgcaaagagaaccgctgcgagaagagttagtgaactatttcagagaaattgtcgaaaaagaagggcatatgtaaaatatatttactaggggaactattgggaatcaaggagattttcaatagttcttttgggttagagctcgttgtacaaaagatggttatatcgtttattgatgaattctcataaaatgttacataataataagtaaaagaaattatttcatgtttttatataaatgctatcatgaaatgacatttttcgatataatatcagataggttttatttattaagcatgtcatataaaggagattttctgcaatgacaaagaaattgtgtgtagttggtttaggatatataggtttaccgacagctgttatgtttgccaatcacggcttatatgtacatggtgtcgacgtaaatgaaaaagcagtagaattaattaaaaataagcaacttcatatagaagaaaacggcttacaagaacgtttagaatcagcagttgacaacggacacttcacggtaggcacaacagctgaagaagcggatatttttattattgctgtaccatcaccaattaatgaagataaaacggcaaacttgaactatgttcgagaagcgacaaaatcgattgttccttacgttcgtaaaggaaatttagtaattttagaatccacagttcctccgcgtacagtagaagacgttatgctacctgtgctaaaagaaactggtttagaattaggcagtgatttatttgtttctcattcacctgaacgcgttattccaggaaaagtatttgaggaactagtaaataatgaccgtattgtcggtggtattaacgaagaatctagtcgtttgactgttgagctttataaaacatttgtaaaaggaaatattcacgtaacggatgctacaacagctgaaatggtgaaagtaatcgaaaacacatatcgtgatgtgaacattgcgtttgcaaatgagctggcaaaaatcagtgaaaaaattggtgtaaatgcgtgggaagcgattaagttagcgaactatcatccacgtgtaaacattcatttaccaggtcctggtgtaggcggccactgtattgctgttgacccttggttcttaacggagcttcagccagaactggcaaaaattatttctctttctcgtcatacaaatgattcaatgcctgaatatacagcattgaaaacgaaaagcctactagatgaaaagggcattcaacatggacgtgtagctgttttaggtttagcttttaaaggaaatattgacgatatgcgtgaaagtccatcaacagatgtacttcatcatttagaaaagctgggcgttgattacacagcatttgatcctcatatcaaagagaataaaatcgaacgtcagacgcaaagtttggatgaagctgttgcacatgcggatgtgattcttattttaacagatcataatgagttcaaagagcttcttccatcagctgttgaaaatcacatgcgtacaaaagttatttttgatacgaaaaactgcattcagcgtgatcaatggaaagcagcaggctttgatgtagtgttacttggtgattcaaaagtttctactttataaaaagacgggctgaacagcctgtctttcgtttgtaaaaaactaaaaaatcaacatacgggtgatttaatgaaggaaaacatcttaggaatagacgtttgtagcgacacgtacgatgagctagcggtaaagttacttcaggatatagataaaggccgaaaatcatttattgtagcaatcaaccctgaaaaaattatgaaagcacaagaagacagggaattaaagtcactattaaatcaagcgacttatcaaattccagatggaatcggtgtgattttagcttcaaagctcaaaaagggacgtattcgtgagcgtgtaacgggtattgatatgatgctaaagctgtgtaaagaagcaaagaataacggtaaaagaatttttttatacggagccaagcctggaattgcagatgaagccaaagctaagttggaagagatgtttccagggattttaattgttggaacattaaatggctacgaaaaaaatgaagaagtcattgaacgtacgattaatgattcaggagcagaaattatttttgtggctttaggcagtccagcccaagaaaattggattattgctcataaagagaaacttaacccttctgtttatcaaggcgtagggggctcgttcgatgttatttcaggacgattgaaccgagcacctgctgtttttcaaaagtttggtttagagtggctttatcgactgttaaaagaaccatggagatggaagcgtcagttagaattacctaggtttcttctccgagtgttaagaggttaaaaaagcatgcggattacatccgcatgctttttatttttagatatcttctttcttgttttgttgcttgatttcatccgttagttcgtgcaagctttgtcgcacatttccttttccagaaaagttttcaatcaattccttcacatctatacctgaggatgctttcagcgattcttgaagagaagacattaagtttgttgcatagccagtcactttattagctccgctgttttcaccgttgcttcctgtatccacaaccgtaattttgtcgatatttgctaaaggacttgcaacttgttttgcatattcaggaagcatcttgataatcatatctaaaatagccgcttgaccgaactgctcgaatgcttcagctactttttgtttagcttctgcttcagctaaaccttttaagcggataatctcagcttcagattcaccttgggcacgctgagcttcagcctttgctaaaccatcaattcgaacgcgttcagcttcagctttagccattgcttcaattcgatatttgttggcgtctgcttcagcaagctgttttgctttttcagcttctgcggattgctcaacagagtaacgatctgcatctgctttcttctttacttcagaatcgtattgacgttcacgacgaagaatttctttttcttctaattcaatttgtttctgacgttcaataatgcggatttgcatttcttgttctgttacatcttgttttgcgcgagctgtttctagatcatatgcttggtcagcacgagctttggcaatatcttgttcgcgacgatattcagcggtttttaactgattcatcttttcagcttccgcgatttctgtatttcgctcaagctccgctttttgggcatctttatgagcctcagcacgcttgattcttgtttctttttcagcttcagctgttgcaatgtcagcatctcgcttcacttgagcaatacgaggtttccctagagattctagatagccgttcttatcccgaacgtctttaattgtaaacgatacaataattaaccccattttagccagatcttgtgaagctacgcgctgtacttcttgagagaatttttcacggtttttataaatttcttctaccgtcatagaaccaagaatcgagcgaaggtgaccttctaagacttctctagcttcggtttcacgatcttcttttgctttgcctaaaaactgctcagcagccgttgcaatttctgaaatagaacctccaattttaatgattgatactccatcagccataacaggaacaccttgttctgtatatacttcaggtgtagatacttccagtttgcttgacagcaagctcagaggctcagcctgctgaaaaactggcagcacaaacgtaccgccgccgcgaacaattttaatgcggtttccggattcatcgatgtgcacgtttttatttcccagatagcttcctgttacaattaacgcttcgtctggacctgcggtacggtattttgtaataaatacggcaatcagcgcaattaataaaaaaacaacaattccaacgacaactaatataggtgttgaaaacataaaactccccctaatactatttataatgagtgattggtcataacttcttcataaatcacaacgagtgcgttgcctctttgtatatctacaacaagcactttgctgcctaaaggtatagcagtgtttttaaagctggcagcgggtttggagatagtgccgctaaccccttcgataaatacttctccataaccatcagcaggaacggaagtaataatggtaccaagtcttccttttaacgaatcttcagtaaaagcaagagactcttcagccgatgataaaggaatcaatacaaaaacgttgagcaaaataacgagtagaagggcaataagagcggaaatcgaaataatccaataattttgcaatgacgtataggtgaacaaatatccactggcactaaagaatgttaaaaaagaaaaaagaagagtggggttaaaaaaaggtatcgcttcagatattccatctaataaatcgctaaataaaatgtataagaaggtgagacttccgcagataattaatccatacaaatacactgtttgaacagatagaccgaacatagttcattcaacaccccctttatgtaagatgattgatgctttttctactatgtattacgaaccgcatcgaaaaaagtttcatttttttgataaaattcctttttttgtttaattttatccgtatccatttcactatattttaacttttaactgatataagataaggacaacgattcagtgaatgtggtttgaagtagtggacatgcataggtcaaaagtttgttcatataatgagtggggccatgtgaaataaaaataaaggtttaaatatgcttaataaaaaggaaaaagagttagagatgacgaataaattagacgaaaaggggggagttcgcttatattttaataaagtatagtaaagaaaatattctacataaaataaccacataagaataaagtaaatcagctgtttatacaccaaaaaatacagttcttttctattgatagtttgtaaatgtactaatttttgagaataaatttctatttaagtagtagaatcattgtgatataatccattttgggaataagtaagtaattattgttatacacaatttgaaatactatccaattatataaagttggatacattttttatggttttggttaacataaacctgaggagggtctccatgctatatttgaccttgtttatttgttttattacatctattctgatcactccgctggttaaaaagctggcgtttaaaataggtgcaacggataaaccaaatcaacgaaaagttcatcaaaaaattatgcctcgccttggaggtttggcaatattttttagttttcttattggctacctcgttttacagcctgacagtaaatatgcgctgccaatcttaattggaagcatcattatcatcattaccggtgtattagacgatatgattgagctatccgctaaaatcaaattaggcggtcagctagtagcgacattgattgtggttgtgtacggtggagtccaaattgactttatcaacttgccatttgacggaagattagaattcggaatgttaagtattccaattacggtattatggattgtaggaattaccaatgctattaatttaattgatggattggatggattagctgctggcgtttcctcgatcgtattgattaccatttcgggtatggctattatgatgggaaatgtgtttgtgacaagcatgggtttcattgtattaggaagtacgctcggatttttgttttataactttcatcccgctaagattttcatgggtgatactggtgcactatttttgggctatatgatttctgtattgtctctgttaggatttaaaaatgtagcagtcatttccttcattgttccagttatcattttaggggtgccaatttcagatacattctttgctattattcgccgaatcgtaaaaaatcaaccgctatcggctcctgataaatctcatttgcatcattgtttgttgcgcttaggatacagccatagacaaacggttttaattatttatggaatgagtgcgatatttggtttagcggcggttatcttctcaaaggtacaaacaatgtggggttcttttcttgtactagctatcctccttgtagcgattgaaattatcgttgaaaagatagggctagttgataagacatacaggccaatcctcaatatggttcgtgggctacgtttaaaaaattaataaaaaatacctcttggatatccaagaggtatttttttattcttctgttgtatctgaagttgatttaatgtctaagtgcttgcggagtttttcacttactttttccactgaatcattgtctagtttgaagtagtaaacgccgttaattttttcatcgctgccgtctaagttaatggtttcaatgtctacttttttcgaagcataatcataaaacgaaagcatttcaccgaacattaaattcgttttcatattatcgccaacagcttcgataagatttccatatttatttagtgatccaatggaagcagcttttttaatcatggcttcaatcaactgctgttgtctttttcctcgctcaatatcgttgtcttgctttcgtgttcgagcaacagctaacgcttcttcaccatttaaatgttgatttcctggttttaagacaatagcattatgacgatcttttgagtccttttcactcatcgcataaggtacatcaaaatcgattcccccaagtgagtctacaatgtctgtgaaagctttaaaattcactttaacatagtaatcaacagggacattaaacagctgttctaccgtttctacagttgcttttggacctccgtaagcatgcgcatgagtaattttatcttttttgttcacctcaggtatataaaccctcgaatctcgaggtatgcttacaagctttacggttttattggtttcgttaaaggtcgccaaaattaaagcatccgtacgggctgattttccgaatttcctggtttcgctatcatctacgcccataaataaaatggatatatcatcttttttggggtcgattttacgatcacgcataggagaattatcgcgatctccgagtccttcataagaatcagaagctactgttttagctttaacaaataaataagagccataagcggttgcagaaagccctaaaataaggataggtaacagaaaaaatgtaaaaagccttcgttttcttttccgtttgtttactcttttttgaaaacgtctatattgagccatacggtttctccttttattcgtatattcgaacacttattgtgacacttagtatgtgttataaattggaatgtatgaatcaagctcgtcaaagctatgcatctgtacgaggttttttactcattgacaagtagcgcaaccatcagaatagttgcgctatttatcaattgtacaatgttttttaataagagtaaataattcattctacatcttcttctaaataggtcgtctcaccttctcgaatatctgcttggccgtttgttagctcggtcatccattcagtaaatgcttctgtttgagcttcctctacaaatgtttcaatctctaccatatctgcgtagtggatttcttttaatagataaacggaactgcgaagctcattttctaattttccaagccatgtatagtcgacggttgtatgcataaccgccatgagagttcgtttgactgtacctagttcatttaacgcttcggaaacagatttgccatatgcgcgcaccaagccacctgcgcccaatttaatgcctccgaaatagcgcgtaacgacgaccaccgtatcttttaagcctctttttttgagcacttctaacattggtacgcctgctgttccacttggttctccatcatcgtttgctttttgaaactgatctctttctccaattaggtaagctgaacagttatgagtagcattccagtgccgttttttaatgtcttggataaattgctgagcttcttcctcagttgttacacgtttcatatgacaaatgaatctagatttttgaatagtgatttcatgtgaaccttctttttttacggtataatattgtgataacaatcaaaaaatcctccttcgcgttataaatagaagaaaaacgggtatttacgtactgtttacttgctattagtataaaatgtttatgaaaagacatcaattaatcaaattcaacatcacttgaacaagctatacagaatatacgttataataaaagagtgtgcaggcttgtatagctaaataatgaaatgatttaaacaggcagttagtcactgttgaagagtgagcgtaaatggtaatctattcaaataacgcgagtcaagcgtcgattgatgtcgagtttgagggtactaaaaacaaccgttactttttggatataaaaagtcagatagggagaaaatatggatcttatcctcacaattcagataggtcatacgaatactatatatagcatgaacgtatagacatttctccgaatgtgagtatagtttggggtgagtaaatgtcgaaacataaattaacaagcaaggcacttgatgaaattttcgagaagattattggcacagtgggagatagtaaaaatgaagtctatcgcctttctgaagatgccagacaagaatatcagcaaattaaagaagagttagaagtgttaaaaggaaaagttcttgagacgatagagcaaggcgataaattggaaactcaggcaagattggctcgaaagcgtttgtctgatgtgagccgacattttcaaatttattcagagcctgaagtaaaagacgcttatgaaaaagcacacgaattacaaaccaagctgctgatgaatcagcaaagcgaatatcagctgcgtaatcgtcgagatgaactagaaagacgcttgcttacattggaagaaacgattaaacgtgcagatcatctagtaggtcaaatttccgttgtgttaaattatttaacaagtgatttaaaacaagtaggggaaatagtagaagatgccattcaaaaagagtattttggctttcggattattgaagctcaggaagaggaacggaaacgtttgtcaagagagattcatgacggcccagctcaaatgcttgcaaatgttatgatgagatcggaattaattgaccgaatttaccgggaacgtagtgcaaaagaagcaatggaagaaattcgagatttacgaaaaatggttcgttctgccctatacgaagtgcgccgaattatatatgatttaagaccgatggcacttgacgacttaggtctaattccgacgctgcgtaaatatcttgatacaatcgaagattataacgaaggcaagcctcggattacgtttatttccattggacaagagaagcgaactgcttcaaaattggaagtagcactgtttcgtttagtgcaagaagctgtaacgaacgcattaaaacatgcagacgcgacggaaatccaagtgaagatagagttcaacaatgaacacgctattttgcttgtcaaagatgacggctgcggttttaatcaagaagagaaaaaagagaattcgttcggcttaataggaatgaaagagcgtgttgatttgttagatgggactatttctgttcattcgaaaattaaccaaggcacgcttgttatgattaaagtaccgattatagccgcttaaaaaggcagagatatgtatataaataggggtcaatatagagtaaaacatttgttgttcgatttggggaggaatcaaacatgcagacaagaattatcataatcgacgatcaccaattattccgtgaaggagtaaaaagaattttagatttcgaaaaagattttgaagtagttgcagaaggtgacgacggtagcgaagttattgaccttgtagaagaacatcaacctgatgttgtaatcatggatattaacatgccggctgtaaatggtgtagaggctacgaaaaagcttgtagaagtaaatccggacgctaaagttattatcttatctatccatgatgatgagacatatgtaactcatgccttacaaacaggtgcgagaggctatctgctaaaagaaatggatgcggatgcgttaattgaggcggtgaaagtagttgcagaaggtggttcatatttacaccctaaggtaacgcatagtttagtaaaagagtaccgtcgactagcagctcaaggacaatcgtcttcttatccgcacgaaccaattgagattcgccgtccactacatttgttaacacgtcgtgagtgcgaagtgctacaactgttagctgatggtaaaagtaaccgaggaatcggagaagcattatatattagtgaaaaaaccgttaaaaaccatgtgagtaatattttgcaaaaaatgaatgtaaatgatcgtactcaagctgttgttgtggcaatcaaaaacggttgggtagaagtaagataagttcaaaagtctgatatactaataggtatatcggacttttttttctttttataacttttttttgaaattgtaggtaaaaagtcatgtttaatgagagaggaaaataaccgataagttaagggaagaaaatatcttttaggaaggcaaaggatgatacctttgcgcatttactcattcttcaacttcgcttaagcataaaggaaaccttaaggatcctacaactttcgacgaaagcatccatacctcaaaacaatgtccatcaatttgatgcaagctcttgtaaaggaaagtcttcaatatactcagatacatatgaggtcgtagaagaatttattcaaacctcaactggtatccattaaaaatttaagagttagcttttaatgaaacaaatagaaaactgatttaaagaagacaagaaggtgatgaagctgaattttataacggaagaattaatctatcataaatctccgcaagagctaacagctatggtgtatgaaaaatttattcaaaatattgatgaagctgttatagcaattcaacacaatgattattttatagcgaatgaaaaaattaaacagtgcaacgatattttatatcggttaggaattggcttaacatatcaagcaggtatcattgcagagcagttagataccctatacaactatatgtctgagcgattaattatggctaattttaaaaaagatacgtttattttatgtgaagttcaacaaatgatgaagaagctttctaacgcttggaatgaagtgttaaaagcgacgcctaaagttacctcttcgctccaaaaaacaagctgtcttcttatgaacagcacataagtatcactcttagctaaaggataatcatcatatccacgcatcagatgcctctcgaaacctttcagctaatcaagctagcacatctctaaaagcctaaattgaatggagtgtatactaacaaagaaaggagagatacatagtggaggtacagcgaattaacagtctttcttcttctgtgaatctcattagagaaaaagaagtaagtggttcggtttcatttacaggagtaatggccaagaaacaaaaagaactaacctatgaacatttaactcaagtgataaataaaattgaagaacagggaaagcagttagtgaaaagtcaaactattgattccttgcggaaatacaagattcttgtgaagcagtttatgaatgaagtcgttaaaaatggttttgaactgcatgaagaaagaggatttaatcatagaggaacgactaaagtatataagttagtgaaagaagtggatacgaaactagttgacttgacaaatgatatccttcaaaaagaaaaagacagtttaaatttactcaagcgggtgggagaaattcaaggtttgttaattaatatgtatacgtgagggagcctttactaataggtaaacctctcgttacatgcattttaatcctaaatgttgtagaatagagtgaaattattttatataacaaaggatggatccctatcttatgaaaacagcaattattacagatagcaccgcctatatatcagagggaattcgatcaaactatcatatacatatggtaccgctaagcgttatttttggtgaagaaacatatcgtgaagaaatagatatgactgcagatcaatattttgaaaaaattaaagaagcaaaaaatcttccaaccacttctcagcctgctatcggagaatttgtagagttgtttgaacagttaaaacgagatcaattcgatgctgctatcgttattacgttatctagtggaattagcggaacgtatcagggtgctttgacagcaggtagcatggtagaagactttgatgtgcacgtatttgattcagaaatcagctgtatggttcaaggcttttatgcgattgaaggagccgagatggtccgattaaataaacatcctgacgaaatcattgcgcgttttgaagagatgaaactatcaatgcatgcgtattttatggtagatgatttatctcacttgcagcgtggaggtcgcctaaatgctgctcaggctattatcggaagtctgcttcaagtaaagcccgtgctccattttgaatctaaaaaaattgttccgtttgaaaaaattcgtacgcgtaagcgagcgttaaaacgaattacggagcttcttgatgaggatgcaaaagaaaacgtgcctatgaaagctgtagttattcattctaatcgtgaaaatgaagcaaaagaaattcaacgagacttagaacaagaatatcctcatattgaatggagcctttcttattttggcgctgtcattggcacgcatttaggtgaaggtgctatcggtataggctggtataaaaagtaatcgaaaaccaaatcatttgatttggtttttttgcaggaaaaaacacctttttttgcgtatatagatgtgtacgataaacatggaaaggaatgaagatatgctttttactgttaaacaagaattgctaaatcccgttcaagtacctagcccagctgcttttcctctctcaaaaatcgatacgtggagaactccacctttaaatcctttatacccctactctttagatcttcagcgctctctaagcggaaagcagcttctactaactcagactccctatcctttatctctcattcatgaacattatctaaacggatatatttcctatcaaaaagcacttacccagaaagaaaacagatataaatgcaaccggtgtggaagtgatagccccttttattttgcttcatttccatgcagtagatgtcaccaggagtgctactattgccgagcatgtattgtaatggggaaagtaagtgagtgcacaccctttataaactgggaaggaccagcaagtagtgtcctgccaaaaagcagcgtgatgaattggaaaggaacgctgtctaaagctcaagaacgtgcttcaaatgaactcattcaagctataagaaaggatgaagaactgttaatttgggctgtttgcggagcaggaaaaacggaaattttatttaaaggtattgaatcagcgttgaatagtggaaagaaagtctgtattgctactccaagaacagatgtagttattgagttaaagccaagaattcaatcggcatttccgaatatgtctgtgctggccatgtatggaggcagcgaagaccgttttcatgaatcctctcttattatttccaccactcatcaacttctgcattattatcaagcattcgatgtgctgattattgacgaagtagatgcattcccgtattcgacagagcctatgctgcactatgctgttgcaaaagcagctaaacacgctgcatcaaagatttatttaacagcgactccaaatgaatcattaaaaaaagacgttgagcaagggaaaaaacaagtagttaaaattccagcccgctatcaccgaatgcttattcctgttcctcggtttgaatggtgtggcaattggaagaaaaaaatgaaaacagatatcttgcctgctaatgttgagaaatggctgaaaaaaagaataaatgaagggaaacaatgctttatcttcgtcccgcaaattaagtggattgctccgatcacagacatgattcgaaagctaaccgaaaaggtagacggcgtccatgctgaagattcccagcgaaaagaaaaaataatgaaatttagagaagggcagctagttattttagtaacgacaacaatattagagcgaggcgtaacggttcccaacatagatgttgcagtattgggagcagaagaaacgatttttactgaaagtgctcttgttcagatttcaggaagagtagggaggagtgctcaatttccaacgggagacgtggtcttttttcattatgggcagtctctgtctatgcgaaaagcaaaagagcatattgaatatatgaatgctctagcttataaggaagggctggttgatcgatgacaatatgtctgatttgttttgaacctcttgtctcttctttcgattggaggtcattgttaaaaccttcttcaacggacaggatttgcactgtttgcttgcaaaaatgtcctatcatcaccagtagcatttgcaggggatgcggccgttctcttgcagacctcgcttcttctcattatgagctagacacatgtatggactgtcagaaatgggatgatgcttcttttttcaaccgttctctttatacgtacaatgattttatgcaaagcataatagaacgttttaaatttcaaggagattatgaaattatccaagcattcaaggagcagtggtataagttctataaaaaagaatgtaatccaaaagcgatactagttcctatacctttaacggacgagagattatatgagagagggtttaaccaatctttagcgctagctgaactgatcagtgacaacatagaaatgcctcttgttcgctgttcaggaacaaagcaatcaaagaaaaataggcgaagtcggctggcagaaaggctggaatttaaagtagtcgattcctcaatggttacgaatcaagaatttctcttgattgatgacatttatacaacaggagcaaccgtgcgccaagcggcaaattgtttgcaggaagctggggcacgttcagttcgttcgctcactttaattcgtgcatgaagatgtataatttaagactttgaccgatagtaaaataaaaaacaaatgaggagtttcgaatatgggaacgttagataattgcagggaatgcggtcatttatttgtaaaaagtggatcaataaacatatgtaaatcatgttttgacaaagaagaagctctgtttcaacgtgtttcttcattcttgaagaaaagagcaaatcgtacagcaacgacttacgaagtgatgaaagaaacgggcgtttcagatttgttaattcatcaatttattcgacaaggtcgcttagtgctaactaattttccaaatataagctatccatgcatgcaatgcaacgctcagattcgagaaggtaaactttgtcattcatgctctcaagaaattaaacatgggttagaaaagcataatcgtgagatgattcgttcaaatgaagagccgacgcgtcctacctatcgttctaacgaaaggaaaaaagagtaaaagtgtgctgagtgtttgcaggttctctatctatagacctaggtttaaggaagactgtgaaaatggtctcaacttccttgccgatgctaaaggtttaggtggaaattccgatataatgaatagagataacggatacaaatataaaaagaggtgagagagatgaagattaacccatcgaacttatttggaataaatccgtacaaaaaacaatcagaaaaaacagaacaggtctctaaaaagaatccacaagatcagattcatatttcatctgaggcgaagaaacttcagggaaatgaaccatctccagaaagacttgaaaaattggagaaactaaaacagcaaattaacagcggaacatacgaaattaacggaaaagaaattgctaaaagtattgtagatttctataaaaaataaaaggactgacattgattgaacgtgcaagaaattcaaacgatactagaaaaacaagtaacgcttcacaaaagtttgtctgtcattgttaaagagaaaacgaattttattattaaacaagatgtaaaggcattgacggcttctttgcaaaaagagcaatctcatatagctgctatttctgcactggaaacaaagcgtatagaagcgatggaaaaaagcggacatgctgctcactccattgaagaaatagcaggctcattctctgaatactccatcttgataccctttcaaaaacagctaatagatataattcaagatataaagtatgcaaatgacttaaacaatcagctgctcacacagtctttgcagctgattcataccgaactagaccttcttgttccatcgaaacgagaggattcgtttaattacacaaaaacaaataatagatcgtttcagtccaactctatttttaattcgaaggcataaagaacggaggaaagcagaatgagttcaacatttcatggtttgcaggtggctaaacgaggaatggatgcccaacaagcagctctttacacgattggccataacgtatctaatgcaaatacgccgggctatacgcgtcagcgagtaagtttagaaacgttcccagcttatccagccccagggatgaatcaggctggaactgcgggccaaataggaatgggaatagaagccagcacggtagagcgaatacgtgatacatttttagatacccagtatcgagatgaaaccattaaagtggggtattgggatgcgcgcgctggtgcgcttgaaaaaatggaggaaattatgaatgaacctactgaagatggactttcagctgtttttaatcaattctttgagtccattcaagatgtagcttcacacccttcagaagcaggagccaggtctgttatgattgaacgagctgaagcagtaggcgatactttctcttatttatctacttctttaaaaacggttcaaggtgatttacaaaacgagcgtgacgtagcggtaacacaagtgaattctttgttagagcaaataagtaatgtgaaccaacaaatacaaaacgtagaaccgaatggctatttgcctaatgatttgtatgatgaaagagatcggctgctagatgagatttctaaatttatgccggtttctttagagtatacaaaaagcagcgggaacgcttctgcaacgtcagaaggggtggtaacggttcggcttcaaacgtctcaagggcctattactcttttagatgggaaaactcatcaagtaaatgccatcagtttgacaacaaaccaagattcctatgtgacggaaattcatataggggatgagatacggaaccctgagtcatttcctcaaggaaaacttaaagggttaattgaggcttctggatatatagataatagtggtaataaaacaggtgtttacgcttcaatgattgatgatttagatgaaatggcatatgaatttgtaaattggtttaatgataagcaccaacaaggtgtcacgctagatggtgatactggtatgtccttttttaatgagatttctcagaaagaaggagctgcaactggaattgttattgctgataaaattaaacaaaacacaaataatattgctgctgcttcttcggcctcctctggggatgatggaactggccgcaaaggagatggacaaaatgctcagctattgtctcaatttcgtcaaaaggtgcttattaattccgggaatcaagctgtttccctagatggcttttatcaatctgttattggccaaatgtcagtagatgctcaacaagccaaccgcttaataagtaattcagaaactctccagggagctgtggagcaaaggcgccagtctaccagtgcagtttcattagatgaagagatgaccaatatgattcagtttcagcatgcatataacgctagtgctcgtatggtgactatgattgatgaaatgcttgataaaattgtaaacggtcttggaactggaggaaggtaaagatgcgcgtcacacaaggaatgttagcggctaattcgttaaaacagattagcaatagctataataagctggaaacacttcaaaaccaattatcaacgggaaagaaaattactcgtccttcagatgacccggtagtagctactaaaggaatggcttatcgttctaatctttctgaagtaaatcaatataaacgtaacttaacagaagctcagtcttggtttgatagttcagaatccggacttgaacaagtcaattctattcttcagcgcactaaagagctggtcgtgcaagggttaaacggtacgaatgaaagtgatgatcgccaagcgattgcacgtgaaattgaacagttaaagctggattatatgcaagtaggcaatacgcaggtggccggaaactatatctttaacggtgtaaatgtaggagcaccgcctataagtgagactgcaagcggtatgatagaatcgaatattaacctggattctttttcagttgaagtctcaaaaggtatccagctgagagtcaatattcatcctgaaaacatttttggacaaggtgcattcgacttaatgaacaatgttcaaacagcttttgaacaaaacgatgtaaactcactaaaagatctctctacacaggtagacacgcagctgtctacgctattagcggagcgatctgaattgggagcaagaagcaatcggcttgagctgatcgaaaaccgccttgattcacaggaaattacggctactaagatgctttcaaataatgaagatgcagatattgaaaaagtcattacggatttaaccgtacaagaaagcgttcatcgtgctgctttgggagtaggggctcaaattattcagcctacgctgctagatttcttgcgttaaaaagttccttctaaacagaaggagcttttttacaatgaaaaaagataacaagaaaaaatcaattagcaaaggtgtgatgagatgaaaatttcaacaagctatcatggagatatagaaatagataatcagcaaacactgacattcaatcaagggattccaggttttttggaagaaactgaatttgttattttaccacttccggaagccgaagctttccaagttctgcagtctattcaaaccaaagaattagcttttattatcacggatccatttcagttttttttagattatgattttcaactagaacctcaggaaatcgaaaagcttcaattacaacaagcggaagatgcagctgtttacgtattgcttacgatgtcagattctgtggaaaagataacagctaatttgcaggctcctgttattattaatacaaagcaacagcttgctaagcaagtgattttaatgaatacagcctacgaaacgaagcacaggttatttgagtaagaggaatagataaggagtgagtccatgcttgttttaacacgaaagttaaatgaaacaatcaaaataggtgatgaaattgaagtgaccgtccttgcagttaatggtgatcaagtaaagttaggaattcaagctccaaagtctgtagatattcatagacaagagatttatgaagaaatacgtaacgaaaataaaagtgcttctcaaattacattacatgctattgatatgctgaaacaattaccgaaaaagaaataaaacgatcagtttaaaaatcatcaaaaatatacggtataaataatatctaaatcgggaaagataaacatatagtattccccactatgtcttaagcctttctcttcaagagaaaggcttcttttttatcaaaaaaattgaactgaatttctgtttttttcctgtttatcgtgtattattaaatttattaagtataattcaaatgaatttaacaaaagaggagaagagtaaatgagtgatgttcaagagtatcatgatttattaaaagaagcagaagatgtggttgtcagcgctttagctgatacgatggatttatatggggtcacaccttcagtaggaaggctgtatggcatgctttattttatggatgagcctgttacattagatcaaatgagtgaagaattgggtatgagtaaaccaacgatgagtacatccattcgttcactgcaaaatattgatatggtccacaaagtgtggaaaaaaggtgttcgaaaagacttatatgaagcagaaaaagatttttctaagtcctttttttcatttttctgtaagaagtggcaaagagaaatttcagttaatttagaggcaatcgaagaagcggaaaacaagctgcagattctcttaaatgatgaagatgttcctgaggagatcgcagtaaaagcaaagcgtaatttagcgcagattatagagtccaaacattattatcatttcttgaaaaaagtagtgaaagtttttgacgaccgaagaatcatcgatattttaaatgaagaattagcgaaaaagtaaataaaaaaagctgttgaaaaatcaacagcctttttatcatttttatacggttaatggtgtagcttcaaaacagcggttataaatccattcgtaactttttacagttaaatcacgagggttaccaactgtttgtggatcattaaatgcttcttgagctaagcgagaaaccgcttcttttggaacaccttgttcttctaaagaaggaatttgtacatctttaactagttgatatacttcacgaacagctgcttgagctgattcttcaagagttaattcgtgtgtattaactcctaaagcttgagctatgcgtgcaaatttttcaggctcacccatccagttatattccattacaggacctagcattgctgctacgcaagggccatgggcaattggataaatgcctcctaatgtttgagccatcgcgtgagctgctcctgcagattcacttccatatgaaaggccggcaagcatagctgcatgcgccattccataacgtgcttcgatatcctgtccatttgccactgcgcgtcgcaagtatttgccgacgtattcgatagccaataaagcaactgagtctgtcatcggctgtgcaaaatgacatgtataacattcaattgcgtgagctaatgcgtcaattcctgtaccggccgtaatatgtgaaggcatagatacgtgcagttctggatcaataattgttaagtgggcagcaattaaaggtccacctgtattaaacttaaactcacgaacaggatccgtaatgacagcccattgtgtgacttcacttcctgtgcccgcagttgtaggaatggttgttaaaggagggatacgttttgttaaaggtttttttccttcagctgcttcataatctaagacgggagcattatgagctacttctacaccaatagcttttgccgtatccattgagcttccgcctccaacagctactagtccgttgcatccattttctttgtacatttttgtgccgtctgctaccacgtgaatagaagggttggcttctacttggtcaaatagaataacatctacgtccgcttcttttaaactagcgattacaggatctgctaaacctactttttttacaccaggatctgttactagtaaaaccttagatacacctaggttttttacttcctctccagtatgcttaacagcaccaattccatgttttacaaccgttggcatctcaaaactttttaaacgttccattctttcaaatcgcataaacatctttacattcccccttgaattttattgaaaccagcgcattggctgtggatttgtattcgtataaatatgtttaatttccgtatattcttctagcccaatgtggctaagctctcttccaatcccagattgcttatatcctccccaaggagcctgcgggaagtagggatgataatcgttaatccaagttgttcccatacggagtgctttcactacacgttcagctcgattcatatcacttgtccaaacggctccagctaatccatagattgtatcgttagcaagtgccaccgcttcttcttcggtactgaagcgctcaatggtcataattggaccaaatgactcttcttggacaactttcatatctccatgacagtctgtaaaaatagttggttcaatgaataaacctttttgtaaagactcttgagttggacgtttgcctcctaaaacaagggaagcaccttcttgtttgccaagctcaatgtaatgttccactttagctaggtgttcttttgagatgacgggtcccatttgagtggcttcatccatgccgtctcctagcttaatttttttggcttgttcaataacttctgaaacaaatttatcgtgaatatcatcttgaacgagtaatctcgcaccagctgaacaaacttgaccggcatgaaagaagaccgcatttaatgcatagtcaaccgcagtgtcaaagtcagcgtcagcaaagacgatattcggattttttccaccgagttcaagagcgatttttttaaagttgcctgcggcagcctgcatgactttacgtccagatacaccgccacctgtaaaggaaactaaatctactaagtgactttctgccatttcttgtccaacggtcgcacccgggccgagtacaatgttaatgacgcctgctggaaagccaactctttcaaaaattttcatcatatgaatagttgttaaaggggtgatttcgcttggtttaataacaattgtattcccagcagcaagtgccggagccaatttccaagaggcttgcaataaagggtaattccaaggagtaatttggctgcatacacctacaggttcgcggacaacgcggctaacagaatcgggattaggtgactcaatcatctgtccaccatctttatctgctaatccagcatagtattgaaagacatcagcaatcccatccatgtctgccaggctttcaacgagggtttttccagtattcaaggtttcaagtttagcgagttcttcacgatcattacgaatttcttccgctactttaaatagtaaagaacctctttgggccgctgtaaatttagaccattcacctgcatcaaaagcttttctagctgcttcaatagcttctacagtatcagcacgatttccttctgtaacgacagcgataacctcttgattaaaaggatttataatctctcgtttctcgccgttgcgtgcttcaacccattcgccgtttatgtgcattttttcaagcgtaagtgtttgttccaatagcaccgacctccaaataatagaatttgttaaatttatatttaacgttcttaacaattcgaattatagcaccggttattcaatttagtcaaaccctaaaactctaaatgttctgaatttattagattatcttctctgtaaaagactaatcattcggatattaagagaaaatttaacaaaaagtgataaaaaatcactgattgctatgtcccttgatacaaaaggtttttttgtgtatgagctatgataatattattctttttttatatgaaaacactcaaacttttttgacaatatcctaaacattcagatatattaaccatagtactatatctgtttgcatacaaaccttgaaaaacaaaggat

SEQ ID NO: 8 - DNA, 177556 bp, Priestia aryabhattai
  source 1..177556: mol_type = genomic DNA
atttgaaaaataaaaattaacgttgacgtttgtcgctttgttcagttttcaaagttcaaccgccgctcttaagcgactttactattataacaagttgcaacctagttgtcaacaagtttttttatttgtttatcacttcgatgtttgcttttgcagttcatcttagcgacatttaataatataccatgccttcttttattgtgcaatagtttttcaatatatttttaaaaactattttcttgtaaacgaaacgttagccaattaatagatactagcatatctagacccacactagcataatgtctattaaatcattatccgccaaggaggcgttcacttggataccttaattgcagctgcactctatttgtccttttgtatgtctattctcttaatttcacttgcttattgggaatcaattcaaatgtctaataaagaagggaaagtcaacggcctttcatttatttcactttcaacattcagcatgattttttgtttgtttacttcatatttttataccattctttattaacatgcgttgtcttcttataaaaaggagacatttctttattttattacaatattcgcattcagtatacttacttattgaaatcaatgcgataaattcagttacttctcttcttcatacgtacgatggacagtgaaggaatttgtcgaatgattttttggaacactttcattaaatttgataaactacttttagaaaacgcttccatatatactttaacattattcaaggaggaaaccaaatgaaaccattgcttgaattaacggttggagaacttttaaaagaaagtacaaaaaagtttgggcatcaagaagcggttatctactctgaacaaaatattcgctatacgtacgcggaattttatcaagaaacctctcgagttgcaaaggcacttctagccaccggtctcaaaaaaggcgaccatatcgctatctgggctaccaatgtgccggaatggttgcttcttcaattcgcagcagctagaataggcgctgttttggttacccttaatacaagttatcaatcctctgaattagagtatgtattgagtcattctgatacaacagcgctatttttcattgatggatttaaaagcacttcttatacgtctattatcaccagtattgaacataatcttcccaaactaaaatatcttataaacttaagtggatcaagcgaacatacatcttggaacgagtttttaatgagtagcttaatggtatcggatgaggttctcgataagcatgaacaatccctacatatccatgatgttatcaatatgcaatatacttccggaacaacaggttttccaaaaggagttatgctaagtcaccataatatagtaaacaacggctttttagttgcccagtctatgaaactgactaacgaagaccgcttatgcatcccagttcctttctttcattgctttggatgtgtgctgggtgttctagcatgcgtatctgtaggtgctactatgctaccgattattgaatttcaacctgcctctgttttacgcaccgtagagaaagaaaaatgtacagctcttcacggtgtaccaactatgtttattgcggaattaaatacacttgagtttaatcaatatgatttatctactcttcgcacaggaatcatggctggttctaattgtccagcagaagtaatgaaacgagtcatacatgacatgggcatcaatgaaattacgatcgcctatggtcaaaccgaaacatctcctgtaatcacccaaacaactccaactgattctatcgagcggcgcgtacaaacggttggcaaagttcataatcatgtacagattcaaattattaatccagttacaggtaaacccgcttctttaggagaacaaggagaactttgtgcaaaaggatatttaacaatgaaagggtattataaaatgccggaagaaactgaaaaaacaattgtagaaggttggctacatacaggagatttagctaccatcgataaggatggctatgtaaaaattacaggacgtctaaaagatatgattattagaggcggagaaaacatttacccaagagagattgaagagtttttatatagaatacctcaggtagaagatgtgcaaattgtcggtattcctgatccaaagtatggagaacgagttgctgcatgcattaaactcaagcaacattcttttcttaccgctcaagaaatcaaagactgttgcaaaggtaagcttgctcatttcaaaattccggaacatatttattttatagacgactttcccatgacggcatccggcaagattcaaaaatataaattaaaagaaaagatcgtagcgctttataaataatcagatttttttgaatttagcctgtcattatgaagaaaagtttactatactgatacatatctgtttttcttctttcatacagatataaacaacaatgtttattgaaataggtgaaaataatggaaaatgaaatgttgctcaaattaggtatttccgctgtacttggtcttattattggaattgaaagggaactaaaacgaaagcctgttggtttaaaaacatctctcgtaatttccattattagctgtttactcacgattgtttcgattgagtcttctcaaatctttaataaaggtgatcacatcacaatggacccgcttcgtctggccgctcaaattgtttctggaattggttttttaggggcgggtgtcattttacgaaaagaaaatgacagcatctcagggcttacaacagcggctattatctggggagcagcaggtataggcattgctgtaggtgcagggttttatcctgaagctattaccggagttgtactgcttatcatcagcgttgaacttcttcccttccttattactattttagggcctaggcaactgcgcgagaaagagcttattcttcaactcaagctggcggataagcacaatatctttgatacaactaatagcattagagaaaagaatattacaattaaaaatattcgaatcaaagatttagacaccaatgaattgtatatacgaatgaaagtgtcagttaataaccagcgccctactacagaagtgtattacgaaattcaaaaaatcagcggtattcgaagcattgaagttgaaaatgtataaataaaaaacggccaattggccgttttttatttatatttttcaatctgttgtaaaaattcccgctgttttactagagacagccggtattgatcatcgataatttctgttaataactcatgtttacggctctttgacacattcaatctgtggataagaactctacattcatacaaaaactgtgtatactgtgtgtaactctcatcataatttgaggataagtcttctttgattcgttttgtcaacaaaggactagcgccatctgtggatattgctagcgataatctccctctagaaaactgtgcaggaatttgaatatttccatcggaaaaactgctggccatattaaccaactgatcatttttaatatgctgcttaacaaacttattcacagcttgatcatctgtagccacaacaattaaaaagacattaagtaagtcttcttctcctactttttttctttttacacgcaactgatctttagcttcccattcatttatttcagctgaaacagttggagcaaccactgtaatggctgctccttcttgtaaaaaacctttaattctacgagttgcgattgttccgcccccaactactaagaccgaacgaccctttaaatcaagcataacggtatacatcgtattgatttcctttgctcgataataacgtttttacttggtgacttaaaatgtgtgcaagtccatcatgataacctaggtagttggctaagataaactgctgggcatttgttgatagctgctccaattcttccttaatttcgttcattaaaataccggtaaacaaaaggtacggaagaacgaatacttgcttatacgaagttcgtttagcaaggtgcaggccttcttttaaattaggagaagctgcagctaaatagcatgtgctcacttctttaaaagcacctttcccttttagcagttgagctatttcgttaaaatcttttttcacagcaggatcactgcttcctctgccgaccaacaataccatcgaatcttcatgcttatccacattggtttcattgattctctctaccaagatatcaacaattcgttcgtctacgccgaacggttctccgtacagcacttctacctggggataacgttcatatactttgtgtatttcttcgggtatatcatgctttgcatgcgcagctgttaataacagaagaggcacaattgcaatacgagtagcaccttgttcaatacatgcttcaaatccttgttcaatagtgggggaagctagttctaggaaacaaacttcttgaatcgatacatctagattttttttacatctttcaataaaagcaactgcctgatcagcgccttcttttacgcggctgccatggcaaacatataaaactgcatccatataatcaacctctttagtaagcttcttgtgcatacgaatagtaatgctgtccagtcttctcaaaccaatttaatcggtcatgaaaattcacaacttcaccaacgataatcatacttggattttcaatttgttcttctttaacaatatcaacaattgtaccaagagttccagttacagtgcgctggtccgcacatgttccccagtgaatcaatgcaattggcgtagctgaagtttttccgtgtttcattaactgttggcaaatgtacggtaagttccgcactcccatataaattgcaagagtatctacacctttggctaggctatcccatttgattgcatcatgctcgttatctttacgatggcctgctacaaaagcaaagcttgcgctgtattcccggtgagtgacagggattcctgcataagcagcggctgcgatacctgatgtaattcctggaacaatttcaaatgaaatgccctgctgcacgagagcttctgcttcttcccctccgcgtccaaaaacaaatggatctccgccttttaagcgcgttacaatttttccttttttagcgaatttcactaaaaagttgttaattgtttcttgcttgagggtatggtagttcggaagctttccgcagtaaatgatatctgcatcacttttagcatactccagcaggtccttattcactaaacgatcatataagataacatctgcttgctgaattgctttcaacccttttaatgtaattaaatctggatctcccggtcctgcaccgactagatatactttccccatgaatgcctttcacccttccatcatttccacgtctccgcagcgctcccacattttaatttgaattagaacagcggacaaagtccgctgtcatttagataaattttcggttagctaaatattcaataacagtttgtacacattcttctacagactgtgtgcttgtattaattgttaattcagggttagccggtgactcatacggagaatcaattcctgtaaaatcacggatttctccgcttcttgcttttttgtaaaggccttttggatctcttttttcacattcttctaacggacactccacgtatacttccaaaaattcattcccctctaagatctcacgcacttgagcgcggtcctcttggaatggagagataaatgctgttagtaccacttgaccgctgtctacaaatagcttagaaacctcaccgatacggcgaatattttctgtacgatcttcagcagaaaaccctagattcttatttaagccgaaacgaacattgtcaccatctaatacatagttgcgaatatttttatcaaaaagcgcttttgccactgcgtttgctacggtagatttacctgaacccgaaagacctgtaaaccataatacaaaactgtgatgattattttgctcgcgtctttcctcttttgtaattccagcatcatgccacgtaatgtttgttgatttgctcacttcaaccgctccttattttgaagatactttttgttttgctaatcctttaattaacacttcaattacttctttacggctgaatgtgcttggtggcacttctccgttacgaagcatttcacgtacctttgttccagatagaatcatatgatcttccttgctgtgagggcatgttttcgttgatgccatcgcttcacacttcttgcaatagaagctgtgttcaaagaataaaggtgtaattcctaattcatctgctgtaaagttactgaagattttttgtgcgtcatatgttccatagtagtcaccaacaccagcgtggtcacggcctacaatgaaatgcgtgcacccaaagttttttcgaaccattgcatggaaaatagcttctctaggtccagcatagcgcatcgcagcagggaaaactgctaaagctacacgatcgctaggataatagttctctaaaagtacttcataactttccatacggatatctgctgggatatcatctgactttgtttctcctacaagtggatttaaaaacaggccgtctacaatttctaatgccgttttttgaatatattcgtgcgcacggtgaacagggttacgagtttggaatccaacaaccgttttccaaccgcgttcttcaaatgctgctcttgtttcagttggatctagataatatttttcaaaacgcgttttaggtgtacgttctacaagtacgattggacctgctacatatacatttgggcgttccatcatttttttcacgccaggatgggcaagttctgctgtgcggtacacattttccgcttctttttctttatttggcgtatatacttcagaaacttctaaaacaccatacgttacgccgttttgaacaagctttactttgtcgccaatgtttaattctttagcttgctcttctgttacaggaagagtgataggaatactccatactgttccatctgctaaacgcatattttcaacaactgattgataatctttttctcctaaaaatcctgtaattgggctgtaagcaccaattccaattagttctaaatcacttagagccatgttatctacttcgatttcttttgttagtgaagtgtagtcatatgttggttgatataaattaattaattctccaccgtgtgcttgaattgttgtcattttgtaaaatcctccttaaataattaacacaatataataaaaagcacttgaatcacgcagtcattttttctttttccgactgcaagcttgttctttttcttctagtcgttctagctaagcttagaacacctgctgtggcaatgcagccgctagctagcaccacaaatgaatataagtcgctttcaagtactaatttcacaagaacatatgagattacgagtgaaaatacaggggataccacccaaacctttaacatttgaatgaccacttcgcgctgttctttcgtaaatcccgttttcgctgctcctattccaataatagaagacgtagtaacctgtgtaagcggtactggcaaaccaaaaagtgaagctgctgtaacaagagaagcaccagtacccgagataatgcatccttcccctacagaatagcgagtaatttttttcccgtttgtttcaataactcggcctcctaataaaagagctccgagcgccacagccaatcctcctgatatgacacccgttgtggcatccattaatccagctcctactagaggaccgacagcatttgccacgttattcattccagctgagaaagcttcaaagaatcccgtcgctataactaaaatcgttaaaactcttttccactttccctctgcttcttttttatgcgctctgcgttttatcacttttccaatcaaaaaagcaatgacaaatgaaaccagcggaacaataatccaaaaagacattacaactaaaagtttttccacatacagagattgataagctactcctactccaacaactgaaccaaccgttacttcacttgttgatagagggataccaattaaattcgcgaaaaagagtgacagcgttgcagcagccaaaatgataataaccaattctactgacagcaatttttcaggtatgatgcctgaactgatggtttttaccacctcgccgcctccaataatggctccgagcacaatacctacagcacaaatgaacagggctactcttcgttttttaatcgcgccggagccgtatgaaacgcccatagctgctgctgcaccgcttgccccaatattcattgcaaaaaaaagcgcaatgataaaggcaacatataaaagcatcatttattcagctctttcgtatttaagattcgtgtaatccgcattcaactttttgtgtacctgcccatcttcctgaacgtaaatcgtctacattgtaggcaggtgcggtacagggctcacagccgatacttgggtagccttgatcatgaagtttgttatatggtaaatcatgcttatacacatagcgccaaacttctttccaagaccaatgaattaacgggcagactttcactttcttgaatttctcatctttattaaaataattcgtgttggcacgagattcagactgctcgcgtctcaaacccgaaatccacgcatcataaggagcaagagattcccttaacgggatgatttttcgaatttgacagcataggttaggctgactcttccaaagctcatctccatgtttctcagcttgttctgcaagagttaaatccggtttttttatatgaatacgcaaatcaggaaagcgttctttaattgcatcaatcacttcatatgtttctttaaaatgaacgcccgtatctaaaaagacaatttcagcatcttttttcacttttgaaattaaatcaattaacacgatcccttcgataccaaagcttgatgcataaataattgaatctccgtaggtatcatacgcccactgtaatgctgaaagggctccttttgtttcatcttcactgtcgaactctggaaatgtatcactccagttttcgtacgtatataagtctgccattttcttcactccaattcttagttatccgcgttatccaataaaaaaagacggttttacccactagaattggataaaaccgcctctagtgtgtctagtcagcgaaactatttaattctactttgcttcgacgtgctcaaagatttgtttgaagtcgggggttacagtcattaatgtccctcctcaaattatcgcttgcgctatatcaaaataaaaagtcttccatattgaaagactgggtaggcaataaattttcaccttatctttcaaaatgatacacactttgctggaattagcaccttgctaagcaggttgccggggttcagcgggccagatccctcccccactcttgataagcattttttaaaaattttagcatatttagaatatttgtcaacattaaaaatcatatatccgataagaaaactatactttaaattcacagaaatatctatacttttatttaaaacaacatatgtaaatttaaaccaaatgtgaacatatcagtttataaaacgctttcttttttctccaactttttatattctcttgctaaataaaacacaaaacctctctataaaattaataagggatttataagctttacggataattcacccacattagcacacattacagataacactgactgacagataggagctatataagatggagagacaaccctttcaattagacgatacaattaaaaataatgtgcgatcatatttacagcagatttcaactgaagcctctaatttaattaaacatttagacacgagtgatcattgtatcctatgtgattttgaggagatgagaaggctatttcaagatgttcaagctatggccgcctcttattacttgcgtcattacttatcgccttatacatttgaatatgctgctctgtccttagctattcataacctttctgagaaacgtcacggcgctttaattgtcattgaacgggaacaaaatgtagaccctcttattcaaaaaggaatgcctattcaagctcctgtcagcgctacgctagttgagacgctgttctatcctgggacaccattacatgacggagccgtcctaattagaaataatcagcttatttcagctgctaatgttttacctctctcgtctattatttcaacgaacaaaaaattgggaacacgtcaccgtgcagccattggaatgtcagaaaaatcggatgcgttaattttagttgtatctgaagaaacaggcaaaatttcatttgcgcttgatggaagcctctaccctattcactccagcaaaaatatgatttaagagccctttcctgataagcagccctatcttgacttctatattctttctctttaatatatttcatagtttttacatactatagatacgggtgatgcatatggcaattttaaaatttgaacatgtaggcgttcaagtaaaggatatagaagaatctattgagttttatacacaaaaagtgggattagagctcatcgaaacactaccacataccgatccgtctttgaagctagcttttctaggtttagaaggcaatgtaatcgtagagttaattcaagggtataactcaagcttacctaacgaaggtaaagttcatcattttgcgctggcagtagacggaattgaagaggagtttgagcgtttaaaatcagcaggcgtttcatttgtggaagaaaacattgtcactttgccaaacggagcaagatacttatttttctacggtccggataaagaatggattgaatattacgaagcaaaaagataaagatatcttataccttcagtgaaaaatggtcatactgtggctatgactaatcactggaggtttttttatgatggaatggctattatttcgactttttcgtcgttctattttagtccggcttctttttattatcggctgccttgttctgcttttcggcatgcttatacatttcctagagccgcaaacgtttgggaatgtgtttgaaggaatttggtgggttattattacaatttctactatagggtacggtgactttgctccgaccactacgattggaaggttagctgcaattattttagtcctgatcggaacgggatttattactacttattttgtcacgctttctaaaattgctgtttccgctgagagcgcttatttggaaggaaatttaaaattttatggaaaagatcacttcatcgttgttgggtggaatgagcgcgccaaactcgtgttagagtcttatcgcgacgcatttcataaagaagacattgtgcttatcgacgactctctgactaaaaaccccatgatttgtgatcgcgttcattttattaaaggaagtccctctcactatgaagtattagaacttgccaacgctcggtacgcaaaaaaagtgctgattactgccgatcagcataagacagaggaatatgcagacatgaatactattgttacgttagtcgctctgcaaggattgaacccttctatttacagtatcgttgaactgttaacaaaaaagcatattcaaaatgcacaaaatttgggggtgaatgaaatgattaaaacaaacgagttgattagtcaagtcatgtacgaacatattttcgtgaaaaaattagagagtttaaaaaaagaatagttccttcaattactgaagcagtgcctcttctgcctctctaattagctcttctcctaagctgatatacttttctggaaatgaagcgtctgcgtctttgggttctgcaaactgattaaatgaagcactcacatttccattgtgaacatcgtcatctagaccaatttgatatttatgtgaaagtaaaaatggcgtaccaatctgtacggttgttcctttagaatccagttctccattcgtagctgtaaacgggatacgtaaaaactgatagccgacttgatcattcatcttatagtcgaatgaaccatgatcataatcccaatttcctccaatgttatacccaagcggcttaagcgttttttctaattcataaagcttgaataatgtgccatctaatcttgaagataattcaatcatgttatccctcctctgttttaacatgtcctttttccagcgttttatcctttatctcaaaagcaaaaaagaggttgaggcataactaattgaatccatcctaaagacgaacaaactggataaagtagctcgtataaatcgcttgtgacaccgcagttgatttccgtgcaagccttcgctttccgcaggcgggcgctgagcctcctcatcgcttgcgcttttcccgcaagagtcttcgctttgcactccctagaaggaactaaacagatgaaacgatattcaccataaaaaaacgaaccactaatcaaacatgttgatcaatggttcgtttttcacttgggctaaaatacttttgtaccgccctctttttacttatttcaaacgcttttctaattctgcttttttctcttcaaaaccaggttttccaagaagagcaaacatatttactttgtatgcttctactcccggctgatcgaatgggtttacgcctaataaatagccgctgattgcacatgctttttcgaagaaatatacaacatatccgaacgtatactcatctagcgcaggaatgttcacaactaagtttggaacgcctccatctgtgtgagcaagcattgtaccttggaaggcttttttatttacaaagtcaactgtctcaccagctaagtaatttaatccatctaagtccgctgcatcttcttcaattgttagctcatgacgagaatcttgaacttgtacaattgtttcaaaaatatcacgacgaccttcttgtacatattgacctaaagaatgaagatccgttgagaagttagcagatgaagggtaaatacctttttggtcttttccttcactttcgccaaataactgtttccaccattcagcaaagtattgaagagctggctcatagttaatcagcatttcaattgtttttcctttattataaagaacattacgagctacagcatattgataagctgggttctcttctagctctgatgatgagaatgcttcttgagcatcagctgcccctttcatcatttgttcgatatcaagacccgcagcggcaattggtaataagccaaccgctgttaatactgaataacggccgcctacatcatctggaataacaaatgtttcatagccttcttcgtccgctaatgtttttaatgcgccacgcgctttatctgttgttgcataaatacgcttgcgtgcttcttctttgccatatttctcttctaataatttacggaagatacggaaagcaatcgccggttctgttgttgtaccagattttgaaataacattaatagagaaatctttatcttgtaaaacatccattaagtctttcatgtatgttgagctgatgttgttaccagcaaaaataacttgcggagttttacgctgttcttttgataatgtgttatagaatgaatgctgaagcatttcaatagcagcacgagcacctaagtaagatcctccaataccgataacaattaatatatctgaatcagatttaattttttctgcacttttttgaatgcgtgcaaattcttctttgtcatactccgtaggaaggtcgacccatcctaaaaagtcgtttccagcacctgttttctcatgaattgaatggtgagctactttcacggcatcacgtaagtatgtaagttcatgttcaccaaaaaatgataacgcgtttgaataatcaaaacgaacatgtgtcatagtctgttcctccattaaaatatctttatttttcactttatcgaaactgttagctgaattcaagtgaatccacttacaatttgacacaatcattatagtttgttgaaactgcaatcattgtatgtacccttttatttaacgataaattcagttgtgaagtcaactaatgttctttgattacaggacgtaattcatgcacgattacgcaaataataagcaaataaaaaacgactaaagagtggtcttcaatcgttttttatttgcttgccagatggtgcaatatagttcatttcacctatcttcacatattgtcttggtttataagaggcttttaaaagggaagagtctattgatatggaattttcagcttggtttttagaagtgagtagcatcctgtttccttctttcatttccaagtgattattcagcacaaatccgcccatacataatgcggtaaaaatgagaaaactgatggctatttgtttcctatacatttccatcacctcactcttagagtggcaatttcgagtgatttttatacgtccaaaaaaatttttttatgttttttttatggattttgtgacgagtttctatttatttaataaggtttgaaaaatccgctgatactaaaaaatagcatggatgcatgcataattaaattattatataatcggttacagaattgaatatcacaaggaggtttgtcttttgtcgtggttgcacttggtgattttatcgccttttttattagccttttttgtcccccttctgtataggaaattccagcgtattcatacagggtggttcgttttacctcttccacttgtgttgttcatttatttcacacaatatatcagtggtgtttctaagggggaaacatatctacattcaatgaaatggatacctagtctgggcattaactttgatgcctatgtggatggacttggtcttctgttttctctattaatcaccggaattgggacacttgttattctttactccatttattatctttctaagacaaaagaagcactgcattcgttttatgtctatttgcttctttttatggggtcgatgctaggagttgtattatcagacaacctaatgagcctttacagcttttgggaattaacaagcctttcatcttttttattgatcggttattggtacaaacgagagaaatctcaatacggagccttaaaatctatgctcattaccgtattcggaggactttccctattagcaggaattgtgcttttatacgttatgacaggtactttcagcatacgcgaaattatctcaaacgcagatgtagtcacatcaagtcatctattcattccagctctagtcctcattttattaggggcctttacaaaatctgctcagtttccttttcatatttggctgccagatgcaatggaagctccaaccccagtgagtgcataccttcattcagccacaatggtaaaagcgggaatttatcttttagcaagactcagccctgtttttgctataagcgccacttggttttttactatttcaattataggactaatcacactgttttggggctcgttttcagcagtaaagcaacaagacttgaaagggattttagctttttcaaccattagtcagctcgggatgattatgtcacttataggagtaggtagcgcagctattcactatgattttttagacgataatatctacttagtagctcttactgcagcggttttccatttgattaaccacgctaccttcaaaggcagcttgtttatggtagtaggcattgtcgatcatgaaacaggcacgcgtgacattagaaagttaggcgggttaatgagcttcatgcctgtgacatttaccattgctatcatcgggggattttcaatggcgggccttcctccttttaatggattcttaagtaaagagatgttttttacaggcatggtaaacgtaacaaaaatggatatgtatagcatgcagacgtggggaattttgctgcctatcatcgcttggttaggaagtattttcactttcgtctatagtatgattcttgtctttaaaacctttacaggtaaataccagcccgaaaaactagagaagaagccgcatgaagcaccagtaggcatgcttatttcacctgttattttagcatcactggttgttatgtttggctttgctcctaatttattagaatcaacccttattgagccaacaatggcctctatcgcacctagcctgctagctgaaggtaaagaatatcaagtgcatattaaattttggcatggctttacgccagaattatttatgacgctaggggtcatcatatttggtattttgttatttataacgattcaaaagtggtcaaaaatttatacacgattcccttcttctttaacgcttaataacggctataattatggaattaaagggatagaaaaagggtcaacacgtatcatgaaaacattaatgacaggatttattagagactatcttttaatcatttttactttcataggcattttacttctcgtgacgctcttttctcagaatgcctttgcgattgatttaaaagatactgcttctataggcgtttatgaagccatattagcagtcgtaatggttgcagctactattacaactttattggcaaaatcacgcctcacagccattatttcgctcggagttgtcgggtatacgctctctttatttttcgtattattccgagctcctgacttagctttgactcaattagtgattgaaactgtatcggtatccctgtttttactatgtttctactacttgccggagtttcggaagcgaaaagtaagggtgaagtttcagctgccaaacttactggttgctcttcttgtaggaacgactgttacactgcttggcatatcagcaaacagtacgaaactatttgaatcgatttcacattactttattgaaaacagctatgaaaaagcaggcggcgaaaacatggtgaacgtaatccttgttgacttccgcggatttgatacattatttgaaattaccgtactttgtatagcagctcttgctatctatggcatgattcgtcttcggttaacaaaggaggaagaagagtgaaaaaaaatgatttgatactacaaaccacaacgaaagtagtcacgtttattattatcatttttgccattcatcttttttttgcaggtcattatacacccgggggagggtttgttgggggacttactacctcagcagcccttgtattactactgctggctttcgatataaaaaccgtatccaaagtcatcccatttgactataagaaggtcgcggcttccggactgctgctagctattttaacggggcttggatcatttattttcaaagtcccatttctaactcacacatatagctactttaacctccctcttctcgggaaaacatctttagctaccgttgtactgtttgatttaggtgtatatctagtagttgttggtgttacgatgaccattattcaaacgattggagagagtgaatagtggaaatattaatgtccatagtggcgggaattctattcactgccgctgtatatctcatgttatcccgcagtttactgcgaattattattggaacaggcttattaagccacggtgttcacctgttgattttaacgatgggcggattaaaaggaggaagtgttccccttctgggagaaaaggcttcttcttatacagatcctttacctcaagccctaattttaactgccattgtcataagctttggcgtcacttcttttttccttgtactagcttacagggcttatcaagaactcggaacagacgatatggacaagttaaggggaaatgaacatgacgagtaattttgtaatcatcccactgcttatcccgtttgttgtaggtgttgtgctcatttttttcaaagacaatattaaacttcaaaggataatcagtgttttatcattaatcaccaccactgcttttgctgcctatttagtacaactggttcagtcaaaaggtattttaactcacgagcttggaaactggaagcctccttttggaattattctagtagcggacatgtttgcgtcccttctcgtacttactgctagtgtggtaacactatgctgcgttctttttgcttttcaaacaattggggaaaagcgtgaacgcttttacttttattcatttgtacaatttttattagtaggcgtattcggcgccttcttaacaggtgatatctttaacttatttgtcttttttgaagtcatgcttatgtcttcgtacgctcttattgtaattggcggtacaaaagcacagcttcgagagtcacttaagtatattttagtcaacgtcatttcatccgctttatttgtcattgccgttgcttatttatatgccgtaacaggaactctcaacatggcggacctttcacagcgaattgctgaggcgaaccagacgggaattttaacaaccattggcatgcttttatttatcgtcttcgccttaaaagcagctttatttccaatgtatttctggcttccaggttcatatagtgcgcctccacccgttattatcgggttgtttggtgctttgctcacaaaagtaggcgtttattcgattttcaggactttcactttactgttttaccatcatcccgaatttactcatcaaattatcggctacgttgcgcttttgactatcgttgttggtgcagtaggcgccattacttattcggatgtaaataaaatcttaatttataacattattattgctgtcggagtcattgtctacggggtgaccttgataacaaacgcaggttttgaaggagctatttattatttaattcacgacatgattattaaagcagctctattccttcttgctggaagcatcattcgaataactggaacaacaaaattaaagaaaatgggtgggttaattaaagactatccgctgcttggctggatgttttttatcgctactatttcgttggcaggaattcctcccctaagcggctttattggaaaattccttttagttcagggcggcttagaatcagagagctacacgtttgtaggagttttactagtttcaagcctgcttgttttatattctgccattaagattttcatgagctgcttctggggggaacctaagctttcttctgagcatgaaaaagtatcccttaaaggcattctatacccatccgctatcttacttgctgtttctgtctttttaggactaggtgcagaagctgttattccttatgtgtcaacagccgctcaaacgcttatggatccttcaatttatatccaatcggtgttaaaggagtagatctgcatgtcatttcaactattattaaacgtaaccattgcattcacgtggatgtttttgagagggatttggacactcccttcctttattataggttttttctggggagcggtactgctgtttgttttccgccgtttttttcacaggcgtttttacttgcataaagtgtatgcgatcattaaactgctgtttattttcatacgagaattattcaaagccaatattgcagtgactaaggacgtattgcgacctaaattaaatattcagccagccatctttgcaatgccaacccgtctggagagtgaatgggaaattaccattctttctcttttaattaccctaacgccaggcacactcgtgatggatgtgtcagatgataattctactatctatattcacgcaatcaatacagacgatattgatgacattattacagatattcaacaaacattcgaaaaagccattatggaggtgagtcgttaaatgctcgatatttttttaaacgtttcgctcattctcatttctgcttcaactattggatttgtttatcgagtggtaaaaggtccgtcaactgctgatcgagcaatggcccttgatgctattggaattaacatcattgccatcacagccatcatctcgattatttttcgaactcaggcttttttcgaagtcattttactgctaggcatcatagcctttgtaggtaccgttgctttttctaagtttttagagaaaggagaagtgattgaatatgaacgtgatcagtgaaatcactgtaggagctttggtactaatagggtctcttctgacagtggtgaccatgattgggcttattcgcttgcctgatacgtatacaagaagtcacgctgcctccaaaagtgctaccctaggcgtcctgtttatactagcgggctgcttactctacttttggattgacaccggccacattagtgcacggttaattttagcgattgtctttgtgtttatcacctctcctattgctgggcatttactaggaagagcggcttattacagcggagttcctctttctgataaaaccgttcgggatgatttgaaaaccaaacagcagaaaaagcttacccatcatgaatagaaaaaaacgccgtgcggtttgcacggcgttttttatcgagaatcttataaagaagcgcgtaggattgctagtacatcttctttgtttaattttttaaatttaccaaattcacctttagccatcgcacgatcagccataagatctaatttgtcttcaccaatatcataatcagctaagcgagttggtgcacctaggcttgaccagaattcacgaagcttatcaacaccttcaagtgctacttctttatccgtcttgccttccgtatctacgttaaatacgcgtacagctacttgcttgaagcgatctacgttctcatccattacgtgtttcatccagttcgggaataaaattgccaacccacctgcatgtggaatgtcatatacagctgataccgcatgctcaatattgtgagtagcccaatcgccttggtgtcccatttgtaacataccgtttaatgcgattgtcccattgtataaaatcgtttcacgtaactcgtagttctctaagtcgtttaataattttggtcccgtttcaataaccgtttgtagtactccttcacacatgcgatcttgaagcggcgtatttgttgcagcatggaaatattgttcaaatacgtggctcatcatgtcgaccatgccataaactgtttgattttttggtacagtaaatgtattaaccggatctaaaatagagaattgagggaatgttgccggactgccccagccgtatttttcttgtgtttcccaatttgtaataacagaaccagcattcatttctgaacctgttgctgctaatgtcagcactgttccaaatggaagagcttcagctgcgaatacgtcgcggttaatgatgtcccatacgtcgccatcatattttgcgcctgctgcgattgcttttgtacaatcgattacgcttcctccgcctactgcaagtaaaaattcaataccgttttctttacaaatatcgattcctttgcgaacagttgtcagacgaggattcggctctactcccgctaactcatgtacttctgcattcatgtcattcagtacatccattacttgatcgtataaaccgctgcgttttacgcttcccccgccgtatactaataatatctttttaccaaagcgacttgcttcagtttttaattgctctaattgacctttaccaaaaattaattttgtaggattataaaatgtaaaattgttcactataaactcctccttacgagcttgattacatgcatcattatgaagaacaactttttgattgtaaagaaaattgacttcctaaagattattccctgttggctagatgctcaccccatccaaatgaacatttatttgtctgtatcttccaaaagtaaatatgcatatttccctctaaaaaaagcaggctaataagtgaactacaaaacaaggagggttcatcatgagtggtattcaacgtattgcgctcgtattaacgattattggagcaattaactggggacttattggcttttttcaatttgatttagtagcagcaatcttcggcggtcaaacatctgctttctcccgcattatttatggattggttggaatcgcaggactgattaacctaggtctattatttaaaccttctgctgaagtagaacgtacagaacctagaacggaacattaaaaaaagaaggatagctaagctatccttcttcttttcttatttcttaattagatcttcgcggtttgattgctcaatccactcttctaatttttcttttaatgtattgaatccttgagtagattcagtgtgaactgttgcttgaccttgacgctttttagcaggttttttaggtgcagaagcttcagttttttctggagctggctcagttgcacgaatagataaaccaattttaccagttgactcatcaacagataaaactttaacgtttacttcgtctcctactgataaatgttcgttaatatctttaacgaagccatgttttacttctgagatatgaactaatccttgagtttcttcatttaatgcaacgaatgcaccgtatggttgaattcctgttactttaccttttgtaacagtaccgatttcaaattttgacatataaacactcctagataccttattattttcaccattatagccaatttaaaattatagcacagttcatagattgaatcaaaaagtagttatactatatttattatttaccaatttcgtcacaaatataaactaacactacatttcatcatagcaaaaaagatattatatcaaaccgtctataggatatgacataatatcttatttttattataacttattttcaacaaaacggctaatccgttttatggattcttctaatgattccattgaagaggcgtatgaacagcgaatatgtccctctccgccttttccaaatacattgcctggcaccacggctactcgctcttcaagcaaaagctgctcagcgaattcttccgatgacaatccagttttcttgatagacgggaacacataaaacgctcctcctggagaatggcattccagaccaatttgatttaatgacttcaccatatagttccgtcttctgcgatagctttttctcatctcttctacgtcatgctgcccattttgtagtgcttcaattgctccatattgtgccatggtaggcgcacacatcattgtatactgatgaattttcagcattgctttagcaatctcagttggtgcacatatgtatccaagacgccatccagtcatggcaaaccctttagaaaagccagaaataataatagttcgttctttcatcccttctaaagaagcaatagatgtaaattcttcatcatatgttaattctgcatatatttcatccgtgataacaagcaagtcatgctttatgacaatatccgcaatagcctgcagctcttctttagatagtgagcttcctgttggattattaggagagcataaaagaagggctttcgtgttgcttgtaatgacttcttcaatctgtctaggctgcagtttaaactctgtttctgccgttgtttcaattgccacaggaactcctcctgctagcgaaattaacggactgtaagacacaaaatttggctccacgacaataatttcatcttcagggttaatcaaagctcgcattgtaatatctagagcctgacttcctccaacggtcacaataatatcatctttataatcatacgagacgttaaaatttcttttcatatacttcataatttcaaagcggagctctaaaagccccgcatttgctgtataagaggtatatcctctttccaacgataaaatactcgcttctcgaacagcccaggatgtgacaaaatcaggttcacctactccaagagagatgacgttatccatacttgctgctaaatcaaaaaagcggcgaatacctgaaggtttcagctgttgtacagttgttgacaagcgctctttcattacggagacaccacgattctgcgatcttcatcgccttggtcatagatggtaccatcgtgcttgtattttttcatgataaagtgagtcgttgtagataaaacagagtctagcgtagaaagcttttcagaaacaaaaaacgctacttcagacattgatttttcttcaataataacagacaaatcatatgctcctgacattaggtacacggatttcacttcttgaaaacgatagatgcgctccgcaatctcgtcaaagcctactcctcgctttggtgcaacttttacatctatcatagccgtgacgccctcatgtccatctactcgtctccagttaatatcagctgaatattgcacaattactttttctctctctagctttttaacaatattagaggtttcttcaaatgttaaatccaccatttttgaaatactatctattgaaatacggctatttttttctagaatttctaaaatttctaactctttttcttctaagaacaccgcgttcccctcctacaacgattaaattttttcactttttccattatatcaaatttaaacacatctttaatgtgaaatctataccggtaattgagtttcattttatagattgctggaaattaggacagactagaaagaaaaagatggagtgaaacaaattgactgaatctaaaattacttgccaccagcgtacttttaatggagtcaatgtttactacgaatgccataactatcaccctgataaaccagccattgtatttattcacggctttttatcatccagttttagctttcgacgtttaattcctttatttgaagatacgttttctatcattacgctggaccttccgccatttgggcgaagtgaaaaatcgttaacctttcaatactcgtataaaaatttagccagaattgtcattgagttgattgaatatttaaagttgaaagatgttgtactatcgggacactcaatgggaggacaggtttgtttaaacgtagcaaagttaaagccttcttgcgtatcgaaactagttcttctttgcagctcagcttatttaggcccctcacattatggattggtcatgtcttcttatgttcccttcttttatctgtgggtaaaaacgtggctgtctcgcaaaggtgtattaggtaacttgcaaaatgtcgtatttgatcataagttaatcgacgaagaaatgattgatggctatactgaaccatttttggatgaccgtacgtttatggctttaacaagaatgattcgtgatcgagaaggagacctatcctcaaaggatttgcagcacataaaaaaaccaagtttactcatttggggagaagaagaccgggttgttcctttgcatctcggacgtaagttaaaagatgatttaacagactctacctttatctctttaaaggaaattggacaccttttaccagaagagtgtcccgacattgtgcaatctcatatggccgatttcttgtacggtgaaaaagccctgtctcaataatgactgggcgggtccgtatatttcacacgaggcgctaactttaataaaaaatttattagtggtgcttcagcaattttttcactttctttattgacttcacaagttaacttcgttgacaaacgtattaaaaataagcaaactattatattaaaaaagggggtacttttattgtctacctattcttttgatcaattaattaaccgtacaggtacgcagtccgtaaagtgggacaaaactgatcttgtttttggagcaaaagatgttctgcctttttgggtagctgatatggatttccaagcgccgcctaatgttcttcaaaccattaatgagcgtgtcaaacacggtattttcggctacacttcccctactgaatctacggcaaatgctttatcatcttgggtagaaaaaaagcatcagtggaccattgatcatgaatggattacatacagtccaggagttgtatttgccctgagtatggctattcaatcatttacggaacccggagattcaattttaattcagcctccagtctatactccattttttaacatgataaaggtaaatgatcgagaagttgttgaaaatccgttaaaacttgcaggcgataaatacgaaattgattttgcagatttagagcaaaaatttgcagaaggcgtaaaattaatgattctttgcagccctcataatccagtaggacgcgtgtggacaaaagaagaactgaagagacttgccgatctttgtgaaaaatacaatgtattaattgtttcagatgaaatccattctgatttaatttaccagccttataaacacattcccattagcatggtgagtgaagatgcagccaatcgaaccattacgtgtatggcccctagcaaaacatttaatataccgggacttcaagcttcagctattattattccaaacgagaaactgcgcgcacagtatgttcaacaacagcaaaaacaagggttttctaatttaaacacattcggaataattgggttagaggcggcttacagtgaaggtgaggagtggctagaagcactgcttgtatatctgaagaaaaatgtagatctcgtgacgcgttttataagtgagaacttgcctgaactgcgagtggttcagcccgaaggaacttatttactatggattgactgcaacaagctgcatttatcagaagaagaattacatgaacgcttattagaaaaagggaaaattgccgtagaaaaaggcgaaaaatacagttccacatatggaaaaggttttatccgcttgaacattggctgttcacatgaacagcttcaagaaggattaaatcgcttaaaagtagctttaacgtaaaaaacagcgttctttctcacgaaagaacgctgtttttaatgtttttttgaaataactccgcaggcgattcgcttgccagaattacctgatggctctgtcattccgtcatcaccttgttcggtaataacaagggatgaaccatccatacgcttaacgagagatgtctttccttcttttaacgtgacttgaggaaccatatctgttcctgtatacgtctgatcgtcttctaccacaatatttttcatatcgcctaaatgcggtccttttggatttaacagtccgtgtttctttttatcaggatcaaggtgattgcccgcacttttaaagttaggagctttgcaaattcccatttcatgaatatgtacgccgtgttcgccaggtggaagtccgcttaaattgtacgtaaactcaattccatcagccttctctttcaacttgactgtaccgatgctatctccatctgcgttatagactttgacttctttattagatatttctttttccatacaccccgttaacaagaaaaaaggcacggttccaatgagtagtagttttttcatgttgccctccaatcgcatatgcactagcgaaagttttagatgtctttccatagattgtccagcaacatattattttaaacgcttacattttatttgcatttcattacaatgattttttattatcctgttcttttagctttgcttctaactccttcgttttttcttcttcttttttagaaaccttaatgattaaacgccatactgcaactgctgctagtacaaaaatcgccatagtagcaaaagcaggaatatattctcttttatcttccggaaaataaagcaaaaacattaaatacatcatgtacaacatcctttcatagaaacggtagggggttttgatttatactggtgataacaaacactttacttaaaggagatctggcaatatgacatttacaattggtcaaaccgttacggcactttataaaactgggaaatacatcggtgaaattacacaagttcgagatttacattatgttgtgcggattcaagctgtgttaaagcatccagaacaaggtgacttacataatcctggacaggtggacgtacctttttttcacgagcgaaaagcacttgcatttcgagagcaggccaatattcctcaaaaaatggttcatctctatgaagacagcgttcccgattataaagattcactaaaaaaagcgcttgaattaaagatagctgagcaacaagccaaagatagcccttttgctcaagcaagtattgcctgtttagaagagttaaaaaaagagtacggtattcattaagtaaaaagccaaattcacgtagaagtgatttggcttttataatgcaaatttatttaatacttttgaaaaatcgattcgatctcctatggtcgttggctctggtttttgaaggtaccgcttatctttttctacaagcttaaagatgttgagtgtcgtcatcgcatcatcaagcgcgcagtggtgctttccagttccttctttaccatactcttgcacagctttccaaaggccagtttgattttgatctccaaaaaagcgcttatactccattgaaagatcaatttctttacctgcaaaaggaaatggcaccttatttttttgacagcactgccttaatactttcatatccatgttcccccatgtaatgatcgtgctgtgtttatacatgcccagtcgctgtacaagctgctctagcgtaatgccttcatttacttgattttgttcgatatggagaaatgatttacagcgctcagttaattttgtaaagtgtgtaggctgtacgtaagaggagaaacgatcaatgatttcttgatttttaacaaacaccaaaccaacttcaatgatttccggaaaaaagccttttggaaaacccttatactctggcattgtaaattcaaaatcaatgaataaatactgagagttcttatccaatattatcacccctttgtaaaataaaccgccctactatattaatgctattatagcacgattgaacaatcggaaggtctattttctgttcttatttttaatattatgaatattctagttgctgaataaaaagaatactttactactactatattctagagcatgtctctatgcgcagggtaactgtcacgaatagacataatttcgcttatttttttacctatttttttacttttttatgtatccgctcttccaaattctctttaaactctaacacgagtgtgtgaggtggctccttctcactccaaaagcatacctcacaccttctagactaagcattcttatgtttaagctttaggcagaatagcaagcgtacatctggatatacagattaaattctcttcttcatcttgaattttcacttcccaaaccgctgttttttttcctttatgtaaaggaacgcctatagctgtaacgattccgtcttttttccctttgatatgattggcattaatttctaaacctacgcagatttctttttccagatctacacttttaatggcacctagactagccacagtttcagctaacgccaccgatgctcctccgtgtaaaagcccgaatggctgacgcgttcgctcatcaacaggcatcgtcgcttccactctttgttcactcgcactaataatctcaattcctaatgcttctaacagcgtatcttttgttttcatatccatacctccctttgtatctagtatacaataacggttttgctacaacatatacgaaccctctacatatacataataaaaatccgttttctaggaggattcttatatgaaatcatttgctcccttgtcttactattggccaccgtactacatgcctcacccttatacatacagggtacctaacttacctgaggcggacatcgcgacatttcagcaatctcttaaagttattccctctaccatgcaaagcgctactatatttattcaaagagccaatacttcgccaaatttaataaaaaaaataaaagctgctgctcaagaatccaaaatgagtgaagtaaaaagactcattctttccactggtgttaagacaaaaatcgatgttttttatactccagactatattaaaattacgtttattcaccccgataaccaatttgactgctgtcacgtatcgttaaatattagatggtaaaatacaaggaaaaaagtcttattttcttcaaaaaaagatgtacatgttgtttcgttccgaatattataatatatgccatttttgtatgtaaaaacaaattacacgataattgtatttaggatacaaatatgatattgtatttggaaatatattttttctttaggagggatgacatgatgagacatgttacgctagtagaaattttcacgcatcctatcgctcaaaaatatttaactcgatctggcgttgcgcatgctgtatccgtcgcctatcatgcgtttcgtctatccgtacagcataatgtaaaccccgatttagctacaaaagcagcgctgcttcatgatattggccactacgaatggtacacaaatggtcagtgggattatgagaagtatcgtcaaaatgatattcacgctattaaaggggctgaacgtgcacataaattactcattcgtttaggtgaggaacctcaggcggcaaaagaaattgctttagctattttactacacacagactcatatttgcctgaaggaacaattcaacaacgccctcttcaaaaagtagtcaaactagctgatgaagctgatgaagagccaggcggcaaacaccattaccgtgaattggaatataatctggctgtaaagaaaattaaggagcttgataagaaagtgcttgaacttctacattccaaccaatttaaacagttaggctgacaggattaactcctttcataagagttaatcctttttattatttctcctcataattccctgcaaattactcatactacttattgattctcatttttggttagttaggaggaagaagaatgtctaaaaacgctagaggttacgtgcaagattcttgcacatcattaaatcaggcaaaagcaagccttgaacaagctcttcaaacagtagagaaagattcaaatcgtgaacgtattgaacaatctcttcaggctgtagagcaagcattaggagcttgtgacagcactgcttctactctttctcaagcatgaaaaaagcagccggttttgatcggctgctttttttccttatagggcctctatttacaagataaccgaggcaatccacccaaaaataataagtggaatgttatagtgaagaaaagttggtacacacgtatcccaaatatgatcatgctgacgatcgactgctaatccagatgtgggtccaagcgtactgtctgaagctggtgaaccagcgtctccaagcgctcccgctgtaccaacaatacaaatcgttgccattggactcataccaagttctaagcaaagaggaacaaaaatcgtcgcgataattggaatggtagagaaagaagaaccaatgcccattgtcactaaaagcccgatgacaagcataagaaatgcacctagcatttggttgccgccaataagagcaacagagccttttacaagcgcttctacatctccagtttcttgaagaacttttgcaaaaccagaggcagacagcataacaaatccgatgaaagccatcattctcattccgttcgttaatactggatctgcttcattccacttcaaagccccgctgaagtaaacgacaacaattcctgccagcgctccaaaaatcatagaatctaataagagctgcacagttagagctgctacaatcgcaaccaaagctataataatacctcttgttgtataacctgtactctcttctgcaccttgatcaatgtcaatgtcttcataactgcgcggcttgcggtacgaaataaacacagcaaacaataagcccgctaccattcctaaagctggaagagccatcgccgtggtaatatctcctttatcaattgttaatccactttctttgatgttagtaaataaaatgtcgtgataaatcttaccgaatcctgccggcaaatacatataaggtgtaaccaatccaaatgtaataacggttgcgactaatcggcgatcgatttttaactgattaaatacttttaatagaggtggaattaaaagcggaataaatgcaatgtgaaccggaataacgttttgagaaaaacatgaaataataaggatgatcaataaaatcagtacttttgacagtgacttctttttcgtttctccttctttccctactatttttaacgctagctgaacaacggcatcaggcagccctgtccgcgaaacagccattgcaaatcctccaagcaaagcatagcttaatgcaacagaagcactgtttccaagaccatctgtgtatatacttactgtatctgtgaggctgataccgccaacaagtcctccaattagcgctccgactgctaaagaaaagacaacgttgatacgcaataagctcaaaatcagcatcacgagcacagctattaatactgcattcattttgaaacctccatttttctttttgctttatctcattaaaacattagagagataaacaacatgttcattatattaggtatagaaaaaaagtcaatcatcttactaaataaacgtttgtttaacttctctacacccttaacaagataaggatttttctaaataatcttttcttactgaaaagaaaaaacattatgtaaacatattaaaaaagaagcatcatcgatgcttctttttacgtttctttctatcactgctatattcttttcattaattggcttcaaatgagcaaaccattgcagctagtgttcgcaccatcacgcctgttgcacctgaaggtcctaactcatgagaagcagcggctgttgcagttccagcaatatccaagtgaacccatggtgtttgctctgcaaactcaccaataaaggttcctgccataattgcgtgcccctcccgtccaggagagttatttaaatctgctaccttacttccctgaacacgctttttgtctcgttctgtaataggcagctcccaaatcggttcgcctgtctcaatgctcgctttcgctatttgctgcaataaagcagaatcattcgtcattgccccagttgtatgtgtaccaagagctacaattacaccacccgttaatgtcgccacgtctactaaataatttgctccgtggtgtttggcataggagataccatcagctaacgctaaacgcccttcagcatctgtattcagtacttctattgtctttccattcattgctgtaattacgtcatctggcttaaaagcacgcgcgctaataacgttgtcagttgatggaatgacagctactacgttttgatgaggttttaattctccgatcgcttccattgcaccaagaacagatgcagctccgcccatatctgttttcatacctacaatcccgtctttagatttaatagagtaaccacctgtgtcaaaggtaatcccttttcctaccaacccaataacgtcttcccatttttcttttccttgatatttcaggacaatcattttaggaggctctgcggaaccttgattgactgctaacagtgcgcccattcccaatgtttccatctcttctttttctaaaatttcatattcaaaaccatatgtatgtgccatttctactgcataattagctaaatctgtagccgttagcatattgcttggtaagttaacaagggtgcgcgctgagtttgttgcttttccatacgtatatccaaccaaagcagattgtacaacgtctttataaaaagaaaacagttcaattttctcaagctgcttgtcaggttcgtttgatttctttttgtagttttcaaactcgtacatagcgagctgttgagcttctcctaataaagctgcagtttcttgctctgaccacgctcctgtatcaaatgtagaaagggcaaccgatgcgtttgaaatcttcgcttcttttaactttttaaataacagcccaaagctctctttgagcccatttttagttagcgcttgctttcgtccgagtcccacaaaacaaagacgttttgctcctaattttcctagtgtatgaatcgttgatatacgtttttcttgtacacgtatatccccttctttaatcaaatgaatgagctgtccacctaaagcttcatcaatttcttttagaaggccttcaaattgttggttttgattaaataacccgattacgagcgcttctgtttgatgaacaacaccaaatgtttctacatgcgaaaacataaaattcctcccttttacgtatagagattttatttttatttatcatctgctttgtttaatctattcagcaagtggaatatatatcatattcaccactgttttcatctatatacatatgatagcagaaatacaatttttaatcacagttcaaaaaccttagtttcacacatatactttcatctaccgcttttttcatcatacgggtttagcttttcagacattttaagttgagggaggacgtctcaatggatttattctcaaattttccactttggagttcattaatcgctattttctttgctcaatttattaagattcccctttcttttgtagctactaagaaaatagatggcagcttattttttagtacgggaggcatgccaagctctcactccgcagcagtaacttccttagcaactgcccttgggctagcagaaggtcttaaatcccctatttttgctctctccgctatttttgccattattgtcatgttcgatgctaaaggagtaagaagacacgcaggagagcaagcgacggttttaaatcgtttggttgaagactttcagcgcgcggtaaaagaggcaaagctgtggacgaccaatgaagaagacgaaaaacaagtgaagctaaaagagctgcttggacataagcctattgaagttttctttggagccttaacagggatagcagttgcttttgtaacgtattatgtatggccataaaacataagaaaacacatgaagaattcttcatgtgtttctcgtttattttacctgctggcgaaaaacctgcatcgacttcttttcattcagcattgttaactcttcttcagttaagcggccgtcccctgatttcactacatagacgtttaattcttttttaccccatatgttgtacacatcggaaacagtctcaaaatataaatcaagatgattgcctttaatagccccacctttatctgctaccactccatagccatagcccggaataaacaagatcgtgccgattggaaatatggttaaatcagcagcgatggttgaatacaagtcacgttttactttaacgcccgaatatgtaataccataccctggatgattgggatttttcccagttgattcgtaaccagctgtgtaacccgtagccaatacattcttagttggataacgcgaccaatcaaatgcttcttcaatcgtcagacgctctttgtcattgctagccgcttcagctcttagtggttttagaaatgatggcaagagcctttcattcattagaggatgccctgtactgtttataaaaggcatatatttgatgactgtagttattgggacgccggtaattgcttcatatgttgtaaacagcgctccgaccagtagtaggcacataatgaatcgctttgctatttttccaatcattgtgatttccacaactcctctcacgaatctatttgtttccaacataaaaacaaattattcgtttgcgagaagaatttacatttaaaacatttggtaccctcttgttcgtaaagatttaatggtaatgcctgaagctagtgcacctataaaaccagccattaaaatcgcaatgtcagctgtggctaaagatagcacttttgtccctagctgctgaaaggagtgagcaggatgttgaatgtaatcaaccgctcttacatcatcaataataaaaataaaaattacgggataaataatggccataatccaagacatgcgaagcagcatattcaataagaaaccgattccaaaaaacaaaacaaaaaacaacaagatggagataattagtacaggcacactcatttccattgcttttcgcctccgttactctttatactctcagtttacttaagagtaatgaaggcgtcaatcacagaaaagtaagttaataccaaaaaagcaaaaggcttaaagaccttttgctttttgttttaaaagaaattaaattttccttttttcaatacaagacctgctccgccttgaaggaaaagtgagcgattatcaacaacttttttcataaaagatgcgcttgaaccaaatagttttcgaccatatacaacgccaattgcgtcatcatgccctaacgaacataccgttcctttaatatctggtttgaactcgcttaattctttttgacctttcatcaaacggctaatattttcagcgcaggtaccgccttgctgcatagcaatttgagctgttggcggataaggacgttctgtttcagggttaatcattagtgaacaatctccaataacaaacacatcttcatgccctggtgccagcaagctattgcttacttttacacgtccgcgcatgttctcaaatccagctttttcaatcacatgactgcctcgaacacccgcagcccatacaactgttgctgatttgatttcttctacttggtcatcttttgatacaataattccttcttctgtacactctttaatcgctgttccgatcttgaactcgattccttttcgttctagttgtgttaccgcatattctacaagttctggatcaaaacctggcaaagccgtaggcgctgcttctacacaaataacgcgtactttttcacgcggaatatcaaactctttgcaaagctgagggactcgatttgctaattctcccacaaattcaatgccggtaaagccagcacccccaacaataattgtgagaagttcgtctcttttttccacttcattgttgtacgtcgcaaacacataatcaatatgctcacgaatttgacgtgctgcattaatgctcgtaatggtaaatgcatgttcttttaaacctttaattccgaaagtttctgcttcataccctaaagcaacaactaaataatcgtaagttagctcactgttttcaagaagaacacgcttttcatctaacttaatatctacgaccgtgtctttgataaatgtaaccttatttgtgttaattaaatttttaacaggaacacgagagcgatcttgatgaattgtacctgctgatacttcatgaagccatgtcgtttcgtaatggtaatcgtttttatttaccaaaacaatttccgcatcactagcacccagtttcttttgtaaattaacaattgtcataatgccgccatacccggcacccaaaatgacgattttaggctttttcataggaatgtcatccaccttttttagttatagtcacaagtatgtcttacaaatataatgataagagcaattttatttggtttgcttttttatgttagtttgagcaagaacgatcatcgctatccatttattattcatataagaaaaataatgtgaatcacttcacgttcttttttaaaaaaatacattttttctttttcaaaaaaatgtaagcataagtcctagcttgatttacacaaacatcttatgcttttttaatgggtttttcaaccctttactttgtatttacaagcttttaaattttcaattattttcctgtatacccagttttatatttaaccaaaacgtgtggttatgttaatgattacaaatactgatctttaagttgagaaagtttctcaaacattccagcgtgttttaatgatattttataatttactatgctatcataaagtagaatatgcattggcacagaacaatctagaggtgattataaatgaaagaagataaacaagtatatgatattaccatcatcggaggcggccctacaggcttatttacagcattttatggcggtatgcgtcaagcgagcgtaaaaattattgaaagcttaccacagcttggtggacagctttctgctttatatcctgaaaaatatatttatgacgtagctggttttccaaaagtacgcgctcaagaattagtcaataacctaaaagagcaaatggatcaatttaaacctgcagttgcgctagagcaagccgtagaaaaggtagaaaaacaagcggacggcgtatttcgattaactactaattctgaagtccactattcaaaaacaattattattacggctggaaacggtgcatttaagccccgtaaaatcgagctagaaaacgcagaacagttcgagcaaacgaatcttcattattttgtggatgatatgaataaattcaaaggccgcaaagtattagtatgcgggggcggggattctgctgtagactggtctcttatgttagagccgatcgcagaaaaagtaacgttaacgcatcgccgagacaagttccgcgctcatgaacacagcgtagaaaacttgcataattcatcagttgatattaaaacaccatatgtaccggttgaatttattggagatgaccgtattacacaagttgtgttagaaaatacaaaaggtgaagaaaagacagtagtagacgtagatgatgttattgtaaactttggatttgtttcttctctaggtccaattaaagaatgggacttagatttagagaaaaatgcaattattgttaactcaaagcaagaaacaaatattcctggtatctatgcagcaggtgatgtctgcacatatgatggaaaagtaaaactcatcgtggcaggatttggcgaaggtccgactgccgttaataacgctaaagcatacattgatccaaaggctcgcttacagcctatgcacagtacgtcaatgttctcataaaaaaagcaggctctcgcctgctttttttcattgctggattggtgtaaccattcgatggatgatttcactcatcatttctgcatcactgcttattaaacagatttcataaaaggaatggtttccttcttgactagttacgctcattctgtaggccttcaaaccttcgagcttgcttaaatattttactacctctgattgaccgacaatacgttcaatcagcagaatatgctctccttcaactcctccgtagctttcagccagagatgcattagcattttcataatagcgaatataaggttcagaatggttaagaggcgcagaggacgagttttgatgacaggcttcacctgaggaaaaaggcaaatgttgaacaaataaatgcgattcactgaagtgaatactttttgcatccttagactccattttgctactttcaagttttaaccagtttataaaccccttccatagaataggcagggtattttttttgcgaaaacttccgtaacctcctacttgttccgcttcgtaacgagtcgcatctatcaaatccgttcatctcctcttttttattgagtataataaaagactgattattcagtcaacaagtttggcagatgatgtaacatacaaaaatttctcactaaaaaagctttcttcaccagatgaggtgaagaaagcttcttgataaacatatatttagcactcttcaggagcacctgcgttgcttgctgtacggaaagaagagccgcagccgcatgctgcaatggcgtttgggttatcaattgtaaaccctccgcctagcatagattgcttgtaatcaatttttacatcttttaaaattggagcactttcgctatctacaagaattttaatgccatgttgttcaaacagcgtatcgttttcatttacttcgtgagcaaaacccatgccgtaagaaagacctgaacaacctcctccatttacattaacacgtaaataagcattttcttcttcatgttctttcatcatatcttttatttgaaagcttgcagcttctgtaattgttaggatatcttgactcatttttaaacagacctccttttttgtttagtatacgacgaaatgtctgtgacgacaaatcgtctgcttcttcattttttaataataatacgtgccgtcacaaatcacattggctggacctgtcattaatacattgcctttattttgccaaacaatcgttaaatctcctccagcgaggtgtacgacagtaggaacatcttttttcgtcttctcatttaacacagacgaaacaacagcagcgcatgctcctgtcccacatgcttgagtgatacccgaacctctttcccatacacgaaagttcagctctctttcgttcactacctcgacaaattcaacgttcactccttctggaaaacgcgaatctttttcaaccacgggccctaatgtagtaagaggtgcttgttcaatatcatttacgtaaaagacgacgtgaggatttcccattgatacagccgtcccttttaaccgttcttttccaaattccatctcttcattaacgacctggtcttggcttgctcccgtcattggaatttgttctctagctaaaataggcgctcccatatcaattgtcacttctggaacttcatttccctgcggatgcaccgttgcttctacaactccggaaagcgtttcgataaaaaatctttcgcttgttactaaattatgttcatatgcatatttagctacacatcttaaaccgtttccgcagttttttgcttccgagccgtcattattaaatacgcgcattttcacatctgcacgttcagatggacaaataagaatcattccatccgatccaattcccgtataaacatttgagacttttacagcaagcggtgctaactcttgctcttctatatgttcttcaaacatatttacgtagatatagttgttgccaagtgcatgcatttttgtaaactgaaattttttcatattatcacccattatttttttatgtagctctagtataaagtgattctcttttgtacacaataatatcatcccccgtttttttagctccttaatcataaagattaaggggttttttattttgtcctcctttggagtattaaaaaacaaaagaagcattatgattgtaaagaggatggttaaagcacagatatttgcgcaaaaacgcataaaaaagcacggcaagactagccgtgcttacatcatctattctattagcctcatgtccctcttctgataaaaagagatacgacagcggggatagtttaaaacattgggttttcttctaaatgaatgtaaatattatctactaactgttcaggtgtttccgctgtaacaatctctccgtttaccaaagcaaataaagattgtgaacatttcccgcaataacctaaacatccgtattcaataatatctagatttggatctttttcaagcttttctaaagctgtttgagaaccactggctaaattgctaacgcaaaattcaataattggctgtatcacgtttttcacctctctactattagtttatcctatctcctttcattttcaacgtcaactttggaaattcacgttcattttgcgcacgctttttagcttcacagactttttcaacaaaacgtataaataaagctttattacagggatagcttgaaattatgttgaaacatattgtggttttttattaatttagttatacttttatgtatagaaaaccaaacgaggttatattaaattattatttaagtaaaatatgttatcttatatagcctttcatatctttttggcaaccatccttattaacggtaatttgtactctcctattcttaaaagcaagaataatagagagaaaacaaaaatgcatgaagctaaaggggaaattcacatgaagaaccttgtcatactgggcggcggatacggtggtatgcgcgttttgcagcgcctttttccgaatcaattgcctaacgatgtagaagtaacgcttattgacaaagcaccttatcactcactaaaaactgaattctatgcacttgcagctggaacaatctctgatcagcatgttcgtgttgcttttcctgaacaccctcgcttaaaaattcgctacggctgtgtaaaacgcatagacctgaaagagaaatgcgtctatgtggatgatcaaatgatcgcttacgatgatctgattgtaggactcggatgcgaagataaatatcatggagttcccggagctcttgagcatacatacagcattcaatccattgatgcttcacgagcaacttatcagacattaaacaacttgccggctcacgctactgtttcaattgtaggagctggattaagcggagtagaactagcaagcgagctaagagaaagccgcccggatttaaaaatcatcttatttgaccgcggtaaattaattttatctgctttcccagaacgtttaagtaattacgttcaaacttggtttacttcaaacggtgttgaaatcgtaaatagtgctaatattacaaaagtagaaccgaacattctttataatcatgatgagcccattcaaagcgatgcaatcgtatggacagccggtatccagccaaataaagtggtacgcgatttagacgtagaaaaagatcctcaaggacgcgtcgtattaacaaaataccataacttgcctgacgatgaaaatgtctacattttaggtgattgtgcaagcctaccgcatgcaccaagtgctcagcttgcagaaggtcaggctgaacaaattgtgcaagtacttcttcaccgctggaaaggcgaagcgcttccagatgaattgccaactattaaattaaaaggcatacttggttcattaggcaaaaagcatggatttggcttagttgccgaacgtccaattacaggacgcgtagctcgattattaaaatcaggtattctttggatgtataaacaccatagtggataaaataaaagccgttagatgactgacaatctaacggcttttttcattatgatgcgcagaaaccatacttctccatttcctcaaatacgcgctttaatttcggattgccttccccaacaatttctccattaataaccactacaggatagaataaatcttcttcaatcacacgcttggcaaaggctgcttttttcggatccgtatgcggctcgtttatatctacatatgtgatagcaaacggttggttcggatatttgcgagaaatcgctgcctctagccaatcataggtgtcttttgaagacggcagattaacacagcttgcacaaacaatttcagctccataaatacacacttctacctcagttgattgcatagcacatcccccttgaatctttacatacaaactgtacgattattcacacttttacttcattatgaatactattttacacaaaactgattcattgcacatctttttcttttaaggtaacattacgatgtatactccgatagatttttcatgaaagaccgtttataataagagtagaagaaaggagtcgatagttatgtcagaaatgcacgagcaagttcaagaagtattagaaaaacttcgtccgtttttacttcgcgacggtggagactgtgagctagtagacgtagaggatggtattgtaaagttacgtcttttaggcgcttgcggaagctgcccaagttcaacaatcacgctaaaagctggtatcgaacgtgcccttttagaagaagtacctggtgtagttgaagtagaacaagtattctaatctctttgattttattataaaagcaacctcccattttattggggcttgcgaatgaaaaatcctcattcaaatgaatgaggatttttttattaactcgttgtgacttcagcttctacaaatacacctttgcgatcaatttgtaaaacatctatttcgcagttcggcagtaaagcatacatatgttcagcaatcgcttttccttttcctttcggtgctaaacataatacactcggaccggctccgcttagtgacacaccgtatgcgccgagagcttttgcttcttttcgcacaagagaaagctctggcacgagtctcatacgataaggttcgtgatataaatctttctccataaattcgcctaccagaggtaaatctttatttaacagggctgctactagcatgttcccgattgccccagcttctactgcgtggcgataattaatatccgaaggcagcacatcacgagcatcagttgtttttaattcatattctggaatagccatcacgatatcgacatcaaattcaggtatttgagcaatatatgtttcattttcataatggtaaccaacaacgattccgccgtaaatagaagggctgacgttatcgggatgtccttccattaagctgctgatgcgaagcttttctctttttgataaacgcaagtcacacagtacattagccagctcgattccagctacgatagccgatgcgctgcttccaagtccccttgctaatggaatgttgctccaaacagagaccttcgcacttggaagatcaatgttaaattgacgggccacgtcttgtgccacttcatacattaagttatctgtacttctaggaatactttgcacttctttcgtttcagggataaaaatccattcctcatggcgctctactgttaatcttaagtaacgagataaagccactccaatggaatcaaatcctggccctaaattagcagagctagctgggaccgtaatgacaaaacgctcattttctagcatgaagcaacgacaccttggatatactcaaataccttttcttcatcatttggtaaaaccactggctttacattatgagcatcgattgctacgtttggatcttttaatccgttacctgttaatacagctacaaccgttgaaccctttgcaattttaccagaagctacatctttaaacacaccagctattgaagcgcaagaacctggctctgcaaatacaccttctttgcgtgcaattgtacgatatgcttctaagatttgttcatctgttacttcatcaatttttccgtttgattcttttgctgcgtttacagcataatcccagcttgctggatttccgattcgaatagccgttgcaattgtttctggattttcgataacttgattacgcacgatcgccgctgcaccttctgcttcaaacccgtgcatgtgaggaagagacgtttggtgacgctcactgtattctttgaatcctttccagtaagctgtaatattccctgcattccccactgggatagctaaaacgtcaggcgcttttccaagctgttcacaaatctcgaaagaagctgttttttgcccttcaatacgatatgggtttacagagtttacaagtgcaaccggtgatgtttcacttagcttacgaaccatagaaagcgcttggtcaaagtttccttcaattgctacaatttctgcaccatacataacagcttgagctaatttccccatcgcaatttttccatttggaataacaacgatacagcgcatgccagcgcgtgatgcataagctgctgcagctgcggatgtgttacctgtagatgcacaaataaccgtattgcttccttcttctttggcttttgctacagccattaccattccgcggtctttaaatgaccccgttggatttaacccttctactttcacatgtaaatcaatgcctagttcttttgataaatgagaaagatgaattaaaggtgtatttccttcatgtagtgtaagcataggtgttttctctgttacaggtaaaaactctttatattcagctaatagacctttccacatcatactgtgccaactccctctacgcggtaactgctttttacattttctacaattggtaaatcccgaagctgctgaaggatttcctcataatctttttgagatgttttgtgtgtaacaacaacaatctcagctaattcgcttcctttcacaggaagttgaataattttttcgaagctcacgccacgctctgaaaatagtgttgttaattttgcaaatgctccaacttgatctttaacatgaatgcgtaagaaatgcttcgagaacatttcatcttctgcttttaactgttttggatactgaggcgttaccgcacttttaccattcacacctaaacgcatgtttttcataacacctactaaatctgatacgacagcagtggcggttggcaggcttcctgcccccggtccataaaacatcgtttctccaacagcttctccgtatacatatacagcattgtactcatcgcttactgaagcaagaggatgtgtgtctgctaaaagagttggctgaacactaacttctacattgtcgccgtcacgatgtgcatatccaatcagtttcatcgtatagcctaattgtttactatattgcaagtcttcttccgttacttctgtaataccttgaacacgaacatcgtccaagtcaattttcattgaaaatcctagtgtagccaagattgccattttgcgagcagcatctaaaccacctacgtcagaagttggatccgcttcagcatatcctaaatcctgcgcttcttttaacacttcatcataagcgcttccttcttttgtcattttcgttaaaatgaagtttgttgtaccatttacaattcccatcattttggtaatacgatcagatgctaatccatctgctaatccacgaagaattggaataccgcctgctacacttgcttcataaaataaatcacagttattttcagaagctactgttaacaattctgatccataaactgccatcaaatctttgtttgccgttacaacatgctttttattacgaagggctgttaagatataatctcttgtttcttcaacgccacccattacttcaatgacaacgtcaatctccgcgttatgtaaaacgtcttcaacattcgttgttaatttatcttcactgatttctacgtcacgtttcttatcaatatctttaactactacttttttaacttctacaggacacccgacttgatgacttaatttatcctgatgattttcaataattttgactactccgcttcctaccgttcctaaccctaataatcctactgaaatactttttgtcatattcctcacctctgtgttctttctacgtatacatttgttctcttatagaggacattatagaccttatttttcttttttacaaggtttacttgccatcttttctcgtaaactccttaaaaaaattggtatataaagataaatgtaaatttttaaaatatttcattttattatcataacatggctctcactgttttttaataaaaaaaagacaatttcaccgaaatgaaattgcctttttctgttatgattttttcgcaaacgcttctttatttacaattgtaataggagactcatttgtaagtactgctttaatgtttttaacacataaagaaatcatttccgtgcgcgtttcgatactcgcactgccgatatgaggaagagctacaacattaggcaattgaagaagagggtgagaagcagaaataggctcttgatcgaatacatccaagccagctccagcaatttcaccggattgaaccgcatgtaacaatgcttgctcatcaaccactgctcctcttgaagcattaataaaaaccgcagttgttttcatctgttcaaatgctgaagcattaaataaatgtttggtttcgtccgttaacggtgtcaaacaaacaacaaaatcagatcgttcaagcagctcatttaactcacagtaaactgcatcgagctttttttctgcttgaaggttgcggcttcgattgtggtacagaatttccatatcaaaacctgtagcacgtttcgcaagcgtctctccaattttccccattccaacaatacctaatgttttatgatgaacatctctacccgctaacaaaaatggactccagcttttccactgattttctttcacatatccagcagcttctactaaacgtctagctacactcattaataaaccaaacgttaaatctgctgttgtatcagataaaacatcgggggtattagaaacgataattcctcgttcagttgccgcttctacgtcaatattatcgaatccgaccgccaagttagctacaagctttaaatgaggagcttgcgtaagcaactcactatcaatacgatctgaaagcattgttaatagagcatgtgcgtgcttagctttttcacaaagcagctcatgagggactgcctcatcttctttatcccacatttccacattcgctactgcctttaaaggttcgattaattcattcggtatttttctcgtaataaatacaaacggcttgtccatatgtacgccacctctttatcctttttaaactgcatgcataaaaacaaaatagaaaaacaggtttggattatccaacacctatttttctattttatcatattctatagtaatcgctttttaatgaatccatgttaattcaggaatgtgataacgagacgttgaaatacccaccgactggtaaaagcgcttcagaaaagcttcgtagtgagaagaatgagctaatactccttccagcttctcataatacttttgtttttgcctctcatcttgtacactgtaatacccttcaatgacttcaaaataatgaacgggaaaaagaagtctagcatataacagtctccatgaaaaagaagaaagcggatttaccttttcgtattcacttaaaaactgatgcatgtgcctttcatcgacagcgtatgttaataaatattgttcccttatatattcagctatatctctgctcggatgatcgaagacccaatctgctgggagcttgtaaacgtagtcttccccccatgttttttgcccgaaccgatgatgacaaatcgtcgcagcgtcaactgaacgaggcaaatcgtcaatttccgtgtctactaggtattgaatagcattttccgttaatcctaggtaataaggaaaagtttctaaaaaacgtttttccatctcttgattaggcaaagcacgtaatcttccataccaaaattgctccatctggtcgagacgcttctcccacatggacttccattgccctagccggtttgctttttccacttcataaggaaacagtctccctttttgatgaaaaacagctagctcgtgcccaggtgaaaagttggggtttttctcttccgcaagacagcggcaaatgataaatttttcagtttcagtttctgtaatcatttcaccattcaaattaggcataaatgttgccacatggcgatcaccttggcccatcagaaattgactcatttgatatagttcatttaactcgtcttgttccatttgctttacattaatgattgtatataaaatatctcgatactgaaaaccttcaaatttacctatgggcataaattcatttggacgtaatccgtaatgctcataaatggtttgtatcattttaatccctctcttcattcattcaagaaattatatgatggaaaacaacattacttgtcataatatttacagaggaatgaatagattagaaatacaccatttatagttatttactccgggttagtagtatgaaacaactttagacttaaaaatatatagaaaacaggtgatgatacttggagaaaaaacatacacaaagtgagttagaaaaaaaagcaagagaatggttaatagaacgcggcgtggctcttacagacattgctgaactggtctattacttgcaaaaaaagtatcacccaaacttgacaattgaagactgtttatataacgttgagcgcgtcatttctaaacgagaagttcaaaatgctattttaacgggtattcaactagatgtcctcacggaaaaaaaagttattgagccgcctctgttggatattcttgagaaagacgaaggtttatacggtatcgacgagattttagcattatcgattgtaaatgtgtacggatcaatcggctttaccaattacgggtatattgataaacaaaagccgggtattctagaacgattaaacgataaatcgactggagagtgccacactttcttagatgatttagtaggcgcaattgccgccgctgcttctagccggttagcgcaccgggctgccagccaagaataggttttaaaaacaaaaaaagctgtcaattgacagctttttaaattcgctccatccactcttttagtgaatctaccgtataagttggctttttctcatacccttctagtaactctcttgttgttacccctgtatgaactagtaatgtatctaagcctgcattcatccctgctaaaatatctgtatcatagtaatcaccaatcatgattgtttcttcttttggcgtaccgatgacttcaagggcttgctccataataatactttctggtttgccaataaatactggatttgtttgagtagaaaccgtaataacggacgtgatagatccattaccaggcagtaagcctctttcagtaggaatcgcaatatctccgttcgttgaaacaaaaaaggcgccgtttcgaacgtttaaacatgcttttgctaatttttcatatgtaatttcctgatccaaaccaacaactacgaaatccgtatcttcctcttcaatggtaaatcctttttcaagcagcgcatgtcggattccttctccaccaattacataagctgaagcatttgctttacgttcgtgcaaataattagctgttgcctgacttgttgtaaaaacttgctcttctgttgcaggaatgccaaatgcctctagcttttcagctactttatcgggcgtttttgttgagttgtttgttacaaataaataaggaattcctttttcctttaatttaataacaaaatcacgcgcctcggcaattagctctgttcctttgtacattgttccgtctaaatcaatcaaatatcctttatattccttcatgttgtgtgatctcctttcaagtctcatacttgaaatcatagcttattttttatacaactacaacttgcttgcctttagttacgaaaagcagacacaggtcctaactctgtctctagatatgtccttacgcgctctgaaaatgctgccagtacgtctttatgctgcatcactttttgataaatatcctgatgtttaacatccacatattcttgaacaaggcttttacgcaattgaacgatctcttttaatggcgtttcttcctcttttttaactactttctcatcaactaaaatgtcaatgatatcgtcgtaactgcctggatctctcataataaacccatcaatcattgcatttcctacatctaaaacgttttcaattaaaaggtgtacaattctctctaatgcctttttctctatttctgtgttccagctcgaatgctcagtaaacaaacgaacatgttcatcaaaaaaaacaagcgtggcttctattttttcacgatctacaaagtacatattatttcctccctagttgtcagctctctataaatcttttttcataaacaaacggggttcctgttctattttatcatgacccattatccatttgataaattcatttttgtttttgaccttatttgatatgatacaaatacaacctatgaaaggagtatacctatgagcgaacgcttttatctatatgacgatgttgtatctacaaagacccggtttgtcagctttatgggcgaaaatcaacgatttgatttagctattatccaaaccgaccgttattatggcaaacaagttgttcttgatattcaaggaggacgcttcgccatcattggacaagatgaccttgaagaaccaaactatcttgaagaagtatttaaattaaacagtgaagacggtcaggaacttcgcgaatttttatatgaaatcatctaaaaaaaaaaggcagcgtgaaggacaattagtgtcttctgcttgcctttttttacttatggactttttttaagacaaaatacgcacagccaaaattacaatattcatgtaaatagtcttgaagcgtactaatcttcgtatcatacgttgccttttgatttcggtcatcaaaaaagcctcgcagtcgaagctgattgtatccccaatctcccacaatatagtcatagcggctcagcacgtcaataaagcgacctctaaacgcctcttcattaaatgcctcgcgctcatcttttaatacttcataacaaatattattgatacagaccattgctcacacctcttctcttaaaatttaccataccataattatgatgatgaaaccatcaattaacatgaaatttttcacgtataagcagcactctaatcctgtaggagttttattggtatacctactgatcttttatgctccacataaaggttcgccggtttacctggcgtacgatatttaactacaggaggtggaaatggtgaagaaaactattcttggaatcgctttgataacaagtattttaaccattggctgtcaaaataaaaacacagctgaaaatgaaaatttatcaccaaacaacccagatgccattaatgtaaacgagcctaatcattattataatccaaataataatagcggcacaaattatggatatgttcgatacactaaaaacacaaatgaacaaaattccaatatgaaccaagtaggaacatttaatcgagaagaagcagccgacaatattagtaaactgagcaccgctataccaaatattaagcaagccgctacgctagtaaccgataaagatgtgcttgttgcttataaaacagatgctaaaaacaggaataacgcagccgatcaggtaaaacgtacagctatgtctgtagttcctcgttattatcatgtatacgtctcagataatccgaaacagatggaccaaatcgaaaatatcagtgaaatgaatacgcaaacgaatgatgctagaaaacgaatcgatggagttattcaacaaatgctaaaatctccccaagggcgtaaaatgaacggcggagaagatgcaaatggaagagagaaaaacgaattgaatgaaccgatgacggacaaagatatggtggaataaacgaaacagataaaatctacgttcaccgtaataaaaaaacgaaccactaatcaaacagtttgattagtggttcgtttttcacttcggctaaactacctttgttccagcctctttttaccttatttgctttcttgcgctttgttttttgcagcagcgttaacttgctcatctgcatggtaagaagaacgtacaagaggacctgcttcaacatggctgaatccttttgataatgcaatttcttttagctcttcaaattcatttggatggtaatatttttgaacttttatatgctttttagttggctgtagatattggcctagcgtcataatatctacattatttgcacgcaaatcatccatcgtttcaataatttcttcttttgtttctcctagaccaagcatgatacttgatttcgtagggatatccggctgcatttcttttgcacggcgaaggaactcaagagaacgctcatatttagcacgagcacgaacacgaggcgtaaggctgcgtactgtttcaatattatgatttaaaatatcaggacgtgcctccattacaatacgtaagttctcttccacaccgcccatatcagaaggcaatacttcaattgttgtgaatggatttttacgacgaatcgcacgaattgtttcagctaatacgcttgctcctccgtcttttaaatcatcgcgagctactactgtaataaccgcatgttttaagttcattagctgaacagaatccgctacgcgttctggctcttctaaatctaattctgttggtaaacctgtcttaaccgcgcaaaaacgacaggcacgtgtacatacttctcctaaaatcataaaagttgccgtacgacgaacagcccaacactcatgaatattcggacatcttgcttcttcacaaactgtatgaaggtttttctcacgcatcattttctttaagcctgtgtaattttcgtttgtgtttagcttaatcttcagccactcgggtttgcggacatgctcttcttttgttgccatattatcaactccaccaatctagaaaatgtctataacctatatgcttaattttaactacatattaaaaacataactatatgtcactttatcataaaaaagtgagattcgacaagttgtctgctctttattttcctcagttttcttctatttcccattcaaatgtgtgcgttttcatcctccgtataatttccatttatcttctgaataaaattctttaaaaaagttttgaagcgatttccattaattaatatttatgaaatcttttttctcgctgcaaactagtattacacactttttttagaaagggggaaacacgatgcgcaaaacgattatcttactttttatgttcatgtctatattcacaggatggcaccacgtaacagctgaatcatcagcagatcaagaaaaaatacttattcaaaagagattagagctgtataaacaaatggaagccgctactacgattccttggtattactttgctgggattgaccagtatgaacgaaatattcgacgctctcataaagatattccaagagaaaaaggcgcgatcgccatttattatcctccagaaaaatggtcaggttctttaaatccgaatttggaagatacaaacccacttactatttctctgctcgggggaatgggcaaagatgggaacggagacaaaaaagcagaccaatttaatgatgaagatatgctttttacaatggcagattatattcggacgttcggggtgtccgaagactatattaaaattgcgctttggaactattatcatcgggctaaagcagttgatattattttagggaatgccaaaatttttcgccattacgaacgcattgatttaaaaggttcttcatttccggtgcctctccgtgcgaactacagttatcgtagtacatggggagatgcgcgcggctggggtggcaaacgaattcatgaaggaacagacatttttgcagattacggagttccagtaaaatccccttgctatggcattattgagcttaaaggatggaataaatatggaggctggcgaatcggtattcgtgaccttcataataattatcactatttggctcatttaagcggatttgcaaaaaatttaaaagtaggccaaattgtagaaccaggaacactcattggcggagtaggaagttccggttatggacctcctggaacttctgggaaattccctcctcacttgcactatggaatgtataaagataacggcaaaaatgagtggtcgtttgacccatatcctcagttaagaacgtgggaacgaaatgatcgtttagaactaaagaaaaaataaaaaaacaggaagctgatgcttcctgtttttttatccttatgctttactttcttttgcttttttcacagcatgagcaatactcgcggccaagccgccccatatgataaccatccctacaaccatcattgtcattgaacttccatccattatttagaaacccccttatctttaactgacaaacgaagcgtcccatctttccatcgtgcaaaagaaaaagcaattcccaaaataacagccagagctgccacaccccaaccaaaaggacctacaaaagtcgttgcatactgttcgtaatttcccgaaatatttttccggaagttatcaaacatcatgtatccaagtacaagtggtgtaactactcctaaacatactttccaccatgaaccgattcgaatatcagaaacttcgtttgcatgctgctgaaggctgctcaacttcttaaatacccaagcaactaatacaacttctactaagcctgctagagcaactccgaagttattaatgaaatagtcgatcacatctaagaaataaagtcctccttgtgttgcaaataatagcgagcaaattgaagcgattcctccacctattaatacagattttgtacgtgagatagtaaatttatcttgaatgcctgctacgaaggtttcaataattgaaataagcgacgttaatcctgctaatgttaaggaggcaaagaataacattccaaacagctgtttaaacgctggaaattcattaataatttgcggaaaaaccacaaaggctagtcctacccctccctgaactactttatcgattgggataccttgctgagtagccataaaacctagtgcgctaaacacaccgattcctgctagtaattcaaacgctgaattaccaaatccagtaataaacgcattattagttaaatcagatttctttggaaggtaactggaataagtgatcataatagcaaaaccaacagataaactaaagaaaatttgaccatatgccgcgatccaaacctttccatctccaattgcgctccagtttggtttaaagaaagcatgtagaccttccattgctccgtctaacgtaactgctcgaatgacaatgattaaaaatagaataattagtgttggtagaaaaattttgtttgcggcttcaattccttttttgattccttttaataagacacctaatgtcacaatccatacaagtacaagcggaattaaaacgtgtaatacgaggcttcctgtttgtcctggtgcttcagctaactttaagtaatctccatataaaaacgcttccgtatcgtttccccagcttaacttaaatgaaaagataaaatacgacatcgcccacgcgataatgacggaatagtaaaccgaaataaaaaaggaaatagctacttgccaccagcctagccattcagccttgggacttagtcttgctaatgataaaggagaggaacctttatatttatgtccaatagcaaattccatgattaagataggaattcctgccgtcaacaaagcaaataaataggggagaaaaaatgcccctcctccattttcatatgcagtggctggaaatctccatatatttcctagtccaattgctgaacctgctgctgctaaaataaaccctgctcttgatccccactgcggcctattttccactgtaattccccctcttgttctctccctactctctttttatcgtagatcaacgagaatttttataatttttagattattctttctataacttcctatctcaaattatagaagggagaagatagtatgtcaaaatattttttatagaaaattcacacaaatgttccaatgaataaaagcagatatgaaagtatttttgaacttccgcacctgctttttaaataacactttatcacgttaatataatattgttaatttttcttcggaagttcaattgccggagaagacgaatttccaccgttaaaataatcgggaacatttccagggataacagtccctcctaccggaattgtagccgtaacggttgtttttctcgttgcaaacgggataatgatttgcatgtttacttttactttgatggatacttcaagaaatgcattatttattccatattcctcgatttttcgcactacgtctgtttgaacgtcaccaatagcatgaaatttaaccggaatcagcggacctagatttccaagcagcgcattattagttgcttgcccaagaggaacttggtatacaattccttgattccgcagcttttcatttttttcaatacgaatatctgttggaagttcaagtgcatctaaattccctttctctgcctcttttaaattagcttgaacaaatgacgtagtctgagctctaacccgatttacaagcgctgtgtcaattttggctacttgaccgttaggtgtagattcaaccttaataacatctacgtccagttgatcaagtacctgtttattcaccgctttattaataactaaagttgcaatctcttttgtttgtgcttcagcatatttcattaacgtcggttcaatccctctattaattagccataatcctacccctgtggaaagcataaaaaaaagaaaggtgagcaacagaacgtagcgaaaaggaagcgggccttttcttgttaatttccgacgaagtttaaccaaaaaaaatccctccttacaagctatatgtatgcatgtataaggaggttcacgcttcttttaaaaagttttatcttaaatttcccactatattaaagcattttcaataaagcatctttaccaattgttcctttaaaaattcctcttttttcagcttcaagtgttacagattcaagaggcgcttcaagaagttgctcaattgtacgtacacctacagctcttccagctattatttgacgatcagctaatttatcatttaatagacctacgtccagtgctccgcacataatgtaccctttatccgatgagattgttaacagagttgtttttggcagcaatacggtaactgcattaaacgtatgaccttcaattacaataggcgctaaggtaatcatagtaactcactcctttcttaatcaatttatgattttgaaagaaaaaagtgaggttttacatatacttttctacctatttgacgtttatattccttcttccttatttatataaacttttataggactcagtgctaaaattcattaaaaaaatctaattgtttaggagctaaattctcatattcaatatttaataaactcatgagctgtttggcattatgtacagcatctccgccggagttattattaaataacaggtaaatgtccttcgtttgtttttgcagcttttcaagccgttctttccactctaggagctctttttcattgtaatgatacaaaaaccttactgctcgccaattgccttctgcgggcttattccaaccgtgtacgtttcgtccgtgaaaacggataagtgttttctgtttatctgtagcatgaatcacaattggaatagatccttctcctgcctgcggttcatcacaaataccatgaatccacttctcttgttccataaacgttaacgttttatcatagaaaaatggcttaaaccaagactgatttcgaaactcaagggctactggcaaatctccaaacttctcacggctatatctcaaataggctacgttttctttggtacagtcaaaccaaggtggcatttggaataaaatcatggccagcttatttgaacttacgtatggcttcactgattctaaaaatgcatgaaacatttcttccttgctatcaaacggattcccttctctcatatgccctgtcatgccttgataggcttttaccacaaaacgaaaagattcgggtgtatcattcacccacttttttacatttgatttaggttgaattgcataaaaagatgaatcgacttcaactattggaaaatggcctgcgtatacggcaagcttgtctcttgacgaaacacccgcttcatataatgaatcatgatctccccagcctgtgactccaatataaatcatgccattcctcctctattttcttagcttcgcttttctttatcttaatacaaacgatacaaaaaaactcgtttgcataaacagcaaacgagtttttatctattattaaccgattgaaccttccatttcaaatttgattagacggttcatttctactgcatattccattggaagctcttttgtaaatggctcaataaagcccattacaatcatttctgttgcttcttcttcagaaataccgcggctcattagatagaataattgttcttcagatactttcgataccttcgcttcatgctcaagtgagatgttatcgtttaaaatctcattgtacggaattgtatcagaagttgattgattatccataattagcgtatcacactcaatgttcgcacgtgcaccttctgctttacggccgaagtgtacgataccgcggtatgttactttaccgccttgttttgagattgattttgatacgattgttgaagatgtgttcggtgctaagtgaatcatttttgcaccagcatcttggtgctgtcctttaccagcaagggcaatagataatgtcataccacgtgcaccttcaccttttaagataacagctggatatttcattgttaacttagaaccgatgtttccatcaatccattccattgttgcgtttgcttcacaaaccgcgcgttttgttacaagattatatacgttgttcgcccagttttgaattgttgtatagcggcaatacgcatcttttttgatgatgatttctacaacggcactgtgaagagagtttgttgtataaacaggtgctgtacagccctctacatagtggacgtgtgagccttcatcagcaataattaacgtacgctcaaattgtcccatattttcagagttaatacggaaataagcttgtaatggtgtatcaacttttacgccttttggtacgtaaataaatgatccaccagaccaaaccgccgagttaagagcagagaatttgttatccgttggcgggataacttttccaaaatgctcacggaaaatatcttcgttttcttttagcgccgtatccgtatctttaaatacgataccttgtgcctcaagatcttctttcatattgtgataaacaacttcagattcgtactgagctgatacacccgcaagatacttttgctctgcttcaggaatacctagtttatcaaacgtttgtttaatttcttcaggaacttcatcccaagagcgttcagacttctcagatggttttacgtagtacgtaatttcatcaaagtctaagcttgccatgtctccgccccactgtggcattggcatgttgtagaagtgctctagagatttcaaacggaagtcaagcatccattgtggttcctctttcatacgagaaatttcttctacgatttcttttgttaaaccgcgttttgagcggaaaattgatacgtctttatcggaaaatccatatttataatcgccgatttctggcatttttttagccatcttttattaccccctacttgataggattgggaatgaatgaaggtcttatttttgttcgttaagacctttttccatcgctttccacgctagtgttgcacatttaatacgcgcaggaaattttgctacaccttgaagtgcttcaatatctcctaaatctatactatcatcatactctttaccttgcatcatgtcagagaagatatgggccattttaaacgctttgtctacttcttgacctttaattgcttgtgtcatcattgaagctgatgacattgaaattgaacatccttcaccttcgaactttgcatccaccactttgccgtcctctacttttaaagaaagttcaatgcggtctccacacgtcgggttattcatatgaatgttcacagtatcttcattcaacgttccacgattacgcggatttttataatggtccataattacttgacgatagagagtatctaaattattaaaagccatttgtaaaatactccttcgtttttattaatgatgataccaatttatctacttcttcttccgtgttatacaaatagaagcttgcacgtgcagtagaagatacgtttaaatatttcatcagcggctgcgcacagtgatgacctgcacgaatcgcaattccatcagcgtctactactgttgcaacgtcatgcggatgcacatcttcgatattaaacgtcacaacacccgctcgctctttcggtccgtaaatcgtaattccatctacttgcgataagcgatccagtgcgtactgcgctaacttgtgctcatgtgcttgaatattatctaaaccaacttcttctaagaaatcaatcgctgcacctaaaccaattgcacctgcaatgattggcgtacctccttcaaatttccaaggaagctctttccacgttgattcgtataggtttacgaagtcaatcatttcgccgccaaactcgattggttccattttttcaagaagctctttctttccataaagagcgccgattccagtcggtccgcccattttatgtccagagaaagcaaagaaatcacagtctaaatcttgtacatccaccttcatgtgaggcgtactttgcgcaccatccacaaccattactgcaccgttagcatgtgcaatttctgcaatctcttttactgggttaattgtgcccaatacgttagatacttgcataatcgatacaattttggtgttggatgtaatcgtgctttttacctcttcgagtgaaagtgcatgatcttctgttaatgaaatatattttaacgttgcacctgtttccttggcaacttgctgccaaggaatgatgttgctgtgatgctccatataagtaatcacaatttcatcaccaggtttgagattagcacggccatagcttgcagctactgtattaagagctgtcgttgtaccacgcgtaaagataatctcttccgttgattttgcattaataaacttacgaaccttttcacgggcgccttcatatccgtctgttgctcttgtaccaagcgtgtgaacacctcggtgtacgtttgagttatattctttataatacttctcaattgcttcaattacagcaagcggcttttgtgaagttgctgcactgtctaaataaacgagtgggctgccatttacctcttggtctaaaataggaaattgtttacgaatatcagagatattcattatcgaactttcctttcaattaaatctgttaattgctttttaaccgtttcgattggcaactcgtttacaactggtgctaagaacccgtggataactagacgttctgcttctgtttgcggaataccgcggctcattaagtagtaaagctgaattggatctacgcgtccaacagatgcagcgtgtcctgctgttacatcgtcttcatcaattagaagaattgggtttgcgtctccacgtgctttttcacttaacattaacacacgagattcctgctcagcgtttgatttagacgcaccgtgttcaattttaccgataccgttaaagattgaagacgcgctttctttcataacgccgtgttttaaaatgtagccttcagaatgttttccaaaatgtacgatacttgttgttaagttttgagactgctctccacgtccaactgttaccgtttttgtatctccatatgaaccgtcgcccattagatacgttgtattttctgaaactgtatttccttcactcattaagcctaaagcccactcaatgcgaccatctttgcccgctatgccgcggcggttcacataagtagttgtacctttagctaagtagtcaacagccccaaatgttacttttgcattgctgttagcaaatacttccgtcacgatattgacaacaccgtttgactcttcagcagtagcaatgtagttttctacatatgttactgagctgttgtcttcagctacaacaatcacatggttgaataaagcagcttcttcatcttcacggacaaatacagcttgaagcggctcttgtacttctacatttttaggaacgtatacaaatacaccgccgtttaataacgctgcgtttaatgcagttaaacggtgctcatctactttaactccgtctttcatgaagtacttctcaacaaggtcgctatgctctttagcagctgtttgaatatctgtgaagataacgccttgagactttagctcttctgttaatgttgaatatgcagctgtttggtcacgctgaacatatagatttttaacagcttctgtatcaatcaatgctttaaccacttctggaagctcttctacagatgagattgtgcttgcctgtgaagtgtgcttgtcaaatgcagtaaagttccatttcgaaatgtttgttttatctggctttggaagtgcaagatcttctgctttcgcaagagcttgtaagcgaagatctagcagccaacttggttcattagcttcttttgaaaagctgctgatgtactcttgatcaaatggtaatttcgtatcaatagtcatagagatcctcctaactcttaagcttcttgctctacagtttcgtcttcaatacctaattcttgtttgatccaatcataaccttctgcctctagacgctgtgctaattctggtccgcctgattttacaacgcgaccttgcatcataacgtgaactttatctggtgtaatgtagtttagtaaacgttggtagtgagtaatcattaagcaaccaaactcgctgccgcgcagttcattaataccttttgatacaacttttaacgcatcgatatctaaaccagagtcgatttcatctaaaattgcaattcctggttgaagcatcattaattgaagaatttcattacgtttcttctcaccaccagagaaaccttcgtttaggtaacgctgagccatgtcttgatccatttctaagaaatccatgtttttgtctaattgacggatgaatttcattagtgaaatttcttcgccttcttcacgacgagcattaattgctgaacgtaagaagtcagcatttgttaccccgctgatttcacttggatattgcatagctaggaatagacctgcacgagcgcgctcatctacttccatctcaagtacatcttcgccgtctagcgtgatgcttccttgtgtaacctcgtatttaggatgtcccatgattgctgaagataatgttgatttaccagtaccgtttggtcccatgattgcatggatttcgccgcccttaacttctaaattaacaccttttaaaatttctttaccttcaattgcaacatgaagatctttaattgttaaagttgaccctgccatattaaaacctccagttatagacgtatatagtaaaaaacgatatacctatatctttttaattattctcattttattctcattacaatcttataacaaatgaaaacttatagcaaccttttgacccaaaaggttttaatccattatgtacgtttttcaagactaaatccactcataaaaaagttgccttaaaagactccatagagccttctaagacaagtttttttacccgctttatttacttagtgcgtgtggctagtcagttctgaaatacactcttggacaagcgtaacggactgactcatcgctgcgcctccgccaaatgcagctgacactccgcatgcttctaaaatttcttgctcagttgcaccttgatcaatgcagccttttgtatgataaatcatacagtactcgtcttgagctactacgctgattcctaacgcgattaactgcttttcttttttagaaagagaaccttctccaaaacatgcttcagtaaacgcattaaacgtttttgttacttccggcaatttttcgctaaatttcccaacacccattttataatcatgaagtgcttgctcagttgaatgacgtgcttcttgctgcataacgtcagctcccatcatcagtaaagttttcacggttagtatgcgtgagaaaaataagagttattcgttttcccgcatacaaaaaaagcacttgctcatagtgggcaagcgcttttcttctattatttatttaccggcagtactccgcctttgtatttttctttaatgtagtcttgaatttctttagagtgaagaactttcactaaagctttcaccgtatctttattttcgtcgcctttgtgaaccgtaatgatgtttgcataagggttattgtctttgctttccactgcgattggatcttttactggatctaaaccagcatcgatagcatagttagcattgataacaacagcgtcaccttcattatttttgtacatctgaggtagcaatccgccttcaacatcggctttaaattttaaattcttcgggttttctacgatatctttaatttgtgcatctgttttctttacgcctggttttaatttgattacgccggctttttcaaaaatcgataaaatacgtccttgctctgctactgcatcacgcataataactgtgccgtttttcggaagatcttttaagcttttgtattttttagagtagataccgattggttcaatgtgaatagcaccggcacttacaaaatcataccctttttcacccttgtgatcttttagcactgaattcatataaggaacgtgctggaagtagtttgcatcaatttcattgtttgcaagagctgtgttcggtaagatgtagtcttggaattttttaatttctaagtcaattccttgtttttctaaaatcggttttgcttgttctaaaatttcagcatgaggcgtattagaggcacccacaacaattttcttttcatcttttgatccattgttagatccacacgcagctaatcctactattagcgcagatgttaatgctaaagccgaaagccattttttcataataaataatcctccctttatcttttatcaatttttgcagtaatcgcatctccaataagttgaataataaatacaataatcaaaattaagatcgtagcagctagcgttacatcgttatgactgcgctggaatccttctaaatatgcaagattaccaagacctccagctccaatcacacccgccattgccgtatagccgactaacgcgatcgtcgttaccgtcaaaccagaaattaaagctggcagcgattcaggtaacagcactttaaagataatagtgcttgttgttgctcccattgatttagcagcttcaataacacctttatcaatttcgcgcagaccaatttctacaagacgcgcataaaatggtgctgctccaacaattaaagcaggtaacgctgcattagcgcctaaaatacttcctaccaacgctttggtaaatggaatcagtaaaacaattaaaataatgaatggaatggaacgaaagatatttacgaccgctgacacaatggcatataaaggtttgttttgccaaagctgtcctttggacgttaaaaataaaagcaagcccaataaaatacctagaacaaacgtggctataactgaaatagccgtcatatatagtgtttcatttgtcgcttgaataaaatcatctaaaataacgtttggaaatagtttctcaagcatttgtcattacctccacttctacctgctgctcatgaatgtatgtaatgactttttcaacttctgctaattctccgtctaaatgaacgaacaacgttccgtatgaacctgtttgtgtatgcgaaatcattccttgcaaaatattaatcgttacatcaaactgttttaaaatcgttgtaatgaggggttgctctgcttttccgccaacaaacgtcagctgaataatttgcccgcttggatataactcctgtacttgttcaattgtttcaaacgtttcttctggttcagaaatttgttgaacgaatcgctttgtaatcggctgcttaggttttctgaatacttctagcacttgtccttcttctaccactgccccattttccataacggctactcgatgacaaattttacgaataacgtgcatttcatgagtaatcaatacaatggttaaccctagcttctcattaatatctactaacagatctaaaatggaatctgtcgtttgaggatcaagcgctgatgttgcttcatcacacagcaatacttttgggttattggctagcgctctagcaataccaacacgctgcttttgtccaccgctaagctgtgatggataagcattttcacgtccttcaagcccgactagcttgataagctcgtctactcgtttcattcttttttcttttgagatccctgctatttctaacggaaaggcaatattttctcgcaccgtacgcgaccacaagatattaaagtgctgaaataccatactaatttcttgtctagcttttctgagttttccgcctttaatttttccaatatcattacctgctacttcgaccgttcctgtcgttggtgtttctaacccgtttagcaagcgaattaaagaacttttccccgctccgctataaccaataattccgtaaatttcaccttggttaacggttagattcacattatcaacagctgttacttgaccgcttttagcctgataaatttttgtaacgtctgttaatgtaatcatatttcttcaccttctttagtaaaaactcaattatgttaggttgccctataggatgaaaaagccgtaaaacaattttccccattaaaaaagcctctctgcgcatgacagaaaggctcgatatttaatcctttctctcatctttcaaagcgcatagctttgcaggaattggcaccatttcagttagtctgacggttgccgggtttcacagggctcagtccctccacctctcttgataagagttcgcaacaattattttgtttttggaaatattcattcatttatgaacattcatgagtgtgattttagcatgtgtcagataggctgtcaacagattttactcttgggataatatcccaagatttcaacagccccaacggtttgctctctttcaatttcttcattttaaacaaacgtttgattatcgaagctcttcaagtacgtgctcgatggaatgaaacgcatagagtttttttaccatttcgccattttccacttcaatcaaacaaggtacactttcaattgaaaatacttctgcttttgaaggcatataatttaaattgctcattccgatggtcacatcgggcagcatcgcttctgctacggttaacattttttttgccagctgacatgtcccgcaaaaaggcgtatggaaaaagataaacgctctttgtccttcttttaactgatcgtcaagctgtttttcgctccattcttgcatgttgctcattccttttatgttaaaaattctgcattaacatcgatattggcactcagtaatactgttgctatgtgatgtctaggggcggcagcaacttctcggtacattttatcaatatatagatgctctgcttccggaagctctcgtttaaattgttttcttagcttattccctgaatcatcagagtcaacgagtatgtatacctctttgttaaacgtacagtcaataatttcatccagctttgataaactaatcgtaccgtttgtacagataatttcaattggttctcgaatgatatcttgaatacgttttttatctgattttccttcgacaataattactttttcgatttcaattagccccattttcatcacccataatcgtcagttgtatagtaacatcatttctttatgctatacaatattcgttaatgtatcacagttcacctgttttttaaaagaaatttgcaagaaagaactgttttaaaaggcagcttaggccatattgtttccataaaacaagaaaaacagcggcagttgccactgtttagcaccatcctgcttcttcgtcgcagtctgtatatttttgcgtttcaccttgcttttgtacatccgtatattggtagaacttattattttcttgcgaatacccttcttcaaagcggtattcattgccgcttgttccgtaactaacttcaccaattggctgcttattaacatataatttcataccgccgtcatgaaatttagctgtaacgcgatctgtaacgtccattttttgtttttcaaacataaaaagacactcctttagcttgtttactaatagagtgtccagtcaaaaacttttcataaagacaatttatggaggaatattatccttcgtttgtcatttcttcgtattgctttgctgtcattagcttgtctacttgagaagcatcagatggtttgattgtaatcatccatgcttcttcgtatggagattcattaacaagttcagggctatcgcttaagttgtcgtttactgctacaacttcaccgctaattggtgcgtaaagctcagaaactgtttttactgattcaacgctgccaaacggctcgtcagcttctactgttgctcctacttctggcagttcaacgaatacgatgtcgccaagctcagcttgagcgaaatgcgtaatacctacgcggacaacgtctccttctgtttttacccattcatgctcttcagaataacgcaaatcttttggtgtactcatcttaatccctccaaaatatgtatcgtaatttgtttatataaaaagcgccttcaacgtggagaacactttctacaacctaaaataacttcctattaacagtgtaacgtaaaaggtaaaaattttctatttgaaaactcacttccacacgtcttcaaactgctcttctttgaaaccaagcgttactttttgtccatctgttagcagcggacgcttaattaacataccatctgacgcaaggatagacagaagctcgtcttcacttgcactgcttactttatctttaagccctaattcgcgatattttttaccgcttgtattaaagaatttttttaattctaagccgctgttctgataataagactgcagctgctcttttgttggcgggttttctgcaatatgaatttcttcatacgctactccgttatcatccagccacttctttgcttttcggcacgtaccacactttggatatgaataaaaaaataatgacatttagtcaaccaccctttattttaagcttttttcgtattttaacacatcctttatcatttacctagatagaggcttcttaaacaaaaaggagctcgcaaaacgagctcctttttccttaaactgtgaacttctctacttctagaagtgtttttgcaatctcgcgctttacgctaatcacattaattggtgtatagcgagttaacttgcgaagagacgaaagcatgactctaagcatatcaccttgttcaacgccaattaacgtttcttttgcatctgcttcgattcgattaaatgcttcttggcagaatacttgtgtatattttacttttaagctgttttgatctgctcctgttttggaaatggctttttcagtacgcaaaacagtggattccattgcatatacgttactaatcatatcggaaatattaacgagaatttcttgttctttctctaattctttaccgtatttctgtgcagctaggcctaaaagcaagagcgcaattttcttcccattttgcacaagcattttttcttgatctaacggctcattccctacttcctgtggcataagcatcatcaattcttcttgaagcgtttgtgctttttgaagcagcggaagctctccttttagcgctttgcgtaaatacgtgcctggtactaagagacgattaatttcatttgttccttcaaaaatacggttaatgcgggagtcacgatacaggcgctcgatttcatactcactcataaaaccatagcctccgtgaagctggacgccttcatctacgatgtagtcaagagattccgttgcaaacactttatttaatgagcattcaatagcatattcagcaatggaagccgcaatttgttttccgtctttttgctgttcttctgaaagctggcccatatggtcttcaaaaagtcctaccgtacgatagacagagctttcagttgcgtacaatttagaagccattgttgctaacttttcttgggttaatgaaaatttagcaatgggcgttttaaactgctgacgctggttaacatattgagatgtaatttctaacgcacgtttacctgctccaactgctccaactccaagcttatagcgcccaatatttaaaatgttaaacgcaatcacatggccttttccaatttcacccaacacgttttcttttggaacaagcgcatcttcaagaatcaatgttcttgttgatgaactcttgattcccatcttcttctcttccggtccaaccgaaacgcctgggaattcgcgttcaacgataaaagcagaaaatttatcgccgtcgattttcgcatacactacgaacacatcagcaaatccggcattcgtaatccactgcttttctccatttaacacatagtgtgtgccttcggcgttaaggcgagctgttgtgcgagcaccgagggcatcggaaccagaaccaggttctgttaacgcatatgctgctattttttccccaactgctaaagcaggtaaatatgcttgtttttgctcttctgttccaaataagacgattggcaatgacccaattcctacgtgagcaccatgagtgatggaaaatccgcctgctcgagacattttttcagcaattaaagccgaggtaattttatctaaaccgagtccaccgtattcttccggtacatctgcaccaagtaaccctaattcaccagcttgttttaataactttacagaacggtcaaactcatgcttttctaaatattccacttgtggaaggacttcattttctacaaattcatctgtcgttttggcaatcatcttttgttcagatgtataatcctccggcgtgtagacgcggcttgcatcgccttcttcaattaaaaagcttccacctttaatcatttgttttgttttatttgacatgttcatatccccctttgaaatgattatgctaacaattcaaatacaccagcagctcccattcctccgccaatacacatcgtgacaattccaaactgttcatttcgacgctgcatttcgtgcattaagctaagagtcagcttagctccggtacagcctaatggatgacctaaggcaatagcgcctccgtttacatttactttatcttcattaatatttaattcacgaataacgccaagtgcttgagaagcaaatgcttcatttaattcaaacaatccgatatcagaaagctccagccctgctagtttaagagctttagggatggcagctaccgggccaatccccattacttcaggcggaactcctccaactgcaaatgagcgaaacttaagcaaaggctttaacccttctgcttcagcttgttctttatccattagaaaaacggatgcagctccgtcacttgtctgcgaagagtttccagctgttacggatcctttaaccgaaaaagctggacgaagtttccctaatacatccgcagttgtgccaggacgaactccttcatcttgagagaacatcagcttttgttcacagagcttattgttttcatccacttttcgaagcgtcacttccaccggaacaatttcgtcgttaaacttcccctcttgaagtgcttttgctgctttttgatggctgcgtacagcaaacgcgtcctggtcttcacgtgaaatgccgtatttcatggccacttgttctgctgtatgtcccatgcccatataatactccggcgcattttcaaccagctgaacattcggacgcgctacgtttccaaacatcggaacaaaactcattgattctgctcctccagctaacactgctttggcttgccctaacataattcgttctgcaccataggcaatactttgcaaacctgatgaacaataacgattaatcgttattgctggcaccgtataaggcaaacccgcaagagcgccaatatttcgagccatattcaaaccttgttctgcttcaggcatcgcacaaccaataattaaatcatcaattggtccttcgtatcctcctgctcggcgaagagtttctttaaccgcaatggctcccaaatcatcaggtctaacacttgccagtgaacctttttttgcttttccaaccggtgtcctagcacctgctacaataactgcttctctcattttttctcccccttaattacgcagtggttttcctttaactaacatgtgctgcatacgttcttgagacttcgcttctccaacaaggcttaaaaaggcttctctctctaagtccagcaaatactcttcatcaacttccgaaccaaacgctacacgtcctccggctaacacaaatgctaacttactagcaattttataatcatgttctgatatatatcctgaatacttcatggattgagctcctagcagcaacgttgcatatcctgtttctccaaccacgggaatcttagttcttacaggtggtttatagcccgtgtcatgtaaagcaaggactgagttcttcgcatcattcagcaagtgatctccgtttacgctgatgccatcatggcggtttaaaaagtttagctgtctagcttctgcagcagaagtagatacttttgcagtagcaattgtttcaaatgttttattggcaatttgctgaagatcgagcgttacaccgttaggtaaaccatttagctgttttatataaagctccttattacctcctccaccaggaatgagtccgactcctacttctacaaggcccatgtaagtttcagcagaagcttggattttagctgacggtaagcaaatttctgctccgcctccaagagtcattgcaaatggagctgcaacaaccggcttttcattatatttcaccttcatcattgcctgttgaaattgtttaataacaaattcaatttcaaaataattgtcatcttgtgcttccattaaaatcatagctaagttagcgccaacgcagaaatttttcccttgatttcctatgaccagccctttatagttcttattcacttcttcaagagactgatttaataagctaataatatctagcccgattgcattgttaggagaggtgaactgcaggcacgccacatcatctcctaaatcaattaaactcgctccgctgttttctaaaatgacattattttgagaacgtaaagatgacaggtgaatcacctttttattttcttttactgctttatactcatcatcttcgtagtaaagcgtttgaccttccatttctttatagaagcttgtaaatccattttcctgcatttgttttacccattgcggaactgctaaaccagactgctccatcttctcaattgacttttctaaaccaattgcatcccacgtctcaaaaggacccattttccagccaaatccccacttcatagcttgatcaatggccacgatatcgtcggcgatttcattttttaactgtgctgcatatacaagaacgggactgatcacattccaaagaagctggccggcacgatcgcccgaatatataagcgctttcattttattttgcagcccttttgcctgcttgcttaattcggtagaagctgtttttaacttctttcgctcgacgtattgaagtgtactaggatcaagttccaaaatttcctttcctttcttcaaaaagaagccttgccccgacttgcttcccagccagccgttttcctgcatttgtttcataaataaagggacatcgaacacttctttttctttgccttctactttgtcaaatacattgttggccacatgaataaatgtgtctagtcccactacgtctagtgttcgaaacgttgcgctttttggtcttccaattaaggggcccgtcacagagtcaacttctcccacgctgtaattaccttttaacatttcttgaacggtcacaagtaaaccgtacgtaccgatacggttggcgataaagttaggcgtatcttttgcaataactactcctttacctaatacatcttcaccaaacgttttcatatattcaacaatttctgattttgtgtcatgagttggaatgatttctaataactttaaataacgcggtggattaaaaaagtgcgttcctaaaaaatgcgctttaaaatcttctgagcgtcctttagccatttcgtggatcgatattcctgaagtatttgaacttacaatacttcctttttttcgtacactgtcaattctttcaaacaactgctgtttaatctcaagacgttccactactacttcaataatccaatcacagtcgcttaactgctgtaaatgatcttcaagatttcctggcgtaattaacgacagtgacgacttagacgttaaaggcgccggtttttgcttcgttaatttagctagagcagttgtactcaaccgatttctcacttgcctatcttcaagcgttagctgttttttttcctcgtctgctgttagtgaagttggaaccacgtctagcaaaagcgttggaattcctacatttgctaaatgagctgcaattccagagcccataactcctgaacctaaaacggcggctttttttatgttcataattatccccacatcccctttaatatattgaatgaatggtcattcattttatgcgtaaaaaaagagagtcactgttaatctctgtttttactataaaacattttttaaattttcgcaatatattcacaatattatctctaactatttttaatgtgtttggttatcttaatacacaggaggtgattttgtgagcaaattaaagaaggatccatcgtcagcaggcgtaagcgcagcaagcgttaaaggaaatgctggaccggtcaatgaaccgcacggacgcggcaaaaagacatctcaaaaccaacagtacacaaagcataacactcaaggacattaacctcaaaatcgaacatgagtaatcgaatcatgttcgatttttgattatttcttactttatcatcacgaccatttcattattatttttttacaattccttttaagacaaatgcgacatttgcaggtctttctgcaaggcgcctcataaagtacccataccagtccgttccataaggaacgtacactctcattttatattgttctgctacgagctgaacttgcctttctggtcgaatgccgtatagcatctgaaattcaaactgattcattgaaattccatgctttttaacaaactcttttgcatactgaatgattcgttcatcgtgagtagcaactgctgtgtagtgaccgtttaataagtggagtccaattatgtttttgaagttttcgtctacgtcttctttatcaggaaacgccacgtctgctgcttctttgtacgcccctttcactaaccttaatttaggagcataagcatctaattcacggacgtcactttctgttcgatataagtatgcttgaagcaccgtccctacgtgttcatactcattttttaattgtttaaatagcttaatcgtcttgctgcatcgcttatagtcctccatatcaatcgtcacaaatacgctatatttttccgcttcttcaagaatacgccgcatatgatgaagtgccaaatcctctgaaatatccagtcccatagacgttaatttcaaagaaatttctgaatctaatctttctttgtgtataaggtgaatggcctttatgcattgagctgcggcatgatcaacttcagcttcactttccacaaactcgccaagataatcaatcgttacttttaatccctgttcatttagcttttttatcacactaacagcttcatcgatggtttcccctgcaacaaaacgtgctgctccaaaacgtaagccatagcgcttagccagctttgttaactttttgctttttgataacaataaaaaaaagtttcttatcgtttgttccaaagcaaccccccgccttcacttgtcatacgcctcacaaaatttatttaattatcattaattttaccattttttaaactagatagataggcaccctttattaacatatgcatacaaaatcaaaaagcgaccgagagcttttggataaaaaaacatccatcagctttgtgatgaatgtttttattccggttttcgctgtgacgctcgatgcgcttcattcagctcttttatttccttcacaatctcgaccatttccgcttttgcttctggatataattgattccaatgctttgttaaaggcggcatggattttgagatatggttgtaaagtgcccacattttcactttttcctgcagctgttcgtcactttgaccaaccattagttccgtatacttttcaatcaaaccgtcgaattgctcttgaaaggttttactcatgcacaatcactcctttctttggtttacaaataaccggacacgttcgacaataagtcttcttatctcctgtttggtaagacaaacagcacgtttgccgacctcttatctcctgcttttgcttctctacatatggaggaggtgaactgtacctagcaaacggattatgatggtatgaaccaaagtgatgaccctcagcttcttccaacacgtatcgtaaattcttttgtacttgcacattttctatttcttcatttgccaaaagcaaatcataaagccagtggatataaacagctacgttttcccacagcgtcagcttcgagatttttgtcactttacgcagcgatgaccatatcggctcaatgtgatgagcaaacaattcatcaagaagttcatcaagaagaattttccgattgtcctctgttacttctttcgtctcaatttctgagataaacacttttgggagccacatcgtttcagcgtcttctgtatgcaacgaaacatttttagtcgatgcatttatctttttttgaaacacaataaatgaatacaaagccgccaccacaacaaagctataccgcttcgctaacatggaagcagctgctctcaagttatcagcctccatcgtctgttgaatccacagcagctgcatcctcagcgtgctttcgtccatgcagctggagggagacaacctatacagcgagttatctttaaacgtacagcggaatttttctgctaactcgctttgctctttcttattgagcatgctgcgtttcaacgcgcagcttattcacaatacatcgtccgcgcccatgaggaatacaaagaggcgttccaaataacggatccaccgtcacttcacagttcatattaaagactcgctgtactaaatcgcagttaatgacttcttctggtcttccctgtgcatagatttttttatcttgaagcgccacaatatgatgagcatagcggcaggctaagtttaaatcatgcagcaccattacgatggtacgattttctttttcattcagttcaaacaacaagtccaagatctcaatttgatgcgtcatatctaaatacgttgtcggttcatcaagtaaaataatatccgtatcttgtgctagtgtcatggcaatccatgcgcgctgacgctgtcctccagaaagcgaatcaacttgccgatcagccaagtctgctaaccctgttgcttcgagtgcattttgtactttttcttcatcttcttgagaccactgacggaaccaattttgatacggatagcgcccttgtttaacaagctgaagcactgtcagcccttcaggtgcaacaggaccttgcggaaggattgctagctgctttgcaatttcctttgtcggaagagaggaaattttagagccttctagtaaaatagagccggcatgtggctttaataatcttgctagtgaacgcagcagcgtagattttccgcatccattactgccgataaaaaccgtaatctcaccctttgggatggtaacgtcaagctcatctataatcatcgcttctccatatgataatgttagcgattttgtttctaacgaatgcatgcgaatcgctccttctacaaagaatgctatacgtttctttgtttgtatagtaaataaatgaagtacggtgcgccaattgcagctgtaaatacacctgctggcacttcgattggcaagaaaaatgttcggccaattaaatctgctgctgtgattaaaatcgctccgattagtgccgatagcggtattaaagctccgaatgaagaacctaccagctttcgggcaatatgtggagcaagcaatcctacaaagctaattccgccggcaaatgcaacggcgcttcctgttaaagctgtactcataagtaatagtgccaatcgatttttttgaacgcgacttccaacgttagtcgcaatttcttcacctaattcttgaacatttaaatttcgaatcattaaaatcgtgattataaccaaccctattgtaacaggaactagtacggaaacactggcccagtttgagccatacaccgttcctgtaatccaaatatttgcctggctggcgcggtagataggacccataatcataaacagcgtggtcatagctttcgttaacgctgttaacccaattcctattaatactagtgtaataggagagacgccatttttccaggcaaacacataaagtaaaagcgccactgccactgcacctaaaaatgcgctaacaggcatccaattaatacttacggttaacgagttgcttttatcactaaatagtgtcaaaaataacaccacaccgactgaagctcctcctgttaatccgattaagtctggtgaagcaagcggatttctcacaagcccctgcaagatagcacccgcaatcgctagacaaataccggcacaaatggcaacgataatgcgcggcagtctaaaggatgtaacaactaaccgttcaaactctaatccatgacccgctaaaatgttaatcacccgaaatggattgataaataagtcacccgtacctgcacttaacaaaaaaagtgcaacaagtgcagctgaaaatccggtaatgatcaaagctgcttttatgttaactaaaaatgaaatctgctttaagcgaagagataagtatgttttcatgacgccttcgcccctttcctcgccaaatagataaagaaaggtgtaccaataacagcagtcatgactccaacagggatttcttgcggcataatgacatatctggccgcaacatcagctaataaaattaaaatgccgccgacaaccgcactatagggaaatacccagcgataatcttgtcctacaattgctcttacaacgtgaggaacaatgattcctacaaaactaatcggaccggctactgcaacggctccaccagctaagatagcaataatgatgccgcttataattttgacaagcgctgttctttgacctaatcctttggctacatcttcaccaatcgttaagatattaatttttgaagcaataaaaaaagtgataattattgctggcactatatatggtagtatgccatacagcatttctaccttgcgtccttgcacagacccagccagccaaaagagaacttgatcaagcgaagattcatccacagccagcagtccttgtgttaaagaagagaaaaaggctgcaatagccgctcctgcgagcgtcaatttaataggcgttaatccttcttttccgatggacccaagaaaatagacaaccactacggttaatgccgctcctataaatgcaatccatgtaaaagcttgaagtgaattgaccgaaaaaatcatcactgcaacaacaataaaaaagctggccccagcgttcacaccaataatatctggtgaagcaagtgggtttttcgttaacgcctgcatcattgctcctgcaattcctaaacaaatacctaccacagcaccgattatagcgcgcggcaatcgaatattttgaataactatgtgctcattcgaaccgttaaacgcttgaaaagcttcaaatgctgtcttgatacttgtatctgtgtatccgagtacgatacttaatccaatacagattaaaagcagcatgattccaatgatgagccccattactttcatttgaacactgcgtagcatcattttcattgctctcctctaagatgattcctatatatatctaacctttagtttaggaaacattgaaaaaagtgtcaatgattttgagaatcattttcaatttttaattgacaccgcttaaaagttagaatattatcttaattgttaatgaaaatcattatcacttaagagggggaaaagatgtgaatacatattctaaaggcaagttgtcatatttgttatccattcttaccattatgacactgcttgtgctggcagcctgcggtaattcaaacagcgctgacggcgataaaaaagaaaaaactgagggttctggcgaaacttatacagtaaaacacgcaatggataaaacagatattaaaggaacacctaaacgagttgtcgttttaacaaacgaaggtactgaagctcttcttgcaatgggtgtaaagcctgtgggtgctgttcaatcgtggttaggaaatccgtggtacgaccatattaaaggtcagatgaaaggcgttaaaagtgtaggtacagaaagcgagccaagcttagaagcaatcgctgctttaaagcctgacttgattatcggaaataaaatgcgccaagaaaaagtatacgatcagcttagtcaaattgctccgactgtattttctgaagagctacgcggagactggaaatcaaactttaagctatatgcaaaagctgtaaataaagaagaaaaaggtgaagaagtattagctgactatgacaatcgcgtagcagatttaaagaaacgtcttggtgatcagttaaaacaaaaaatctccgtcgtacgctttacagctggagacgttcgtatctatcataaagattcgttctcaggtgttattttagatcagcttggatttgctcgtcctgaatctcaagaaaaagatgatttagctgaaatgaatgcaacaaaagaacgcattcccgcaatggacggtgatcagctattctacttctcctatgaaacgggagacggtgaagcaacaaagcttgaaaaagaatggataaacgatcccctctttaaaaagttaaaagtagctcaagaagaccatgttcataaagtagatgatgctacttggaacacagcaggcggtatattagcagctaatatcgtacttgatgatattgaaaaaatcttcttagataaaaaagagcaataatatgccaaaagagcttcgatttatcgaagctctttttacatgtataaagtattccctttcatcgcacactaaccgtggtctcactttattaaataggagtggtgaaaatgaattcaaaaaaacagcctaaaaagcagcctgatacaaatgaaatggctgaccgtcagttcgaaacggaagattataaccgacaagatgcactctcacaaggtctagcagaaacacatgagcaagtaagcgacgcctatcaagaaggatcatttgaagatacagatcgttaataaaaaaagagctgactctaagtcagctcttttttattttgaatgctgccatgccgttttaggcaatgacatggacatccactgctggcgctttgatttatcaatcgttactttctttgctttaattccttgttgaatcagctgtttcattagtttatcaattgacttcatcgctattcacctcaaaagcggaaatttgttttgcttctacttttttacttttttgcgcttaaacttcataaaaaactcatagacaattggaacgataatgagtgtaagcagcgtagaacttgttagtcctccgattaccgtaacccctagcccttttgaaataaggcctccaccttcaaatccaaaagctaatggaagcagtgcaccaatcgttgcaatagctgtcattaagatcgggcgaagacgtgtcattccagcttctagtaacgcttcacgcgtcgacagaccctcttgctctttatgaattacgcggtcaatcagcacaattgcatttgttaccacaattccaatcagcataagagctccaatcatcgaagaaatgctgatcgtttctccagagattaaaagcgccactagtgcaccaatgagtgtaaatggaagtgagaataagatagcaaatggtgctagccctccaccaaatgtcagtactagtacgaagtagacgataccgatggctgcgagcatagcaattcctaattgactaaatgagtcattaatttgctctgatgctccgccaaagttaatatccatatcacttggtaaatcaattttcttcacttctttttggacgttagaagaaacgccgcctacatcgtcactcttaatatcggcacttacctctgcataaattttattatcacggcgagttaccgtattcgatgttttaccttttttaatatcgacaacttcatttaatgtaacttcctgtccggtttgagaggtcacttttgtgcttgaaagttcggcaaaagtagagaaatcctctttttcttttggaaggtatacgttaatttcgtttccgtctttttggatagtcgttaatacttcacgctgtccaaggttcgaaatttgcatgccgatttgactagcagacaagcccagttcagcggctttcttttgattcggtactagcgtatattcatcaaacgtagctgaaagcgtagaatcgacatttttcagttctttatgcttttctaaaacatgctgaactttatcagcataaggtttgatttcatctaagctatctccgtaaataaggacgtttaatgaattattgctgccgctagacgccgtattcattgagccccattcaccttgattcgcttgtttattaagagcttttaatactttatcctgctctttatcaaagttttgtgtatcctcgtcatattgcacaaatgttaaaacgttatttttgcttcccggattaaaagagttaccttcaccgaacgaatactgaaccgttttgacaccatctcgcttcatcaagtacgcttctgcgcgatttgctgctttttctacgtcgctttgagactgtccagctttcggtgtatacgtaagggtcagcgttttttcttgatcggatgataagaagctcacgccaatagaaggaactaagaataaacttcctactaacagtagtacggctaacccaaaggaaataagcttatggtttagcgtccagttcaaaatccgcttatatccgtgcgctagtttgcttggtttttcttcttttacttttacatttgttttaaataacgaatgagcaagcattggcacgagtgttaccgctactagcagtgatgctaacagtgcaaaaacaacggttaacgcaaacggtaagaatagctctcctaccggtccttctactagacctaacggtaagaatacggccacggttacgattgtagaagagaaaattggaacaaacatctctttcgtcgccgcgacaattaaatcttttcctttaagcttttcttcctgataagccatgcggcggtaaatattttcaataacgacaatggaatcatctacaacccttccgatggctacagtcatcgctccaagcgtcataatatttaaagagatatccattgatttgagcgctaaaatggcgattaataacgaaagcggaatcgaaataacggcaataatcgttgaacgaatatcacgtaaaaataaaagaataataataaccgcaaagaccgcaccgataatagctttatttagcatcgtatgaacagaatcttcaatcggtttaccttgatcaaaaatattgtcaacgtgaaggtctttgtttttcttttctaggctattcattttttctttaatatcatttacaacatttactgtgttcgcatccttcgctttgacaacttgtacagcaattgaaggttttccgttcgtgcgagaaatagattctgctttccccgccactttaatatccgcaatttcttttaatttcacagttggaatagaagctgcggacggcccctgctgcacggctccttgtgtctgctgcacggctccttgtgtctgctgcacggctccttgtgtctgctgctggctcattccttgttgctgatcttgagcagctccttgactaggaacagctggaatctctaagttttccaaatctttttctgttgtcatctttccgtctaccacaacagatttttgagatccatccatcgtatacgtaccagccggcacttttgcatcagatgcttggataagctttttcactgtatcttcatcgagtcccagctgcttgagcttgtcttgtttgaatacaagttctgcttcttcaacttgttctcctgacacgctgaccgaagaaatcccttgcactttttcaacttgtggaacaacggtattttttacatacttcgttaattcttctaatgattttttatcatctgaaacgcttaatgaaataatcggaaaatcactaatgctttgtcttgaaacatttggttcctctacatcatctggcagatctacgtttgaaagagctcgtctaacttcgtcttctgccttctccatatctttactaaagctatattcaacttgaatggtagccatattttcataagaagatgagctaactgtgtcaacgccgctcagtccctgaagcttttgttcaatcggcttactcaccttatctgccacttgttccggagtggctcccggataagttgcactgactgttacaacaggcgttgaaatatcaggaatggtctctagtttcatattaaaccctgaatacagccctgcaataatgacaaagagtgttaacagccatactgcaaatttatttttcaatgaaaatttaataaacttccccaatgcatatcctccttcaaatatatgtatactaataaaattgactgatcggtcacaacaacttaaaatataaatgactaaccggtcactgtcaaccctaagcaggctctctcctaacatgttcataataaagacatatttacgataaatcgttttttaaaggaactgactcccggttttaactttgatatatacctttatcttttttagtgtatgatactattatctaacgaaatgaatggctaaattgttcaataaaggaggtagaatacatgaaagaaaaagaaaagagaataattgaagcttcgattaagctttttgcaaaaaaaggatttaatgctacctctgtgcaagaaattgtagatgaatgcaacatttcaaaaggtgcattttacctgcacttcaaatctaaggatgcacttttattatcaattctaaacttttactatgaaaagctctttagctctgtttatgctctcgacgaggaagtaaacgatgcccgcagccgctatatgaatcagctcatctatttctatgaatttattacggagcacagagattttattatcatgcaaattcgtgaaaaatctattccatttaacaaagaagtggagacctttgttcataaaatgcagcgagaaacgttttactttcatcgcaaaagcctcgttagcgtatacggagaagacgtaactccttatatctcggatttaacgaaaatgattgaaggtattcatcattcctttttagaaattattatcttcaatcaatacgagcttacctttaaagaagtagcacagtacataatggaccgagttgatgtattagtagaagatttattagctagaaaacctcgtccccttattcccgcttcttttggtgaagatatatacggaaaggaacgaacgacttttctaagtaaaaatgagcaggtaaaacaagctcttgaggaaattaaacatctgctagacaccagcgatcatatttctgatgagtacgcagacagctttcacattttacaaacggagctaaaaaaagataagcctaccactgctattgtaaaaggcatggttggaaatttaacggaacttaaaccgttggaagaaccgcttaatcttttaacagccttactccaacaaaaataacagaaggcttcaacaagccttctgttatttttctgcttttgaactagatactcccccagataacacgaacttcattgcttcttctggcttaatatctaaccattcaatttcttcttttggaatcaaaaaagtaaaaccagctacttgaaaagtttgtggaacatagacggcgaaatggtcttttaacgagtgaatcacctcttctacttcttcagaggtcacaaaccctatgactttcattgacgtgccgggcatcgtcactaaaactacttttgaaaaggactttttctctccaagaaaagattgaaacgtatctttaatgacggtatatagcgttttaacaagcggtattctttctaacaatcggtcaattaagttaatgattttccctgcaaaaaaacgagtggataaccatcctaagaacgtaattaaaacaagagtcgctaagatcccaacccccggtatataatcctgcttcatatagggcttcaatacgtttcctaaaatgctgtctaaaaaattaaacactcttaccaaaatataaataacaaggataatagggacaatcgttaagagtccgttaataaaactttttatgattgcattcatgcaaacacctcattttttctgacatactgctgttcattatacaatggatttgttttgctgcgtctctttatttctattcacatatgtataaactagggacgttttatcaaaataatagatgggtacatgaacatacatacttatatatttattttttcggagggatacaattgggacgtttagaatcaaaaattgctgttattacagggtcaagctctggcataggaaaagcaaccgctgagcgctttgcgaaagaaggcgcggttgttatttgtgccgatattaatttagacggtgtgaaaaaagcagcacaagaaattaaagacgctggcggtgaagcctacgcctactatatcgatgtagctgaagaagaaaaagtaaaagagttcacagcggaaattgaaaagaaatttggaaaagtggacattctttttaataatgcagggacagacacagaaggcggcaagcttcacgaatatccggtagaactttgggatcgcttaatgtcggtagatttacgcggaacgtttcttgtaagcaaatacgttattccgctgatgttagaaaatggcggatcgattattaataattcatccgtatccggactggcagcagacttagaccgttctggctataacgcggcgaaaggtgctattaccaacctaacaagaaccatggcaattgactacgctcgtgcaggtattcgcgttaactcaattgctcctggaacaatcgaaacacctcttcttgatgatttatcaggcgctgaagaagaaaaaaaattcagaaaagcatatgaatgggtcgatccgatgggccgtctaggcaaaccggaagaagtagcaggtgctgtattatttttagcatctgatgacagctcatatgtaacaggtgattgcattactgtagacggcggtcatatggcgtatacatggcctggaaaaatgctttacgataaaatgtgagaataaaattagctctataccattaggtatagagcttttccgtttgaattttttctttaaaatagacgtgacattatgtcaagacaggtgtaaacttaaagcaaaattctttgcttctaggaggaagacatgaaaacaaaacaattatcagaacgtcagcttcttggcatcgcagggctcggatggctcttcgatgccatggatgttggcattttgtcttttatcattgcagctcttcacgctgaatggggactttcccctactgaaatgagttggataggcagcgttaactcgatcggaatggcggttggagctttggtgtttgggttgctggctgatcgaattgggcgaaaaatcgtttttattgtaactcttgttcttttttcagtggcaagcggcctttcggctcttactactacccttgctgcttttttagtatttcgatttttaattggaatgggtttagggggagagctgcctgttgcttctacacttgtttctgagaccgtggcgccggaaaaacgcggtaaagtggtcgtgctgttagaaagtttttgggcgttcggttggctactggctgcgcttatttcttactttgtaatcccagcttacgggtggcagctagcgcttatcctaacggctattccagcgttttatgccatttatttgcgcattaaactgcccgattctcctcagtttgtggaagcgacaaaagaaaagaaaccgtcgattgcggacaatgtaagaagcgtgtggtccaagccttatcgtcaatctaccattatgctgtgggttctgtggttttgcgttgtattttcatattacggcatgtttttatggctacctagcgtcatggtcattaaaggttttagcttgatcaaaagctttgaatacgtattgattatgacattagctcaactgcctggctattatacggctgcttggtttattgaacgcatgggccgaaaattcgtattggtcacatatctgttaggtacggctgccagcgcatatatcttcggaaatgcggagtcactttggttgctgctaacagcaggtatgctgttgtctttcttcaacttaggtgcttggggtgctttatacgcgtatacacctgagcaatatccgacatctatccgaggcacaggagctggaatggctgcttcttttggacgaattggaggaattttaggaccgctgttagttggatatatgtcaacgcaaggtacgtctttaaccgttacgttctcaatcttttgtggagctattttaatcggtgttggttcggttgtttttctaggaaaagaaaccaaacaaaagcagctcgcataaacaaagacgctcttttagagcgtctttgttgtgcttattatttattttctaccagctctttttcatctgtctctacttccacgtcacgctgagcgaatactttcttggctacgcttaaagcatttaacacgcgagggaaacctgtgtatgggattaattgaatgatgctctccacaatttcattcggctctagtccagctgttaaacctgtatttaaatgcagctcaagctgaggctctgtaccctgagtgaccaatgatgaaatggtaactaatgctcgttgcttattggttaaacccggtcgtgaataaatgtctccataggcaaattcaataatatattttccaacgtcaggagctaggtcttttaagtcttctgtaatttttaaatgagttgaaatatcatcgttactcgttaatgtatattccattaatttatctaaacctttttgataactatcttgtgccatgtaaaatcaacctccgtatcttttactgacaccgcgcggaatcaatatttgttttcttgtatgttttctacactatctactttaacgcacattctctctttcgtaaaatacatatattcaatacaacgtatgcattttatctatataaagcagaatcctgttcattcatatagtgaagaaattgcttagaggcatatgaaatatatttatctttttttaaaatcaatcccaaatcccatgaaattgaagggttagtaataggaactgcttttacaatagaggaatctacttttgccgcaatggactgtggaaagatagatactcctaagttttccgcaatcatttcaccaataaaatcccattgagagctctcgtaagctacgttaggttcaaatcccgcttgttgacatgcctgaataagccggtcgtgaagcgtaaaatcttcattaaataaaataaatttctcttgggctaattcattaatttccacatgagttttagaggctaaaggatgggaatggtgaacatataaaagcattttttcagagataaaaggattaatatcaaaaagatgttcatttaccggaagcaccgctacacctaagtctaacgctcctttttctactgctttttgaacacgattggctccgtattcaataagtttaatcgtaatatctggatagagctgctgaaaccctttgataatctttggaaagaacagcactccaatcaatggaggaattccaattttaatcatccctttcttcagattcatcacatcatataaataagtcgatagctcatcaatggatgccatgactttttgtccttgcgcatacaccacttccccggcatccgttaaatcaatctgtcttgcggaccgatcaattaattctacttccaattcttcttctaagttttttaccattttgctcaaggtcggctgtgaaatatggagactttgagatgctttagtaaagctccttaatttagcgacttctaaaaaataattaagctgacgaatatccatctctgctcctcctatagataaagcgaatatcttttatattatttattcattttacctattattttttaaggtatacagtaaaaatataaagaaaagatggacacataataaatcaatttaatctaaataaggacaaatgggataaaggcgctagtatggaccgcttgtgacaccgctgttgatttccgtgcaaggcttcgctttccgcgggcggccgctgagcctcctcatcacttgcgctccaatcaacacctagaagctactacatgcatgaaacctacgcttaccataacatcaaaaaatccgaacgatgaatcgttcggatataccttcacctaaaatactgttgtcccgtcctcttttacgaatattatttaaaatgttttggctgcttgtgatgcttgttctaggccactttcaataatttcttgcgcacgatctggaaactgattatgtccctcaataataacagagttcacatccgtgattccaaagaattgaattacgttgctaacatatttaacggccatttcgacctcagctgctggaccttctgaatacactccgcctcgcgcgtttaataacatcacttttttatcgcctagtagtcccaccggaccttctggcgtatacttaaacgttttgcctgcttgatttaaataatcaaagtacgtatgaagcacggccggcacagtaaaattccaaagcggaaaggcaatgacaattttatctgctctcacaaattgttctaagtaataattagcagtttctgctgctttgttttccgctgccgtcacttctagccctcttgctaacttaaactgaccgtttatcatgtcggcacctaaataaggaagttcttcttgaaacaaatttagctctattatttcttcaccttggtgcgattgttgatagctttctaaaaacgcatcatataatttcacgctaaccgcttcacttgccgatctgccatttgcttttataaaaagagtataactcatactaaaacctccactgattgttgatactcttattttattcacttttttcgtgcgtttcgaacgactttataatgaaataccttcatactttaggctgagaaaaatgaaaagatccgaacgatttatcgttcgaatcttccttccactaaactaattttttcccaatctcctcattttacagatgaaacgggaaggtgaatcacaacttccgtcccttgttcttcttcacttttaataaaaatctcgcctttatgctgacggacaatagtttgtgcaatcgatagtccaagccccgttcctcccgtagctctgcttctagctttatcgactcgatagaaacgttcaaaaatatgtgcaagatcttcttttggaatgccaattccatagtcttttactttgataatgacaccttcctgctttttttcaacggtcacttcaattttatccgtactgtatttaattgcattatcaagcaaaataatcaacacttgcttcatttttagttcatccacttcaattataatgggcgtttgatcataatgaagaactaattcccttttgtatacttgctgcagctgcttaacgatttgttcaaaaataagaacaagatctgtttgtttcatatcaagcgtttgttctttttccacacttgccagatcaagcagcgtttcaatcattttttgcattttggttgcttccgcatagatggtgtcgatcgcatccagcgtaatttcttcatttttaatccctcttcttcttaataaattagaataactgcgaataacggttagaggggtttttaattcatgagaagcatcggaaacaaactgattttgcttttcaatattttctcgcaagcggtcaatcatatgattaaaggtaacggtcatcccctgcagttcatctctcgtttcggtttgaatgaggacttttttaggaacaccgctctcttcaatctctttcatcgttgtgaccatatttttaataggatgcataatgacgcgtgataaccatcttcctcctaaaagagacagtaaaatggaaacaagcgaaccaaaaatcaaaattgatagcaaaatatctttacgggtttcaaaaccagtcaggagctcaccaatctcaagcgtttcaacgacttgattattgactttgacaggcatgcgaataaccaatacttgcttttctctgattttgcgaagtttcaccttttttttctttgaaaattcgggcttaattttcaccagatgaggatcatttgatacctggttaatgaccgtagaattttctgagactgttcggataaatgaatggttggtcaaataaaattttagtaactccggcgagagctccacggaatgatcttgctgacctttttgaataatctcgcgtgctttttcgaataaaatgtcctgttccatattcaccgtagatttagtaaaggagaaaaaaacaacgatgttcatgattaataaaataaccactagccatgctgttgtcagcaagttaatcttcgtcgtgatcttcatgtttctcctctttcatcatatatcctacgccccgcaccgtatgaatgagagaagtagaaaaaccttcatctactttttttcttaagtggcgaatatacacatcaattacgttcgtttctccttcatattcatagccccaaacgtttgtgagaattccttctctcgtgacaattttatttttgttcgtaagcaaatacacgactaaatcatactctttcggtgtcaacgtaatggattcattgtttcttaggacttcccttgtttcaagattaatggtcaaatcactgatcgttaagagctccgcttcagcttctttcgttcctgatgcttctacgagcgaacgatagcgaatacaagagcgaacccgtgctaacagttcttcaatttcaaacggttttgtaacataatcattagccccttgatctaagcccattaccttatctagcgtcgtatttctggcagttaataaaataactggcgtaaatacttccgctttccgaagtcttcttaacacctcaataccgctcagacttggaagcatcacgtctagcaaaatgaggtcatattgagcggatattgccgtctctaaccccgctttcccgtcgtactcaacatctacttcatagtcttcaaattccaattcaatctttaacactttcgcaatttgcgcttcatcttccacaattaaaattttctctttcatgttatacacctctcaccacatgtcttaagtgaaagaatagcttctttagataaaaaaacaacacctttttcaaaagatgtttgtttttttatctaaaccctactttttcaacatacttgtcttttagcttatccttattgtttgtaaacatgaatgttttacgcatgaagaccaatcgtttgcttttcacctaaaatccaattgactactgctaaaagttcttcaggcgtttgtgcttcgatttctttatggtaagcagcaatcgcgttatataatgtgctcattttatcagcatcctggagcactgcctgcagctgactttctaacgattgatccgcctttagttcttgaactaagtttcgttctgttaaatagcgtaaattcacttcttcttgacctggtaaagcagaatgaacaaaaatcggtaaattcttgcgaagagcttcactgaccgttataccacctggctttgttacaatagcatccactcgttcatacagttcattcatttctgtgcgtgatgaaatgtacggaattggtgtaacgtgctgtaattcccatcccttgatttcttcatataacttttgatttttgccgcataagacaaagtaatgaaaatggcgcgcatcttttaaatcattgtagaaatccataatattgcctaagccgctgctgcctccagcaattaaaatattccggttaccaggatgcttaaatattcttgtttttgttatttcttcatgtaccggtatccctgtgaccatcatattttgaagtggaatttcgctttgcgcacgaagtcctttttttacttcttcactaggaagaaagtgaaaatcaatctcttcttttccccataaattattaataaagaaatccgtgtagacatttataataggtacatcgcacttgccttttgcttttaattgactgagcaaataagaaggaaacccatgtgtgcatataattaaatccggattttcttctttaactaagtgctccattttttttgcgaatacgtgatgataccatttgaatgaatgaacaggcggttcataaaagagatgtttgtatgccatattgtacgtttctggagcataacgaatccatttcaaatatgtgcctgtgaccactttttctaatagttcgtttgtatagcttaataaatctatttttttataacaaatatttgttgttcttctttccaatatatccattaacgcctctgccacttgatgatggccagaaggcatttttagaagaggtaaaaataaaacctttttcaactgtttcatctcctattctaaaagcagtttcttcctctcctttttatatcattaaatgcccttaaatttcggattttaattgatttttaatgtgaaattcatcgtttttttagagtgtcaatctaaactaagagtgaaaagtactgcataaggagaaaacaaatgaacctcaattacgaagtatttcaatggattaactcgtttgctggtaaatccagcgcaatggattctgtaatgattatcatcacgaatagcgttccttattttataatggcttgtttacttttgctttggtttagcggaaaaacagaaagaacaatttatcaccgttatacggctttatacatgttgtttacaattgtactttctctatgtatcaatgaagtcattcacctggtgtattaccacccgcgtccgtttgtgactcatcacgttcataagctgattccgcacccggctaattcatcttttgtgagtgatcattcgattttagtcttttcagctgcttggatcatgtggttacgaaaaaacaaatggagaagcatcatttttatatgggctgtcatttcgggcctttcacgtatttacgtaggcgttcactatccagcagatgtacttggaggcatgatgattgccggagctatcggatgctttattatatacgtttcagctaaaacagctcctcttattcagcgattattctggattcacgatttgattatcaagcgtattccgtttctatctccctatacgcatgaacaaattagcaaaaaaaatcattcagcttaaagaggctgagacaaaaatagtatagttgaagtgaaaaacgaaccactaatcaaactgtttgattagtggttcgttttttttgttatggtgaacgtagattttatctttttcgttccttccagcggttgattggagggcaacgcgaagactcctgcgggaacagcggaacaggtgagaccccgcaggagcgcaagcaacgaggaggctcaccggccgcccgcggaaagcgaagccttgcacggaaatcaactgcggccgagcaagcagtcaagattatatatccagattgttcgcctttggatgggattcatttcgttacgtctcagcctctttttattatttttaaaaaacaacgttcactttcttgactttcacttttatttattttatattagttgatgtatcaaacattgatgtatcaaatattaatccatcaataaatatcatagaaaaagggagcgactttcttgtcacattcatgttctgaaaaagcaaatgttctgtatgctctgcaagaagttaataaacaaattaatcaaaagtttgagcattgtaccggtgttagccaatcacgtcttgatattttacatcagctttatgaaacaggtgaaatgagtcaaaaggcgcttcaacagcaagtaaacattgacaatgctgcaattacaaggcatttaaagcagctcgaagaaagagatgttgtatcacgccgtaaaaaccctgatgacaaccgcgtaacatttgtaaagcttacgaaaagcggacatgaaaaaatcggtacatttcgaaacgaaaaagctcgctttattgatgaagcatttaaagatttcagcgaagaagaacagctgctgctttccaaaatgctcgagcgtttaaaagtaaacatttcggccattgaacggtcataacatttttaacataaaggagagttcatcatgacacaaacaaaaacactaaacaatgatttccaagatattattacagggcgcagatctattcgttattacgacccatctgtcaaaatcagccgtgaagaaatgaaagaaattttaacagaagcgacgctagctccatcttctgttaatgcacagccttggcgctttctagtaattgatagccctgaaggaaaagcaacattagctccgcttgctaaatttaatcaatcacaagtagaaacatcagcagctgttattgcaatattcggcgatttaaaaagtgaagaaaatttagatgaaatttacgataaagctgttgaactaggctatatgccacaagaaattagagacatgcaaattcctaaaatcaaagcgcactacgcagctgctcctgaagaattaaataaagaaacagtattaattgacggcggtttagtatccatgcagttaatgcttgctgcacgtgctcacggttatgatacaaacgctattggcggttatgaaaaagatcaaattgccgaagcattcggtttagacaaagagcgctatgcaccggttatgttactttcaatcggcaaagcagcaaatagcggttacccgtctgtacgtttaccaatcgaaaaagtagctcaatttagataataaaaaaaggtgctgtatattcagcacctttttttatcctccactaacgggcggaataaatgcgacggtatctcccgttctaatggtttcttcatctgttacaaactcttcgttgactgcggtcatcgtttgcttcagagaggacagcttatacgttttttgcacatattcctttaattccttcactgttatatcttgcgtatcaactgttacttgttccactccagcctcttcacgtatagcagcgaaaaataagacgttaatcatttttacatctccttcattggctttccttcaggatattctttcgtttctaactgatctccaatccattttgttccgtcttcccaaaattcctttttccaaattggcacaatttgcttaatacgttcaatagcatactcgtttgcttcataagctgttttgcgatgcggagaagaaacggcaataactactgcggcttctgttatatcaagcttcccgattcgatgagtaatagccgtcaaagcatcgggccacttttcctgaatttcgtcaccaatttggctaagcattttcactgccattggcacataggcttgatattcaagagagagcgtcttcttgccttttgtaaattctcttaccgttccaataaatgtcgtaatagctcccgcgtctcttctagaaacttttttaattatttcatctacggcaattggctgatttactacttcaaataagtgctggttcatcttctttcccccacttctttcaataaaaaatcaagataaagctcgtcttcttgtaagtgaaatattggatatgctcgctgcacttcttttttaagcggaacgtgactaatcacgcatataatattggttagagaggaaagcagaacaagatcttcttcacttcgaatcaagactgcttttggataggattcttttttatatccttcaacaaaaatgacatctggcgagaaaaattgataaaaatcaatcagcttttttaggctccagtctttactatctgctgtaagctgaaggattccacctccctctacacctgccacatcggcacctgcttgctggtggcgatgactgtcttttagctcactgctgctatctggaggtccgccgtgtccatggtgcttaatagaacctacacatagattgaattgtttcgctcttttaattagcttttccactaaagtagtttttccgctgttttgaaatccaactacttgtaaaacggtacaacaagctaccaaggccattcacttccccgcacgtcatctagcaataagacgtcaaccagcattccttctttgtatcctctcgtccctccaggaaatataattaacgtatccgcatgagctaaagaagaaacagcactagattttgtaaagcttaatggagaagcaatcagctgtccttccctgtatgaaagcctgccagatacaaatcgcataaaaggatttggctttaagaagtcctttcctaacaaagctttttctttccgaagatgaggggttcttttacccgcatatgtactgattaccggacgagccagaagttcaaaaccgacatagcacgctgtaggatttcccgagaggccaaataaaagcttttcttccatacgagcaaccgttgttacactgcctggtctcatcgctattttattaaaaagaacttcggcttgtaattgtttatacacatctggtagataatcatagtctcctactgaaacgccgcccgttgtaatcagcatgtccacttctgatagtgcagcttttaccgcattgtagcactgacttaaatcatcaggcataataccaaaatagttcacttcgcctccagctttttcaatttgcgcacgcagcatatgagcattgctattacgaattttgccccgttcaacaggatcacttacttccactagttcacttccagttgcaagtaatccaattacaggttttttgaagacagctacgttactatagccaaatgtggctaaaagagcagctacccccggagtgatatacgttccttttgaagctaacacagtgccttttgttgtttcttctccttgaaaagaaatgttatctccactgttaaacgcacgcttgatttgaacgatcggctgattgtctttcgtatattcttttgttacttcaagcatcgcaaccgcatcgcagcctttgggaataggagctcctgtcataatacgcacagcctgcatcacgctgactgtatgttcaaaaacagaacccgctcctatttctcctcgaacagccagttctactggatgaagtgatgatgcttctttcgtatcttgcgaccgaacggcaaaaccatcatatggagaacgatcaaaagcaggaatatcatgatctgctattaaatcttctgctaaaaatctgccgtgagcttcttcaagcgcaatgatttcttgctttctgttttttgcatactgcatcactcgtccaacgcattccccgacagggataggagttcgcttttctctcattcttttcactcctttactcatcctagtaaacgataatataagcttctcgcaaattgaatatcattcgttccatgaataaatacacggccatcttgaaaaattacaaagcgctgctctggaagctgacatgacagaagatatggattgcggtccactttcccctgtttttttaactgtttttccaattcatcgaagttgtacaaatggcgctgcgagggtctgatttgaaccgtctctctgccgcacagaacttctgttttaagctgattttcatacgctaagtacggatatgtttgggtcgatccgcaagaagaacatttatcacttttcattttgcccgtcttaaattcagcgtgctgattattccagacgtcaaaggttagaaatgtgtggcgcaaagcttcaacatcttcgactaaaatttttaatgcttcggttatttgataggctgccacgatttgaacagcgggactaataattcctgctgtctcacaggttgctcctccgacaggcacttttttcaatatgcagtgcagacaaggggttacatttgggataacggtataagtggtgccataactccctacacatgagccgtatatccaaggaacttcatacttatgtgacaaatcatttaaaataaaacggatgtcgaagttgtctgtcgcatcgattatcacatcagctgtttggacgatactttctaaattagcaggctgagcatccatcaccagcgcttcaatcttcacttccgtgtttatttgacgcaaacgattttttgctgctacagctttaggtagtttgttttgcgcatcttgttctgtataaagctgctgacgctgcagattactccattctacataatcacgatctacaagagtcaattttccaattccagcacgcacgagggcttctgcgctagcgctgcctagagcccctgcgcctacaactaaaacatgcttacttctaatttgctgctgccctttgtttccaacgggctggaaaagctgctgacgtgaataacgttctgtcactcttttctctccctttctcattcaatctctgacttcactatctattccttcgtcaaagatatttctttaaaaacatgctattatacacataaagctacgctgctttacggaggctttttcgcataaatatacaaatatattttgatggaggtatttaataaatgtccattgccggcattgtattagcaggaggaaaatcttctcgctacggtcaaccaaaaatgtttgaaacctataacaagaaatcattttacgaatatagtatagatgcattaaaagaaaatcacgtcacacctatacttgtgtctaccaaccaagatttactcccttattttcaaagaaaggatgttgcatttgcagttgaaaaatgcccgtatcaaggtcctttgtatgcaattcatcacgctttaactgcgatcgattgctgcgctgaatggttctttattctttcttgcgatattccttttattaatgctgagtttgttcatcacatgatcacactgactcaaacggactcacctgacattgttcttcctgttcagcctgatcacattcacccgcttctagcactctatcaccgtagaacgcttcctcttattgaacaactcgttacacaaggtgaaagaaggcttacgcaattgttgaatcagacaaacgtccttcgcgtgcctttttcagcagaagatcccacttttataaatgtgaatcatcgcagtgattggcatgtataaagcttctttgaattatccaccaatatgagacatttccactttttcagcgccttggacctgtcttccattagctcgttcgtctgagtaacgatctttccgatgattccagatatcagaaatggtgtcacaaacagtatgatcagaggcttctgaccgtatcagtgtgcggaggtcatatccttttgacgcgaacaaacaggtatagagctttccttcagccgatactcttgcacgtgaacaagtggaacagaatgaatctgtgacagatgaaatgataccaatttcctcttctgtcccgacgtaccgatacctggtggctacttctcccgtataatgaggtgtaatttcttcaagaggcatttcttgtccaactatatcaagaatttgtttctttgttataacctcatccattttccatccgtttgaatttcccacatccatatattcaataaaacgcagcgtatgttttttgtctttaaaatattgagccatcggaagaatatcctgctcattcttgcctttttggacaaccatgtttattttgactgaaatccccgcaagagctgctgcttctattccttctaatactcgttttacgcttcctcggtttccattcaactcttgaaatctcacttcatcaagcgagtctaagctaacggttactcttgataatcccgcttttgataaggcttctgcatgcttctttaacagtgagccgtttgttgttatggcaatatcatctataccctcaatttgcttcagacgattgattagatccggcaagccttttcttagcagcggctctcctcccgttatacgcactttttttactcctagcgatgcgaataatctagtgagtctctctaattcatcaaacgaaagaatgttttcggcaggtaaaaatggatagtctgccccaaaaatttcttcaggcatacaatatcgacagcgaaagttacagcgatctgttactgacaaacgcaagtctcgtaaaggacgctttaaagtatcaactatagcgtatgacatctgcttcatctctcctctctctagctgtcagcttctccacagcagattaactctctcttaaaattctttccgggcatgtataaatattcaatgaatcatttcgaataaaccctaccgttgtaattctcaattcttctgctaaatttaaagcaagttcagtcggggcggattttgaaagaaccacttcacacccgatcttcgctactttcaacaaaatttctgaagaaatacggccgctgaaaacgactactttatctctaattgaaatatggtgttttaagcaatacccgtatagtttatctagagcattatgcctaccaatgtccattctgctaagcataaagccatttttatcacaaatggcagcgttatgaacgccacccgtttcttgaaacgtagcagcagattgctgcagcttattcatcaattgaaaacaatctttaattgaaagttctaccgatataccgttcatttttttagcagtcagcgcatcatttataaagacaaacccttgtctgctcgccccgcagcaagacgtgatatatcgtttattttgaaggttttgaaaatacgggtttaatttatctattgtaacatgaacatatccttctttttcttgaacccatatgtttttaatgtctttatatgctcgaataaccccttcagatgctaaatagccaattaccatatcttcaatgtattgtgggctacataccatcgtgacaaactcttcttcattaattttcacagtcacaggaaactccgttacaattttatcttccacgctttccatttgaccatttttaaatctaagaactgtacgcttcttaacggtcgagttcatgtgatgtctccttttttaaataatgtttttatcaaaaacgaatacggaaaccgctatattttcttttattttcatatctgaaaataaattaaccaactttgctcctaccaattcttctagcccttccggaggattcgatgcatatacatcttggatcatttttgttcgagctagatgaaccatgtcacatccttcagcagtgcttgcaataaatgtttctgtcggagttaaatttccatacagtgttgagacagccatattttcaacaaaaaccgtatgtattctttccggtccttttccaaataaatcttttcgaagcttccgaataatatcattaaattcatgaatagtttttgacataatcaacgctctcccaccgattaaaattaaattgtgcattttattcctacagtttttttatcataaatcaacacttcaaaaaataaaagcctaaaatctttgcagcaaaacttttgaagagagttgggtatttaaaaaagttgtgcatttaaaaacgtagcgatataattataaataaccgagatggaataataataataatgaattgttattactctatcactttttcttaacgatataaatgggtcggattggcatattagtaagacctgctagtaaactattccaccatgattgcacttcccttatttaattaggcgtgtgtattcatggtggttttttgtttttatataaaggaggaaaacaaatgagtcgtgaaaccatcactgttcatataaatggcaacgaatacaaagcagcttcaggctctaccatactcgaaattattaatcagcaaagcattgagcaccctcagatttgttatgtgcctgaagtggatcctattcaaacttgtgacacatgtatcgttgaaatgaatggcgagttagttcgttcttgttctacaaaagctgaaaacggcatgaagattgaattacaatcagcacccgcaaaagcggcacaaacggaagcaatggatcgtttattagagaatcatttgctatactgcaccgtttgcgacaataacaacggaaactgtaaattacataacacagccgaaatgatggagattgaacatcaaaaatacccctatacgccaaaggcctcagagaatgaagtcgatatgtctcatccgttctaccgttatgaccctaatcaatgcattgcttgtggacaatgcgtagaggtttgtcaaaatcttcaagttaatgaaacactctctatcgactgggaagcgaaacgtccccgcgttctctgggatgacggtgtagcaatcaatgaatcttcttgtgtgagctgcggtcaatgtgtaaccgtatgcccttgtaatgccttaatggaaaaatccatgcttggagaagctggatttatgactggacttccaaaagacgttttaaacccaatgattgatttagttaaagaagtagaacctggatacagcggaatttttgctgtttcagaagtggaagccgctatgcgcgaagcacgcacgaaaaaaacaaaaactgtctgtacattttgcggagttggatgttcatttgaagtttggacaaaaggccgtgaaatccttaaagttcagcctagctctgatgctcccgcaaatgctatttcaacctgtgtgaaaggaaaattcggctgggattttgtaaactctgaaaaacgtattactaagcctttaatccgaaaaaatggcgcatttgtagagtcgtcatgggaagaagccctcgacttagtagcaagcaggttaagctctattaatcagcagtatggacatggatcagttggttttatttcttcttctaagattacaaacgaagaaaactatgttattcaaaagctggctcgccaaatgtttgaaacaaatgacgtagacaactgctctcgctactgtcagtctcctgcaactgatggattatttcgaacagtgggaatgggaggcgatgccggcacgataaaagacatcgcaaaagctggactggttatcatcgttggagctaaccctgctgaaggtcatcctgtattagcaactcgtatcaaacgcgcgcataagcttcatgatcaaaaactaatcgtcgcagatttgcgcaaaaacgaaatggctgaacgctctgacatttttatcagtccaaaacaaggtacggaccaagtatggctaatggctgtaacaaaatacatgattgaccaaggatggcacaatgaaaaattcatccaggaaaacgtcaactattttgaagactttcactctttgcttgaaaagtacacgcttgaatatgctgaacaaattacgggtattccagcagcaacgctcattcaaatagctgaaatgattcgagacgccgatggaacctgtgtgctgtggggcatgggcgtaacgcaaaatacgggaggctctgatacatcagcggctatctcaaacctgttgcttgctactgggaactatcgacgccctggagcaggcgcttatccgctccgaggccacaataacgtccaaggagcatgtgatatgggaactcttcctgcttggcttccaggctatcagcacgtcacagactcagtcgcccgagcgaaatttgaaaaagcatacggtgtaaaaattaaagacaagccagggcttgataatattcaaatgctgcattcaattgatgaaggaaaaatgaaggccatgtaccttgtcggagaagatatggctcttgttgattcaaatgctaaccacgtacatgaaatattatcagatttagatttttttgtcgtccaagacattttcctttcgagaacggctcaatatgctgatgttgtactccctgctgttccttctcttgaaaaagacggaacgtttaccaatacggagcgacgtgttcaaagattgtatcaagcattaccaacgctcggtgattcaaagccggattggtggattgttcaagagattgccaaccgcttaggtgcgaactggacgtatacacatcctggtgatatctttgcagaaatggctagtctatcacccctattcagccaagccagctacgaaaaccttgaaggctggaatagcttcttatgggggagcttagaggggaaaagcacgccgttactttacgtcgatgggtttaatttcccagataaaaaagcgcgctttgctttatcacattgggtacttcctgccgaattcccagaagaatatgatttacacattaataatggaagaatgttagaacattttcatgaagggaatatgaccaataaatcgagcggcatccaatcaaaagtaccggaagtatttgtagaaatttcacctcagcttgccaaggagcgtgaaattgaagaaggttcgcttgtcagattaatctcaccgtttggagcagtaaaagtacaggcattaattacagagcgagtaaaagcaaatgagctgtatcttccaatgcactctgttcataaagattcggctattaacttcttgacgggacctgcagtcgaccaacgaacaaatacgccggcttacaaacaaacaaaagtacgaatggaagtattaagtaaaggtggagaaacgcctttaccgtctacaaatccgcgtaacaaaaaacgtcatcctcaaaatggggtcgaggttcagcgtaaatggaaccgtcctggctacgtccatttaacaagtaaataggaggagaaaagatggcacaacctattacagaaattaagaaacctcttctaagcgaggaagaagaaaaacaacaaaaattagaagatttaacttctctgctggcagataatgaagaagcgttgaaccgtattctcggtattgttggcgaacttaacgacatgggtgttcttgaagctgctgattcaatgattcaagcgaaagaaaaaatctcaaaaattgcgcttcatcaaatttccagagaaccggtaaccaatttaattaatactcttatgggtgcaagcagcggtttgatgaaggcagatccagaggtaactgctaaacttgtaaatagcgcaacagctggtatgaacgaagcgaatgagtatgtaaaaacaggaaaaaaagtaagtgcattagctcttataaaagcgctaaacgatccagatgtcaatcgtgcaattggatttgggcttcactttttaaaaggaatgggcaaagcgttggaagaataaatgaagcagcgacttgaaagttttccccctttcaactcgctgttttctttttaggaagtcaaattttaaatgaacgtgatatagttatactaaattgctttactacaactaactgaggtgacacgatgcaacaatactttaaacccttattcgcactattatttttaattatgtttactgctgcttgttcgaacgaaacaaataccgatcaatccgcagctcagcacaaaaacatcagcttaacgatatccgctgcggccagcttaaaagatgcgctcactgatattcaaaagcaatatgaaaaaaagcatccaaatatagacttgaaatttaattttggagcttcaggctcgctgcaacagcaaattacaaatggcgcacctgttgatttatttttttcagcagcagaagacaagtttgatgcactagtaaaagcaggagctatctccaaggagaatggtactgacttggttggtaatgaccttgtgcttatcgtgccaaagaataatacgtctgctatcataaattttgaagatctatcgaagccgactgttcaaaaaattgcacttggaataccagaatccgttcctgccggacagtatgcgaaggagacttttgaacacatgagcctctggaaaaacattgagccaaaaaccgtctatgcgaaagacgtacgccaggtgctttcctacgtggagacaggaaacgttgaagctggggtggtttataaaaccgatgccttgatttcaaaaaaggtgaagattgtcgctactgcagataatagcactcacaaaccaattgtatatcctgtaggcgttatgaagggttcaaaacatccacaagaagcaaaagctttttatcaatttttacaaagtaagacggctcttgacactttaaagaaatacggtttcactgcaaattgaggccgctatgattcaagaatttttatctcctcttcagctatcgcttaaaattgcattagtagcaggatttgtcgttattattttaggcactgttataggaaaactgttatccaggaaacactttaagggaaaagtgatgattgaaacggcgttaatgctcccgttggtgctccctccgtccgttgttggatttttattgattgtcatattcgggaaacacagcctgctcggccgggcaattgaatggatctttcaacaacctgttattttcacatggtgggcagctgttattgcatccgttgtcgttgcgtttccgcttatgtatcaatctgccaaaacaggctttcaaggcgtagattacgaaattgaagacgcagctcgagtagatggtgcaagcgaatggaaagtctttttctttatttccatccctttagcttctaaagccatcgtaacaggaggagtgctaagtctggcaagagcactcggagagtttggagccactttgatgtttgctggcaatattccaggtgaaactcaaactgtgcctaccgctatctacgtagcgattgactctggaaacatgaatctcgcttggctatgggttatttcaatcgtctttctttcctttcttatgctgctttttgttcagcttaaacaaaagtaaaaggatgtctctctgtgtaagaggcatccttttatttctttcctgcttttttcaattttacataaatcataaattaaaaaggagctaatcaaatgaagaacatacatttgattagctcctgttataagtaaggtaagccaccatacaatatgtattggtggagacggtgggagtcgaacccacgtccagaaatatcgccacttaagcgtctacgagtgtagttggcatattgataattcgcgagctgttctgcctaccaacaggcgtcccagtcgctagtctgattattctcttccttcgtcctcagacggcgaactccggcgtagcccacttaaagtgagtcccttaccctaccacatgggcgatggagggaggaaccgctaagctactattatgcagctaaagcgaagttattgttagatttgccagttattattggcgttgatgttttaacgaggccatctcctcgactcgcaacctaagctcgaactacccctgtcgaatccgtaacgtccccatataaaagggagtcggaatgtgtaagaaaaaatcttacatcagatagcgacttcagtgtgcaaaatgaaatctaactgataacaatacttattatatcacaaaatgagcattttgcaattgtaagattttgtaatatcacatcttttgacgatcacgaaatgctcgttcgatatcgcgcttcgcttcttttcgctttaagtcttcacgcttgtcatatttctttttacccttaccaagccctagtaaaacctttgcgtatccattttttaaatacacttttaaaggaactaatgaataacccgtttcttttgaatagccaattagcttgctgatttcacgcttatgcagcaatagctttcgtgtacgcaacggctcatgattgtatcgatttccttgttcgtaaggactaacgtgcatattgtgtagaaatacttctccgttttgcacacgagcaaaagagtcctttaaatttacacgcccattacgaattgatttgatttccgttccttgtagaacaatacccgtctcatatgtttcttcaataaaaaagtcgtggcgggcttttttgttttgtgcaattaatttcccttcaccttttggcataaaacgttccttcccttcagccgtacttacgtatatgtatgatattatgtatcattttactgtatggaaatctaaacaacaactaaaacgtttaatggagctgttttgaagcagaaggaatacccttctgcttcactgctgtcgatttcgattatttacgctttttctttttgcgcttaacatttggggcaccctcgaagaatctctttttctttttcttctttggcttttgagtagaccactcttcatttttgcttcggctgccctcgcgaccttttcctttatcatctttgcgtgacttttgttttgctttaatcactttaggacggtctttagataagcgtttgcgactttctttcattcctacaataataaagtcaaccgaacgctcgtctttattcacatcggcgactttcacttcaatttcgtctccaattcggaagatattgcccgttttttctccaatcatcgcatagtgacgttcgtcgtaacgataatagtcatctgttaagtcactgacgtgaactaaaccttcaattgtattttctagctccacgaacattccaaagttagtaacagagctaataataccattaaatacttccccaactttatcagccataaactcagcttttttcatatcgtccgtttcccgctcagcgtcaactgaacgacgttccatattagaagaatgctcagcaacatcaggcagaagctcgcgccatttttcttgtgtttgctgatctgtttttccttcaattaaatacgtgcgaattagacgatgaacgattaaatccggataacgacggattggagacgtaaaatgcgtatagaactcagctgataaaccaaagtggcctaaactttctgcttcatatttcgcttgtttcatcgaacgaagcataacagttgaaataaccatctcttcaggcgtaccttttacttcttctaaaatatcctgtagcgcacgcggatgaatatcgtttcctgttcctttcaccgtgtaaccaaagtttgtaatgaactctaagaaacgagtaagcttctctgcatctggatcttcatgaatacgataaatgaacggtacgttcatccagtgaaaatgttctgctactgtttcattcgccgctagcataaattcttcgattagcttttcagcaaccgaacgttcacgcaaaataacatcgtgaggatggccatcatcgtctactaatacttttgcttctttgaaatcaaaatcgatggcaccgcgatccattctctttttacgaagaatagctgccagcttttccatacgctcaaacatcggaacaattggctcgtagcgttctaacacttcttcgtctttatccactaagattttattaacgtctgaatacgtcattcgttctgtcgttttgatgacactttcaaaaatctcatgtttcactacttcaccctgtggatcgatttccatctcacaagaaagcgtaaaacggttaactttcggatttaatgagcaaattccattagataaacggtgaggaatcatcggaataactcggtctactaaatagacgcttgttccgcgctctgctgcttctacatcaatcggagaaccttctttaacgtagtgacttacatctgcaatatggacgcctaatttgtagtttccattttcaagctctgtaaccgttacggcgtcatccaagtcttttgcatctgctccgtcaatggttacaataacttgatcacgaagatcgcggcggttgccgatatctttttcgtcaatcgtttcaggtgtatcaattgcttgtgttaaagcatcagcaggaaattcttgaggaagaccgtgcttatggataacagaaatgatatcgatccccggatcgtttttatgtccaagaatttgaacaacttttccttctgcgttcatgcggccttccggataggttgtcagttctactactactttatggccttcaactgcaccgtttcttgctgctttgggaataaagatatcacctgcaatttttttgtcatccgcaatcacaaagccaaaatttttgctttgcgtatacgtacctacaatttgctgggtacctcgttctaagatttttacaatggttccttcacgacgagcacctgatgattctgatgacactcttgcaagcacaatatctccgtgcatagcattgtttgtttcagtagggggaataaatacatcacccgcatctttttcttcaggaactacgaacgcaaacccttttgcatgtccgcttactttccctttgacaaaattcatttgttccggcagcccgtagcgatcgtttcttgctcggataattaaacccttctcttctataataacaagtgccttcacaaactctttgaatgactctgcatcctcagtattaaattcttttgcaagctcttggacagtcaaaggtttgtaattatcccttttcataaaatccaatatttcatttatatagggctgattttcttctttcatatcatgtccctcctttttctttattcgtattatctctatcaccaatcaagtgattccaaaaatgcatatacatcctcgtgaagctgatcacgctctttatcaaaggtaatggtatgaccagattcttcgtaccattttatatcttttgtaggagactcgacgctattataaataatattggcgctgtctgtattaatcatatgatcatgacgaccttgtacaacaaatgtcggtgcataaatcatatcaactgaatttcgcacttcagcgattaattcctgtaaagattttaatgtgttcattggtgtttgcttgaactcttccatttcttgttcaatctgttcagacgatttaccttcacgctttttatattcgcgtgcatacgctaaaacaccttcatacatgacttcttcactctttatatacataggggcgcacataggcacaataccctttataggtacagtgtaacctaatttcagtgaaaatacgccacctagtgaaagacctacagcggcaatactttcatgacctttgcttttcaaaaactcatagccgtccatgacatctttccaccaatcttttggaccagtatgaacaagttcttcaggggctacgccatgtcctttgtaatgaggtgcgtggcatgtgtatccttttttctctaaaaaacgacctaacatacgaacgtcagcagaatttccggtaaaaccatgaagtaataaaacagctttttcgccgccttcaaatgtaaatggctttggttgtgcaattttcatatatcatttaactccttttagttataatatctgcagtcctaatagaaaaaaacatgtatttatgtgacggtcatcacataacaagagatgtggccatcaacttttacgcttttatactatatttagcacttttttctaaagctatattatatcattacttaaaaatgaaattaaagtattcaacacacccattaaaaaaccacctaatacataagttggtatacaccaagtacatatgcattaggtggcagtctatccagtaacatattaaagtttgaaataagatacagcaagtgttaatacaaagaataagatagataacactactgtcaaacggtgtaaaactaagtcaattccacgtgctttttgtttcccaaataacgtttcagctccaccggaaatagctccagataatccagtagttttacttgattgtaaaacgaccacaacaatcaaagcaattgaaacaatcactagcaaagtaatcagcaatgtatgcactaagacacacctcctacaccaagtaatagtcaatcagcggggtttcttcatcccttctgattggcattaccggggataaagtacgcgcactacgctaaggttaatttatcataaaaacccctctcgtacaagtaatggcagttaaatacaacggattttaacgtaaaaaaacggatgacaatcgtcatccgttttttatactttcaacttatttttttaagttgtagaaagatttagcgccatcgtatacagctagaacacctagctcgtcttcgatgcgtagtaattggttgtatttcgcaatacgatctgtacggctcatagaaccagttttgatttgaccagcgtttgttgcaacagcgatatcagcgattgttgcatcttcagtttcaccagaacggtgagaaactactgctgtgtaaccagcacgtttagccatttcgatagcttcgaacgtttcagttaatgtaccgatttggttaactttgataaggatagagttacctacgccttgttcgataccttgagcaagttttttcgtgtttgttacgaatagatcgtcaccaacaagctgtacttttccgccaatgcgctcagttaatagcttgtgaccatcccagtcattttcgtctaaaccgtcttcgattgaaacgattgggaattcgttaactaactgctcgtagaaatctaccatttcagcagaagttacgcctgtacggccttcgcctgctaagtcatatttaccagtttctttgttgaagaactcagaagaagctacgtccatacctaattggatgtctttaccagcttcgtaaccagcttttgtgattgcttctacgattacttctaatgcttcacggttagaacctaagttaggagcgaaaccaccttcgtcacctacagctgtgtttaagcctttagcagataaaacagattttaacgcgtggaatacttcagcacccatacggattgcttctttaaatgtaggagctcctacaggtaagatcatgaattcttggaagtcaacgttgttatcagcatgagaaccaccgttgatgatgttcatcattggagttggtaattgcttagcgttgaatccaccaaggtaacggtataatggaagacctacgaaatcagctgctgcgtgagctactgccatagatacaccaagaatagcgttggcacctaatttacctttgttttcagtaccgtctaactcgatcataaggcggtcgataccgatttgatcagttacgtccatacctactaattcaggagcgataatttcgtttacgttttctactgcttttaatacacctttacctaggtagcgagatttgtcaccatcgcgtaattctactgcttcgtattcaccagtagaagcaccacttggtactaaagcgcgtccgaaagcgcctgattcagtatatacttcaacttcaactgttgggttaccgcgagaatctaatacttcgcgtgcataaatgtcaagaattgctggcattttaaaactctcctttataattaattatttaattaatgttttacctgtcatttcttttggctgtgctacgtctagaagagtaagcatcgtaggagctagatctcctagaataccgtcttcacgaagctctaagccttgtttggttacgattactggaacaggattcgttgtatgagccgtcattggattaccttcaagcgtaatcacttcatcagcattaccatggtctgctgtgatgattgctgtaccgcctttagctaaaattgcacctacaattttgcctaagcactcatctactgtttcaatcgcttttaccgttggttctaacatacctgaatggccaaccatatcaggatttgcaaagtttaataaaatagcgtcttgcttatcgccttcgatttctgcaagcaacgcgtccgtcacttcataagcactcatctcaggtttcaagtcatatgttgctacttttggtgaatcgattaagatacgtgtttcaccaggaaactctgcttcacgtccaccgctcataaagaacgttacgtgaggatatttttctgtctcggcaatacgaagctgctttaagttattttgagataatacttcaccaagcgtgttatccaagttaattggcttaaaggctacatatccgtcaactgtttcgctgaagtgagttaaacatacaaaatgtaagttcttcggatgtttttcaccgcgatcaaatgaacggaaatcttcgtttgcgaacgtatttgaaatttgaattgcgcgatccggacggaagttgtagaaaataactgcatcttcgtcttgaattgtcgcaactggcgatccgtcttcttttgtaataacagaaggtaaaacgaattcgtcatagattccattttcatacgaatcttttacgcactcttcagcgcttgtatatgatggaccttcgccgtacaccattgcgcggtatgatttctctacgcgctcccagcgtttgtcgcggtccattgagtagtaacgtcctgaaagtgttgcaatttcaccaacgccgtactcttcaattttttcattaagttcttttaaatacgtttcagcagattgaggtgctacgtcacgaccatctaagaagccatgaatgtagactttttctaagccttcactcttagctagacgcaataatgcatatagatgttcgatatgactgtgtacaccgccatcagataaaagcccgaaaagatgaaggtttgtacccttttcttttgcgtgctttacagctgctagaagcgtttcgttttgttcaaactcgccttcacgaattgctacgtttacacgagttaagctttggtacacaattcggcctgcgccgatgtttaagtgacctacttcagagttacccatttggccttctggtaagcctacagcttctccagacgcctgaagtgtagcatgaggatactcgttccagaaacggtcgaagtttggtttttttgcatgtgttaccgcattacctttatcttcatcgcgtaatgcaaaaccatctaagatgattaatgctactggctttttactcattacttaccagcctccaaaagctgtaagaaagaatctgcttctaagcttgctccacctactaaagctccgtcaatgtctgattgagacatatattctttaatattagcaggttttacgctaccgccgtattgaatacgtacagcatctgcaacatcttgagagaattgttctgcaacaacgctacggatgtatgcacaaacttcgtttgcaccttcagcagttgaagatttacctgtaccgattgcccagattggctcatatgcgataaccgtttgttttacttgctcatcagttagaccagctaatgctttttgtacttgattagctacaactgtttttgtttgatcttgttcgtactcttcgtttgtttcaccgcagcaaacgattggtgttaaaccgtgtttgaatgcagcaattgttttttggtttactgtttcgtccgtttcagcaaacatttcacgacgctcagagtgtcctaaaatgacatagttcacacctaagtctgctaaagcaacagggctcacttctccagtgaacgcaccgttttcttcaaagtgcatgttttgtgcaccaatttttaagtctgtgcctttagtcgcttctactaaacgatctaaaaatagtgcaggtgcacatactactgattctacgctttcaggagatggtactgctccttttacttcttcaacaaagctagttgcttcagaaagtactttgttcattttccagtttcctgcaataattggtttacgcatgtataacaccgtcctttgtttattgtgggttttcccttcacgcgttagatgtccaagagggtgctgttaaaagtgattcggtcccttttatctcttggtcatccatcttcgctgcttgataattttttatattatcagtcgtcaggtcggtcctccgtcttactgaaacataaacttacttatcgtttaatgcaactacgcctggaagttctttaccttccataaactctagtgacgcaccgccacctgtagaaatatggctcattttatcagctaagttgaatttttcaacagctgctgcagagtctcctccgccgattactgaatatgtgtcagttgcttctgctaaagcttctgctactgcttttgttccgttagcaaatgcatctaattcaaatacacccattggtccattccaaataactaacttagagtttttgattacgtcagcatagatttcacgcgttttcggtcctgcgtctaagccttcccaatcgcttggaatatcttcaattgatacaacttgaatattagcatcatttgagaagtcatctgctactaccacgtccactggcatgtagaagtttactccgtttttcttagctttttccatgaaagattttgcaagttcaatcttgtcttcttcaagaagtgatttacctacttcatggcctagtgccttaataaatgtgtaagaaagtcctccaccgatgattaagttatctactttatcaagcaagtggtcaattacaccgattttgtctttaacttttgctccaccaacgattgcagtaaatggacgttctgggtttgataatgcttttgaaagcacatcaagctctttttccattaaaaaacctgctactgctggaatatgttgtgcaattccttctgttgaagcatgcgctcggtgagctgcaccgaatgcatcgtttacgtacacgtctgctaattcagcaaatgcttttgctaattcaggatcatttttctcttcacctgggtaaaaacgtacgttttcaagtactaaaacatcgccttcgctcatgccgtcgattgttttctttacttcttcgccaaaagcttcgtcagcttttgcaacgtctttaccaagaagagcttgtaaacgttctgcaacagcatttagacgtaactcttcaacaacttcgccttttggacgtccaagatggctagctaaaattacttttgcaccttgttctactaaatattgaatagtaggaatagctgcacgaatacgagtttcgtctgttacttttccgtctttcattggtacgttaaagtctacgcgacaaaatactcgctttccttttacatcgatgtctttcaacgtttttttgttcatcgttaaaaggcctccttaagtatttatggtactaagcaagtaggcttctatgtaatcatcaatccacaaaccaccgtacatttcattttatatattggcgcctttctatataaagtgaaactccagttagctgcttatgacgctttttcatgtagaagccaatacataaatcaaggaagagggggtatgcccctctcttccttagcaagtcttattatagtcgttctattttcagatatccaataaaaaaggaaagtctagtcgatttctgtcttattgaataaaatagaagcgaattttaagttattcttatagtcctttagcagcgatgtattgagcaaggtctactacacggttagaatatccgctctcgttgtcgtaccaagagataactttaaccatgttaccttccattaccattgtagataatgcatcgattgtagaagagttgatgttaccattgtagtcaccagatactagtggctcttcgctgtaaccaaggatacctttaagatcgccttcagcagcttctttaagagcgttgtttacgtcctcaacagttacttctttgtcaagttcagcaactaagtctactaaagaaacgtttggagttggaacacgcatagctccaccgtttaatttaccttttaattcaggtaatactagagatacagctttagcagcaccagttgaagttgggatgatgttttcagcagctgcacgagcacgacggtaatctttgtgtggtaagtctaagatttgttggtcgtttgtgtaagagtgaactgttgtcatcattccgcgtttaagaccgaacttgtcatttaacactttagcaaatggcgctaagcagttagttgtacaagaagcgtttgaaattacgttgtggttagccgcatcgtatttgtcttcattaacacccattacgattgtgatatcttcgtcagatgctggagcagagatgattacttttttagctcctgcttctaagtgtttcgcagcgtcagcgcgttttgtgaagaatccagtagattcaacaacgatttctacgccttgtttgccccaagataattgagctgggtcacgttcagcagagatttcgattgttttaccgtttactactaagttgctaccatctactactacttctgcatctaattttccgtgtacagaatcatattttaaaaggtgagcaagcatgttagcatctgttaagtcgttaattgctactacttcaacgttatcattttttaaagctgcacggaatacgttacggccgatacgaccaaatccgttaataccaatttttactgccatgggtatttcctccttgaatgtaaaaagtatttttttatatgagggattaattaaaatcccttactaactcttttgcggcgccttcatctgtaatgagaatcgaatcatgcgcttgttgcataaacgctttaattgcctttgcttttgatgaacctcctgcaacagcaataacacatttattgttctttaaatcatcgagttgtatgccaactgttttaactttatgaacaacttcgccttgatgattaaaatagtatccaaatgcctcccctacagcatgtccatttttcactttttctaagtctgcttgtggtgttttacggcgttctgccattgtcatagcgtctcctattccgtgaacaaccataccagcggacttaattaaatgaagcatatctttaatagatggttcaccgataatggatcggtatgcttcatcgctaagctgatctggaacatgaagcaagcgatagtgactcatggacttttcagccatcttagcacaaatcgtatttgcttggttttgtacattttcacctagccctccgcgagcaggtacaaaaagtacatcagggtgttttaaatcaggtgtcatcatttcagcaacggcggcaagcgtggtaccacctgtaacagcaacggtattttttttaccaacaaggcgctccttgatacacgaaacagatgctcgacccatttcatttttgacccaaggagactgatcactatctccagatacaacaacaacttctgataaagaaaacgcctcttttaatgttgtttccaataatcgaagtcctgaaacttccttcattacttcttctaattcagccagaaggagttctccctcatttgtaagcgtcattccactagggtaaatgtcaatcaaatcttgttcttttaagaatgttacttcgcttcgtaacacacgctctgttagcccaaggcttacagctaagtttctgcggccaattggctgcattaaacgtatgtattgcaagatttgatagcgcttttgcataactgagagaagttcaggtaataattttcgttgtacttctattaaagaacgcatgttaaaatccccttaaggcataaactcgttggacacattttgtcccgtatagacatattatgtcccaccttgcgcaaaaaaaattcaccctgctacaaagtctattctaacaggagtgaatcctttattcaactcatgtgttgcctatttttaaaagtaagcgttttcttaacggaatacctgttatttttccatattccacttcttctccatccatttctactacaggaatggcaaggtgatacttttccagccactcatcgtttttgtaaatatctcgttcaataagctgaaagggaaactccgactgcagctctgcaagcagcttctttgcatcatcgcataagtgacagccatttttggtatacagtacgactttcacattcccactcctttactgcgtgacaaaaagttttcgttgactggatggtagaacgtttaattgatctcgatatttggctaccgttcttcttgaaatagtaacgctataattgctttgcaagacgttagccaactgctgatctgaaagcggacgctgtttgttttcttctgctactagctttttaagcagttcttttacgtgagttgtagaagtcgcttcgttgttgcccagttgaatactagttgagaaaaaagatttcattgaaaaggtgccaaaaggcgtttgaatatatttgtgccgagtagcacggctaattgttgattcatgcacagacgtttgttccgctacttccttcattgttaacggcttcaaatacgaaggaccctttttaaaaaatgcttcttgttcaatgagtaaggtattcattaatgcgtttaatgtatctttgcgtgtgtgtaaacttttcataatccattgaaattcacgatatttctcttgtaaataagaaaacatttcttggttctgcctatttttcagctgaagtttgtattgttcattcactgaaagacgaggttccaaatcctcatttgcataagcaacgacatttccatcttcaatttttacaataaaatccggtacaatgaatcgttcattggacttcatataaaacgatccaggacgaggatttaatttcttaatctgttcatgtaattgttgaagagcttcaagtgagatttgacataactttgagattttcatccattttttatacgcaaattcctcaaagtggtgtgtcaaaatttgctctatttcttctgtccattgattacttctttttaattgaagcattaagcactcttgtaaacttctcgctcctactcctgccgggtccatctgctgcacaagctggagagccttttcaacctgctcttgaccttggccaagctggttagcaagtatgattaactcatcgtgcaaatagccagcatcatccagactatgaataacaaactcaacggctgcctgctcacattcatctaattttaataatgcggattgattcattaaatgttcgtacagcgtttctttaggagctggtatactgctcatataatctgttgaatcagaagttgcatgatttttttgattgtgagatgtatagacgggcagctctgaaaaatctataagcggattttgaagcgcctgctcatgtaaaaacgctacaatatccatcgatgaatattgtaaaagagaaatagcttgtgataattcttttgacatcgtcagctttaacgactgctgctgaaataatccaatctccattatttctcccctccccttcatctattttactataaaaacgctttcaaagagcatgtaactattttttatatgtaattttttcattaaaaaatctccgtcaacctttgttaacgaagcggttcatcctgtttttaattactaaccatcaaaaaagtaatagagctatgcacctttataacttttcattataattcacaccaaccacatgatccgagtaaaaatccgacatgacgttttcttcgtcatgtcgaattttctgcatgtgtataatatatagaagaattacttattgaatggtttgtgccatttgcataaacttgtccaagttttcttcgtcatttttcgtgaagatggttagcttcattggtttctttccttgaaccaacacagcgtttaccgtatgatcgtcagatgtggcttcataccaaacagaatctttgaagattccattctcttcaagattctttttctctgctgcatttttattaactgctgttgccgtttgtttaacagattgagcagcgtcgtccatcgatgcttctgatgaaagcatttcgatacgcataaattgagaatcatctgaagttaatactaacgcatcttttcctggttcttcacccgttagtttataaccgtccattacttgaatagaataatcttgtcctgggctttttgttagttttgtttctgaagaagaagttgactgtccatcttccgctgtttcgctagttgatgattgacttcctgaaggtttggctgagacctcggaagaatccccatcttttttcgaatcttcttttgcagcgcctgatgtttgatcagatttagaagctgtgtcctgctgaacattttctgcttgatcattagacttcggctgagcagaatcttcgttcgtcccgcatgcagacagcaatagtgctaccgatgcactgacaatgaaaaatttgttcatatatttcatatttattcctcctccgtgtttcttttccttatatactgttttatagtattctgacaaattccgcaaccggtacaatggaattaatttcttgcttccttacgcgtataaagggttataggaggaaaataaatattattttttgagaagatgagcctttttactcaaaataaaaaacgttgcgtaatccgcaacgttttaagacgccctcgacaggattcgaacccaccctaagagaaccggaatctcttgtgctatccactacactacgagggcatatttgtcacaacttccattataggagagaaaacttctcttttcaatagaatactacgtttattttttttagaagggggaaaaattttaataatgtcaaagaggaatacatagtcttttaagcgaatatgtgtagtagaggttcttttgtttgacctttattgaccatacgtgtattataggtacataacaaattattcttgttaaggaggaatttaatatgaacttaattcctacagttattgaacaaacaaaccgtggtgaacgtgcttatgacatttattcacgtttattaaaagaccgcattattattttaggtagtgctattgacgataatgtagctaactcaatcgtttctcagcttctattcttagctgctgaagacccagaaaaagatatctcactttatatcaacagtccaggtggctctattacagctggaatggctatctacgatacgatgcaattcattaagccaaaagtttctacaatttgtatcggtatggctgcatcaatgggtgctttcttactggctgctggtgaaaagggcaaacgttttgctcttccaaacagcgaagtaatgattcatcaacctcttggtggtgctcaaggacaagctactgaaatcgaaattgcggcaaaacgtattttattcttacgcgaaaaactaaattcaattttagctgagcgtacaggtcaaccgttagaagtgctacaacgtgatacagatcgtgataatttcatgactgctgaacgcgctttagaatacggtctaattgacaaagtattagaaaacgaccctaaataaaaaaaaagcctttcccgcagcgggaaaggcttttttatgcatcgttctctacgtaagctactaacgcatccattgcttctttttcatctaccccttcaacaatgagcgtaatgagagaaccattattaatcgctaagctcattaaccccatgatacttttagcgttgactactttctcatctttcttcaagtacacatcagatgtaaaacgagttgcttcttgcacaaatagtgccgcaacacgagcttgtaatcccgtttttaattttacttctacttgtttttccatgataaaatcctcccccttgcaattccccttatgtgactggctgaccggcgcgaagcttgtctgctatttggtcaattttacgcaaccgatggttaatgcccgatttgctaatttgacctccagataccatctcaccaagctcctttaacgtaacgtcttggtattccacacgcaaacgagcaatttctcttagcttttctggtaagatgtctaatccagctgtttcatcaatataacgaatgttttccacttgacgaatagccgctccgatcgttttatttaagttagctgtttcacaattaactaagcgattaacggagtttcgcatatctcggacgattcttacatcctcaaaccgtaacagagcgttatgggctccaatgatatttagaaactccgtaattttttcagcttctttcaaatagttaatatagccttttttccgttctaatgttttactattcaattgaaattcgttcattaaattgcataaagcttcgttgtgctcttcatacaatgaaaagatttcaagatggtacgatgatgtctctgggttattaatagaaccgccggctaaaaatgcgcctcttaagtaggatcgcttacagcattttttttgtactagctctggtgaaatacgatgtgtaaacgtgaatccttcttctacaattttcaagtcttccaaaagcattcttgttttctctactaatcgaacaatatacacattgttttttttcaaccgcattttcttacgcacaagcagttctactgacacatcataatttttcttaagcaggacataaatgcgccgagcaatcgctgcgttttctgtttgaacatcaactgtgaattttttattcgaaaaagaaagtgaaccattcattcgaattaatgcagaaagctctgcttttgcacagcaatctttgacttctaaattcgttaactctttttttgtttctgatgcaaatgacataacttcacctccaatctacatacggaaacagtgttaaacacccgtattcgctttaccttgcagcgatgtcagcatagaatacacaagctttgctactttttttgtatcatgcctaattacgctgccgtcatactgaataatttgatcttcaatcacttctaaccctaattttagcaatacttcacaatcatattctacgggctgagcctgctctacttgatatttctttttcaaaggtgctggaataggtgcattattgacgataatcgcatctaaaaatgcacacggcatatgattgtaaagcgctttaatatgatcacttgccttaaagcccaatgtctcacccggctgcgtcatcacgttgcatacgtacactttctttgcttttgtcgaacagagctcgttacaaatatcctgcaccagtaaattcggcaaaatacttgtataaagacttccgggccccaacacaattaaatcagcgcgtcgaatagcttttattgtctcgacaagcggtttcacatcggcgggcgataaaaatactttattaatttttttattaacttctggaattttagattcacctgttacgatggatccatcttgcatctccgcatgcagcacaacactttgattagctgctggaagtactttccctctgacgtttagtactttgctcatttctcgtatagcatgcacaaaatcgccagtaatagacgtcatagctgcaagcaacaaattgccaagagaatggcctgtaagctcatttcctgtatcaaatcgatgctgaaaaagctcttcaactagtggctctacatcagataaagcaactagcacatttcgaatatcaccaggagcagggatttcaagttcatcgcgcaatcggccagaacttcccccgtcgtctgctacggttacaatggctgtaagatcaagagggtattccttcaaccctcttaacagcactggtaaacccgttcctcccccaatgacgacaacttttggaagctgttcactgctcatctatgattttcctttctcctctcaatgtcacgatgagaaatatgagttttgtattcattctggaaatggtgacctaaatattcagctaatgtgacggagcgatgctgtccgcctgtacatcctatagcaatgaccagctggcttttaccttctcgcttgtactgtggaagcataaacgaaagtaagtctactactttttcaatgaacttttgagtttccgtccattttaatacgtaagaagaaacctcttcttcaagccctgttttaggacgcatatggtcaatgtagtgagggtttggcaaaaagcgcacatcaaagactaaatcagcgtcaataggtacaccatatttaaaaccaaacgacatcacattaacagtaaaaacctgtgaagcgtgcgacgaaaactgagttaaaatcttttctctaagctctcttggttttaactctgacgtctcataaataagctgagctcttccctttaactcctcaagaagctcacgttccataccaattccttctaaaggtaaacccgaaggagctagcggatgtgaacgtctcgtttctttatagcgcgtcaccaatacagaatcttttgcatctaaaaataaaatttgtggcgtgacccacgttgtttcactcatgttatctaatgcttcaaacaggctttcaaaaaactctctgcctcgcaaatccataacaagagcaactttattcattttattccctgactctttcatgagttctaaaaatttcggtagcaatgtagggggtaaattatctacacaaaagaaccctaaatcttcaaaactctgaattgctactgtttttcctgcacctgacattccagtaataatcactaattgaatatcgcttacagacccagtactcattttccatccccctcaatctatgcatacatgtctatttatcattaacaaggatcaattcgataagataataactcgaaatccgttgtatacgtaaagttgccataaataacacccgacccttttgctacataatcgataatgtgatgatctcccggtgccatcggcaattcacttacttcactcaaattatgccaaccgagtttgccttcttctgattctagcacatttgtcccatcaaaatctgtagcaaaaaaagtaaacatcatccattcagatgaaatttgatcgttttctttcatcgtaaaagtaaagataccttttacagtgggatttttcaaataaattcccgtttcttcacgaaattctctcacgacagagtcttttacagattctccttgctccattttcccacccggggccacccaccagtttcttcgtggcttttgaagcaacaatactttatcatctttcattaatacacaatttgtgaccctttgcatgttttccacctcatcatatgtatactgacattttcttttattatactacgaaacaaacttctctcacaacggagatgaactaactattactaaattttctgaaaataagctattgctgttatatacataaattcaatctgttatagtcacaaaaaagaggcataggaacacgtcctatgcccgacatacatatattttataaaagggggtcaattactatctatatagtaccccatcaatgtttcacaggtgttacagaacagttaaaaccgaattacgttttgtaaaagattgatttcagccttattgctgaatagcttttaacttttcttttaactcttctacatagtgctgagccgcttgagccgcaatactgccatcacctgtagctgttacaatttgacgaagagccttttcacgaacgtctccagctgcgaacacacctggtacttttgtttccatttgctcgttcgtttcaatatatccttctttattcgtgatgtttaggctttcgaatggttttgttagtggaaccattccaacataaatgaatacgccgtccgcaccgaactcgcgctcttcacctgtttttgtgtctactaacgttacgctgcctactttaccgtctttttcatttacttctttgaccgttgtattccaaataaaatcaactttttcgttgtcaaatgcacgctgctgtaggattttctgcgcgcgaagctcatcgcgtcggtgaataattgttacttttgttgcgaagcgtgttaaatatacgccttcttcaactgcagagtctccaccgcctacaacgactagctctttacctttaaaaaatgcgccgtcacatacagcacaataagatacgccgcggccgcctagctctttttctcctggcgcgcctaattttttatattctgcaccagtagcaacgattactgaacgtgttttatattctttgctgcctgcacgaactgtcttgtattcttctccgtcgatgatttctttaatatcaccgtacgcatattccgcaccgaatttttttgcatgctcaaacattttgttagaaaggtcaggaccaaggatatggtcataacctggatagttttctacatcttccgtattagccatttgaccgcctggaattccgcgttcaatcattagtgttgataaatctgcacgagatgtatatacagcagcagtcatacctgctggacctgccccaataataatgacatcataaattttttcttctgtcattgctttacactccttttaggaaattccttcgtagttgattccaaatttatggataattatttcgttaccactatcctaatatgttcttcctatcatcgtctatttttttgctcaatttaataacgtattcacaattttactgtactttctaactgtagcagcggaaatggaatattgttttgccgcatcggcttgagtaatagcctgccttttttctttcgcccatatatatgtgacggctgcagcccatgcatttacgttcacatgctgaaaatcataggattgtttatatacctgtacatatacataaaaccaaaagcttaaaagatcctgggtatcactttcattctgcgattccatctccagttcaataacatctgccacctcaaaaatcacatgttgtttatcctgccatacatacgtatatacttcatccaaaagtgtactcatatgtatggacgacttaatttcttctaaaagaagcagacgctgctgttcaggaagcttttttgccatatacaagctgtaaagctgatcgtgaacattttttgttgcacacttctttttcgctgtaacatccactttcgattgaaaaaccttcgcagctttttgactgatgcgccaaggctcctctccttctttatcaggaacgtcttccaatgccagcttccacatttctttagcgaacgcttcacgtccggtataataagaggcatatgagagccaataatgaaatgagttgtctccttgaaacccttgtgtataaagcttttttaaccatctgtatgatagtttgtattgaccaatcaatgcaaatgttgctccaagcttatagcggtgttcaaatgacattggataaacgcggctaagcccgtctgtaagctcttcaacttctttatgcttgtggcaataataatagaaaatcagctgattgcataacgcatgaaggtttccagggtttttctccaatacttcattcagcaaatccattgcctcatcaattttatttaaataaaaataagctaacgctaaattattatatgcagaccagaattctggatactcatcaattatttcagttaacaaatccactgcttcttcaaaattcgtagcttcaagcagtctttttgcttgttcttgttttataatcagcatgtcgcctagctgatttttaggctcttcatcttcttcatccacatcaattgatagtaaatctaacagatctgtagccgatcgaaagaggtcaccatttggaaaatgctcaatgtaatacatcgcgtatttttttgattcttcaaacagtccaagatgcgcatagctgttggctatatagtagtaacagcttcctaatgtatcgtccatatgatgaatcacatggagaaaaagctcgttggcatcttgataatctccccgctccgttaaagctactccaacgtttgtaagaagctgtggattacgggcattttctttgtttgcacgcgttaaatacttgagcgctttatccgactcctcttcttcaaacgcctgcagcgctttttcgaaatagaagtcacccgtttgcgaaaatggaattacttgtgccattttttgaattacttttgagtgtttttccattaagccctccaaataagttgataatttcgacgttcgtagtatatcacatttgccaagaagtttaatacctctattcaaaaaaggagcctgtaagcagtcgtttcttgacacaaataagagaaggttttgcctcttatatctaaaatgagacaactccttctctcctttcactatgtagctattagctagagtgacgctcttttaatactgataggacatcgtctaaaggcagcttttgctcacgaagtaaaacaagtacgtggtacaataaatctgcaacttcccacttcagctcatcatggtcacgattttttgctgcaataatcacttcaccagcttcttctcctacttttttgaggattttatctacgcctttatcgaataagtacgtcgtataagctccttctggcatttcagcttcacgcttagcgattacttcttctagctcattaataatagcaaaccgattatcgtttcgtttattttcgccaagaattgtttcattaaaacagctgtaagcccccgtatgacaagcaggaccttgaggctccacttttaaaacaagagaatcagcatcacagtcatatgccatgctcacaattttttgtgtgtttccagaggttgcacccttgtgccacaactcttgtcgagatcggctgtaaaaccatgtttcacgtgtatcaattgatttttgaagtgattcttcgttcatataagccaatgttaaaacttctttgctcacagcatcttgtacaatagctggcacaagtccatcactgttgaatttaatgttttcaatcgtcatcgaatgctcactccttgttgttttgcatagcttttaatttcttttacagatgtttctttatagtgaaggatcgaagccgccaaagccgcgtcagcttctcctttttcaaacgcatcgacaaaatcttgaccatttcctgcgcccccagaagcaataacaggaacgctcaccgcttggctgactgctttggttaatgctaaatcaaaccctgacttttcgccatctttatccatactcgttaacaagatctcacccgcaccgcgcttcactgcttctcttgaccagtcgattacttcccagtccgttgcgttgcggcctccgtgtgtatagactcgccatgattgtaaactttcatcgtacttagcatcgatggctaccacaatacactgagctccaaaaaagtcggacccttctgtaatcagtgctggattgagtacggccgctgtatttaatgacactttgtctgcaccagcacgaagcattctcttcatatcttctaatgcattaattcctccgcccaccgtaaaaggaatcgctagctgagatgctacttcttctacaacatgtaccattgttttgcgtccttcatgagaagcagaaatatctaaaaagactaattcgtctgcgccttcttcatcgtaaaatttcgccaactctacaggatctcctgcatctcgaagttccacaaactgaactccttttaccacacggccgtcctttacatctaaacaaggaatgattcgttttgtaatcattacgctttcacctcttgaagtgcttcagctactgtaaacttatttgtataaattgctttccctacaatcgcaccaataacgccgtcagcttcatatttctttagtgcatctagatcagcaagcttactaactccccctgatgcaatcacaccttttccagtagccttagccatttcaacaattccttccacattaggaccagacagcataccatcggtagaaatatccgtgaaaataaatgtttccgcaccagccttagccaattcttttcctagttctgtcgctttgattgtagatgtttccacccagccttccgtcgcaacatagccatcacgtgcatcaataccaatagcaatacgcacaccatattccttcagcatttttttcacaaattcaggattagaaatagctgcacttcctaaaataacgcggtcgattccattttctaaatagtaagcaacgtcagcttctgagcgaatgcctcctccaatttgcacacgtacatttaatttctttttcacgcccagcacaaattcatcattcacgcgcttggccgcttttgcgccgtctaaatcaaccatgtgaatccactgagcgccttcacttgcgaattgtgcggccatatctaccggagaatctccgtacaccgtttcttttgtgtaatctccttgaagcaaacggacgcactttcctccgcgcatatcaatggctggatatatttcaaatttgctcatacgatgggctccttttctctacgaagtttgcataattttgcagcatttgcattccgattgcactgcttttttcagggtggaattgagtgccaaatacgtgttcttttccaacaactgctggaacttcaacatcataaggacttgttgctaaaagcacgtcttggtcatttgtttttacgtaataagagtgaacaaagtacacgtgaccttcactgattccatcaagcagagcagactgctgatgaaaatttaaagagttccagcccatatgcggaactttatatgtctgtccttcggcagtaatgccgggaatacgcttgactctcccttttaacagttccagcccttttgttacgccgttctcatcgctttcttcaaataaaagctgcatacctaaacaaattccaagcaaaggcattccttttgctacttcttctttaataaagtccgtcagctttgtttgattcagctgttccatcgcatctttgaatgctccaactccaggaagaatcagcccttttgcctttcttagttctgcaggatctgcggagataatatagtcatagtttaatcgttcaagagctttacttacgctgtataagttgcccatcccatagtcgataattccaatcatttacaacatccctttcgtcgaaggcacacctttgacacgcggatcaatcgttgtcgcttcgtccaaagcacgtgctaaagccttaaataccgcttcaataatatggtgtgtatttttaccgtagtgtacaattacatgtacattcatgcgagattctaatgcaaatttccataaaaattcatacacaagctctgtatcaaatgtaccgacgcgcgacgcgggaatgtcacctttaaattcaaaatgaggacgattgcttaaatccactacaacttgagccaaagcatcatccattggtacaaaagcatttccatagcgcttaattccttttttatcaccgagcgcttctttgaacgtttgaccaaggcaaataccgatatcttccgttgtatggtgatcatcaatctccgtgtctccatctgcttttacatcaaggttaaactgtccgtgttttgtaaataaatcgagcatatgatttaaaaaaggaacgcctgtatcaatgttcgcttttccttctccatcgattccaatcgctaatgcaatatccgtttcgtttgttgtacgtttaatacttgactctctcattgtgaaactcctttcaactgtgcatgtaataagtaaagaaaagaacatttctactcttttcttttaatctccatcttattttttaaagcgttcttcaaccgcccttgcatgagcttctagcccttctaaacgagcaaacgctgcgattttcgagacatttttctgcagggcttgttggctgtatgaaatgatactagactttttcacaaatgaatcaactgataaaggacttgagaatttcgctgtcccatttgttggaagaacatggtttggtcccgcgaaataatcgccaacaggttctgagctgtatcttcctagaaaaatagcaccggcatgacgaatagaacctaaaagttcaagcggactttcagtcataatttctaaatgctcgggagctaattgattaacagcttcaatcgcttcttctaatgacccggtcacataaatagcgccatggttatcaatagaagattttgcaatttctttacgaggtaaagattctacttgtctttccacttcttctttaacagcttcggctaatttcatagaaggcgtaactaaaatacttgaagctaatttgtcatgttctgcttgagacaataaatcagcggccacttcgttcggcttagccatatcgtctgctagtacgacaatttcactaggtccagcaattgagtcaatgtctactaagccatatacttctcttttcgctaatgcaacaaagatattacctggccctacaattttatcgacgggttgaattgtttctgttccataggcaagtgctcctactgcctgagctccccctactttataaatctctttgaccccaagctcactggctgctaccactactccagcaggaagcgcaccgtcttttcctggaggtgaaaccatcacgatacgttttacacctgccacttgagcaggaatgacattcattaaaacggaagaaggatacgccgcaaggcctcccggtacataaacacctactgcatctaaaggcgttactttctgccctaaaatggtgccgtcttcttttgttgtcatccaagactgctcgaccattctttcgtggtaatcacgaatgttgtcagcagcttcacgaatgattgacagcatatctgcatcaatcagctcataagcacgcttcttttcttgttctgtcacgagcaaagaagaaagctcaacgccgtcaaattgcgctgtatacctttttaaagcttcatctttttgctcttgcacctgctttaaaatatttacgacaatttctctttgagcacttgtcccttgatcaatcgtacgctttaagctcacttgttctgttacacgtgtaattttcaatgtatgtcacctcttttatacaggttgaaccacttgggctaaacgatttactaaatcatcaattcgttcgtcttttaaacgatagctcacagggttcacaatcaaacgcgatgtaatatcttcaatgtgctccaattcaacaagtccgttctcttttagtgtttgtcccgttgatacaatatcaacgatccgatcagccaggccgattaaaggcgctaattcaatcgaaccattcaattttataatttctacttgctctccttgctccctgaaataagtagatgctacatttggatatttggttgccactttttgagcaatttctgattttttagccttaggcaaaccggcaacggccagatgacatttactaatatttaaatccaacagctcatagacatctcgttcttcttctaacattacgtctttacctgcaataccaagatccgctactccgtattctacataagtagtaacgtccattggttttgctaaaataaagcgcatgttctcttcaggaatgtctacaatcagcttgcgcgaatcgtcaaattctggcggcaattgaaagtctgcttgacgcaaaagttcagctgcttcttcaaaaatacgtccttttggcattgcaattgttaatagttcactcattattgtccccccttgcctcgttttccaattagaaacgtgacttcttcaaactgtgcagtaaatacatcaacatcatcaacgcctgcaatttcctgagtcactacccggtatccttgcttgcgctgttcagcagctaaagctaatgcctcatctaaacgctcctggctatataatatgccgtatactgctgaaggctcatatacttcttcgcccagcgcttcaattaagcggtcgagctgaattccaaatcctgtagctggtgttttagacgcaaatttttcaagaagctggtcataacgtcctccattaccgatatggaaaccaacgttttcagcaaagacttcaaataaaatacctgtgtaatagctcatatgactgactaagttaaaatcaattttaatttcatccgttacaccgtacgcatcaagcatattccatagctttttcaaatcaccggctgcttttttaccagcttcattttcaactagttcaaccgcttcttcaatcttcttttcatctccgcgcaggttaagcaactgaaggagacgctgtttatcaatagaagatagattcaaatcttttacatgattacgatagcccacgtaatttttctcatataaaaagcggcgaagcacgttagcacgttcttcatttccgacaatttctaaaaaaagcgaattaacaaacccgatatggccaattgccactttaaatgatttaagtcccgctctttttaatgcgccgatcatgagagcaatgacttcagcatcgctgctcatcgtagcgtctccaattagctcaacgcctatttgttcaaactccgccgggcggccaccctcacgctgctgagctcggaatacatttgcttcataagctaagcgcaaaggagaattatttaaaagttttgaagcggcaacacgtgcaaatggcgttgttacatccggtcgcagcacaagcgtatgcccttctttatctaaaagtttaaataattgttgatctaaaatagccgatgcgcttcctaccgtctcgtagtattccacagtaggcgttgccatatattgatagccccagctgctgatttcatctgccagctgattgcgaacttgtttttttctttcaaaaagagctggcagggtatctctcattccaaggggtttttcaaacataaataactttgacattccgacacgtcctttaagcttgattttatctattaaggaaccattgataggttgattttactttatcacactaatgtattagcgaaataacaaattaaagttattgatagtttacacccgataaagtcagccgtcaaccgccagctgttcaaatttacaaaaaaaaccacagcttagttcttgctaagttgtggctttaggttctgcttccctgcgcttttccatttcttcttttgtatagataacacgcatagggttacctccaacaaagaaaccgggtgctacatctttatgaaccaccgttccagccgctacaaccgcttcattgccgattgttacacctggaaggatggtgctatttgctccaatcatcacttcatccccaatgatgacatctccaagacgatattccgttatcagatattcatgagcgagaatagttgtattgtatccaatgaccgtattgcgtcctacttgtattttttcaggaaacataatatcgagcatcaccataagggcaaaggatgtttgaggtcctactttcatccctaagcacgttttatacagccagtttttcatcgaaagaaaaggcgtatagcgagcgcattgaatgattaggaagttgcgcactactttccaaaaaggcacggtcttatagacatgccaaagggaattagctcctttaaccggatagcgcgtcgtttttctcactgacgttctccttttaatatatcaattaaatccgtcatattttccaaaataatatcaggattataagaagcgatatgatctcttccttttgcactccaagcaactccagctgttttcgtataagctctttggccagaaaagatgtcgtgatgattatctcccaccatcagcgcttcttcaggtttagcatcaagcagcttcagtgctttttctactggctcaggatgcggctttgcatttgttacgtcttcaattgcgacaatcgtatcaaaaaactgatctaactttgttaacttaagccccatcatgaccgtattcctttgctttgttgtgacaatacctaatttataattctgttcgtgcagccatttaaccgtttcaagcacgccttcaaattctttcacaagcaaatcatgattggctaaattatgcatgcgatacatatcaatcatttcgtttactttcgttttatccatttctacaaacgtgtcgtataaaggaggtcccataaactgtaaaatatcttcacgagtatattgttcaggataatagtgattaagcgtatgagtaaatgaggcaataattaattcatttgtatcaattaacgtgccgtctaaatcaaacaaaaccgtattaatcttcattattcatttccttcccttgcgtcagatcaagtttatataaatatcgcttttcttcatttacgccttagattgtgcttcttcattctctaagtatttctgtttactcattcccgttacgcggcggataataattaagataatagctactacaatcagtacaagtgaaacaacttgagcgattctgagtgtatgcgtcagcattaagctatccgtgcgaagtccttctacaaagaagcgtccaactgagtaccagattaaataagataagaaaatttcgccttttcgcagactggtgcggcgaagtaccatcaacaggataaatccggcaaaatcccataatgattcgtataaaaacgtaggatgataatatgtaccgttaatatacatttggttaataataaaatttggaaggtgcaacccttctaaaaaagcacgggtaaccggccccccatgcgcctcttgattcataaagttgccccagcgcccaatggcttggccaaggattaagctaggcgcagcaatgtctgccaacttccaaaatgaaatctttttcacttttgaatatacaatggcagttaacacgcctccaattaagccgccatgaatggcaatcccaccttgccaaatctgaggtatttcatttacatgctttgaatagtatccccattcaaaggatacataataaattcgtgcacaaataatagcgatgggtacagcaaataaaataagatcaacaaatgtatcttttgataagcctcttcttacgctttctcttgtcgcaatataaaggcctaaaagaacacctgcaccgataatgacaccgtaccagtagaccgttagagggccaatttcaaggaaaacgcgatctaacggctgaatagttgcttccacaagttaacaccctttcttataaatcttcgcgatctccttcttcaattacatctgttaggcgtgcagaaaattgttcggctgcgttaatgcccatacgctttaagcggaagttcattgcggccacttcaatgatgacagctaagtttcgtcccggacgtactggcaatgtaatttttgtaacgtctgtatcaataattttcattttatcttcttctaaaccaaggcgatcataatgtttttgctgatcccatgtctctaactgaataacaagcgaaattcgcttatagcttcgtacagctcctgcaccgaatagcgtcatcacattgatgattcctaatccgcgaatttcaagcaaatgctcgattaaaccaggcgcattccctacaagcgtatcttgatcttcttgacggatttccacacagtcatcggctacaaggcgatgtcccctcttaacaagctctagagctgtttcacttttaccaacgccgctttttcccatgattaatacaccaattccgtatatatcaactaatactccgtgcagggcagtagtaggtgctagacggctttcaagaaaattggttagatggctcgatagtcgtgttgttttaaagcttgaacgcagcacaggaactgattcacgctctgaagcttcgataagttctttcggtacgtccatttcacgcgaaacaatgatagcaggcgtgatatctgtacacattttttccattctaacttttttttgttcatcatctagctgtttaaaaaacgatagttctgttttacctaacagctggatacgttctgctgggtaatatgtaaaataacctgccatttcaatacctggacgtgaaatatcacttgttgaaatagggcggtcgattccttcttctccgctaataagctctaatttgaatttctcaatgatgtcttttgtacgtactttaaccaccgtgcatcctccttttatgaacagtcatatacctgttcatgtctacagtatatccaactctcgcttttatgtcgcgtttggttctactagccattttattttatcattaatacggaaagaaaagaaaaaaaagatggcataggctgcatcgccttaccatcttttttagaaaattaaatattgcaagaaagttatcttctattttgaaggggttcaacaatcactctttgaataagcgcatttaaaagcgacataattactgaggctaaaagcgctgtaccaaacccgtcaatattaaaagaatctcccataacactttgtgtaatcatcagcgtaatggcattaatgacgaataagaataggccaagcgtaagaaatgtcaccggcagggtaagtaaaattaaaatcggcttaacaaacacattcaaaatcgatagaatcaagctcgcgataatagctgcactgactgattccaagtgaaaggtgtcaatataacctgcgattacgattaatacgagggcattgattaaaatactaatgattccacgcaataacatttttagaaatctccttcttcatttggaactaaaaacacaaaaatcatatataaaatgaccggggtacctactgtaaaaaataaactgatgataaacaatacgcgcagtagtgaagcatctattccgatatactgagaaataccgccgataacacccgcaagcttgcgatttgttcgcgaacgatacaactttcgcacgttaatcatctcctttgcttttttactaaaacaagcgttttctattttataacaattgagcccgttttggattcagctaacaatttatagcctttaggcgaagcgacattggctttgaaacgaagctgtttcatcaccgtttcttttttctcatctactatttccatctcaggaagtgtacatgtaaaattcccaaagttagatttcaaatctccatcaacggagaggtggggcggcgtatagagcgtaatgctccccgtagtcgttttgaaaaatgctttttcaatgcgctctccttttaaatacgtatcaatatctccgttaaatgtttgaacgtcaattttctttgtgtccccatcaaatttaaccgttccattgattgtttcaagctcacattttgaagcgagtattcgagaaagttccatatgcccatttgatgtctccatttcaagagaatggctattcacatcgtaaaagcggatggtaccattagctgttttggctttcaggtctcgtacgcttagtctttccccatcgattgaaccattaaacatacggagcttgacgcgttcatattccatttctggaatataaataatcgccttcaccttcatttgcttttgctgaattgcaaagcgcaatttgccattttcgatggaaaatgccgtatgctgcaagaaagtgcggcgcgcttcatccgaattctctactttgtagatagcagcttcacactctattcgtacttctgtacttccccaaggtcggagttggacgcttccatttgctaaatctacgtcaatctcttgaatatatgcttctgattgttgaaagatgtgctgaacgtcaatcgaaggaccaaagttaaaatctaaatctccttcttttactttttttaccgtttgatctacaaatgtaaacaatttttcctttaaagagctttgagatgacttagaagcgtacgtttttttctgttttcctcctacataaggggatagctcagctttatcaggcgtagcataggaagaatcattagccgagtctttttccagtgaattcagcaaagttaaagcctcatccacgctaagttttccttcttctaccatctgtaaaatttgtttgcgcttttcactcatacgttccatctcctctttacgttttagtcatttaacttttatctgcttaatatttgtatcccttttacaatattccatacaaacacaacaacattaactaaagaaacaacaactaaagctacaattaaaagaataaataccgttccactagagccagtaagagcaggaagcaagaaaaataagaacaagatagctgtagcgataggtaataaatgtgacaaaaatgcagtttttgcatgtttctttacttctatgttatgaacaacaaaataaataataataggtaataaaaatggtgcaaagaaaacgctaaaataatttaaggaagatagtacgcgatttccttccataataatcagctccttatatcatgtattacggtttaatgagttaaaaagtttcattctttataaaaaagacaccaatgctggtgtcttttaacgagttaatgcctctgctttttcaacttttttctccatacgcttacggtcacgttctaaaattggcttcaaataatgacccgtataggattcttttacttttgccacttcttctggcgtacccgcagccacaatttgtccgcctttatctccaccttcaggccctaaatcaagcaggtaatcagcagctttgatgacgtctaaattatgttcgatcactaaaaccgtatctccattttcaactaagcgctggagcacttttaataatcgtgcaatatcatcgacatgaagaccggtagtcggttcgtctaaaatgtacagggttcttcctgttgagcggcggtgaagctctgaagctaactttacacgctgtgcctctccaccggataaagtagtagccggctgtccaagcgtgatatagccaagtcctacatcgtaaattgtctgcagcttccgcttaatctttggaatgttttcaaagaaatgaagcgcgtcttcaacggtcatatccaacacatctgaaatgttttgatctctgtatttcacttctaaagtttcacggttatatcgtttgccgtggcagacttcacaagggacgtatacatctggcaagaaatgcatttcaattttgataataccgtctcctcgacaagcttcacagcggccgcctttcacgttaaagctaaaacggccttttttatatccgcgcacttttgcttcgtttgtttgggcaaacacatctcggatgtcatcgaatacacctgtatacgttgcagggttcgaacgaggcgtacggcctatgggagactgatcaatatcaatgactttatctaaatgttcaatgcctttgatttctttatgttctcctgctttgctttttgctttatgcagcttttgcgccaatgatttgtgaaggatatcatttacaagcgtactcttacctgatccagatacacctgtaacagccgtgaacatacctaacggaagctttgcttttacattttttaaattgttttcttttgctcctataatttcaatcatccgatctttatctattgaccgtctttccgctggaagaggaataaacttctcccctgatagatattgacccgttaaagagttttcatcctccatcacttcctgaggcgtaccttgcgaaacaatggcacccccgtgtacgccggctcctggtccgatatcaattaaataatcagctgccatcatcgtatcttcgtcatgttctacaacaatcaacgtatttccaatatcgcgcatatcttgcatcgtgcgaattaagcgatcattgtcacgttgatgaagaccgatagaaggttcatctaaaatataaagaacccccgtcaagcgagaaccaatttgagtagccaaacggatccgctgtgcttctcctcctgagagagttccagcagagcggtttaatgttaagtaatcaagtcccacgttaatgagaaagcttagacgctcacgaatttcacgcagtatcatatccgcaatcttcatgtctttttcagataggctgagactttcaaaaaagtcatatgcttcttttactgaaaagcgggttgtatctcctatatgcttttcgtcaataagcaccgctaagctttcgcgttttaagcgatttcctttacattttggacaagcttgctgagccatgtacttttccatttgctcacggatataatctgaacttgtttcatgataacggcgttctacattccgaagcacgccttcaaattcgatatgattttctcttacttggccaaaatcattttcatagcgaaagtaaattttttctttaccgctgccatataatactttatcaaataaatgttccgggatatctcgcaccggcacgtccatatcgatgccgtaatgtgtacatacggcttcaagcagctgcggatagtattgagaacttgttggctcccaaggtgcaattgcatgctgacgaagcgttaagtcatagttaggaataactaaatctttatccacttccaatttcgttcctaacccgtcacacgttggacacgccccgtacggactattaaatgaaaacatgcggggctcaagttctccaatggagaaaccacattttggacaagcatgatgctcactaaaaagcagttcttcttcacctatcacatcaataattactttcccttctccaagacgaagagctgattccaaagagtccgacaaacgagcggctacaccttcttttacaacaactcgatcaatcactacttcaatggagtgctttttgtttttttccagttcaatttcttctgttatttcacgcatttctccgtctactcgaatgcgaacgtacccttcctttttaatatcttctaatacttttacatgggtgccttttcggccagataccacaggtgccagtacttgaagttttgtgcgttcagggtactctaaaattctatctaccatttgctcaatcgtttgagatgtaatttcaattccatgattaggacaaatcggctttcctacacgagcaaacaaaaggcgcaaatagtcatagatttcggtcacagttccgacggttgaacgagggtttcggctcgttgttttttgatcgattgaaatagcaggcgacaatccttcgattgaatctacatcgggcttatccatttgacctaaaaactgtcttgcatatgccgaaagcgactcgacataacgtctttgtccttctgcatagattgtatcgaaagccaaagaagatttaccagaacctgacaaccctgttaataccactaatttgtctcgtgggatttcaatatcgatatttttcaaattgtgggctcgtgcaccttttaccacgattttttccatcgccatcttttatcacccttccgcttttaattctagaatcaagtcacgaagctcagctgcgcgttcaaagttaagcgctttggctgcttctttcatttcttgttccatttcttctacgagctttgctttttcttttttgttgagcttatcaaatgccggtgcttcttcatacgtttctgtatcttctgctactactgttgcacgaattgagcctcgaacttctttttgaatcgttgtcggtgtaataccatgctcttcattgtaagcttcttgaatacttctacgacgcttggtctcattgatagcaatgtccatggagtttgtgatgcgatctgcatacataatgacatgtccattagcatttcgcgcagcacgtccgatggtttgaataagcgatcgttctgaacgcaagaatccttctttatccgcgtctaatatggttactaacgaaacttccggaatatctaaaccttcacgaagtaagttaattcctacaagcacatcgtactttccaagccgcagctctcggataatttcaatacgctcgagcgtcttcacttcagagtgaagatattgaactttaatgcctatttcttttaagtagttcgttaaatcctcagacattttctttgttaacgtcgtaacgagtactcgttcatttcgcttaatccggtcgtgaatttctccaattaaatcatcaatctgcccttcaattggtcgaacttcaatatttggatccaataatcccgttggacggataatttgttcaatcacatcaggtgccttctcaagttcataaggacctggtgttgcggaaacatgaacaatttggttaatatgctgttcaaactcatcaaatttaagcgggcggttatctaatgcggacggcaagcggaaaccatggtccactaacacttgtttacgcgcttgatctccattatacattcctctaacttgaggaatcgtaacgtgtgattcatccacaacaagaaggaaatcttctgggaagaagtccatcagtgtataaggtgtagaaccagcgggacgaagcgttaaatgacgagagtagttctcgatccccgaacaaaagcccatttctctcatcatttctaggtcgtagcgcgtgcgctgctccaagcgctgcgcttctaaaagctttcctgcttcttttagcttctctagctgttcttctagttctttttcaatgttttgaatggcaacacgcattttttcttctctcgtgacaaagtgagatgccgggaagatagccacatgttcacgatctccaataatttctcctgttagagcgtcaacttctcggatgcggtcaatttcatcgccgaaaaactcgacgcgaatacagtgttcatctcgagacacagggaaaatctccacaacatcaccgcgaacgcgaaacgttccgcgcttaaagtcaatatcatttctttcgtactgtacatccactagcgtacgaagcagctgattgcgctctttttccattcctactcggagagatacgaccatttctttgtattcttccggagaccctaagccataaatacaggatacgctggcaataataatgacatcttttcgttcaaaaagagaagaagttgccgagtgacgaagtttatcaatttcatcattaatgcttgcatctttttcaataaatgtatctgtttgaggtacataggcttcaggctgatagtaatcgtagtaactgacaaagtattcgactgcattattaggaaaaaactctttaaactcactgtacaattgaccagcaagcgttttgttatgagccataattaacgtcggcttatttatttccttaataacattagacatggtgaaggtttttcccgttcctgtagcacctaacaaaacttgatgctgcttaccttctttaattcctttcacgatcttttcaattgcctttggctgatcaccttgcggttgatatggggatactaattcaaactgatctttcaaatgaaggcctccgtttctattttcttgttttatctatttttattacgatatgtaaaaaccgaaaacgcgaactgatattcgtattttatcactttataatcataaatgaaactaatgagtattaatcttatatagtgtttgtttgtttttattttttaccctgttactttattacccactaaattcttatactacccttttcgaagggaatacaactctttagatgaaagcaataaaagaaagtaagctgccttattgtttgaaaaagataggcttttgcgccaatttctaaattatgatacagtataaaaaatatgtactgagaggggtttagtatggcaagcgttgatcaagttcttataaataactcctttacaacagttgaagaatcaacttctttagctaaagtgaaatctgaactttcaaactatgaattcgttgtagtcacagcaagtaccttttatgtaatacaaaaagatgaacgataccttttaacaggtcatgacggggcatcttccataaaaaaagtaatagcggatacaaattggccttcatcttctacttctacgttagccaatttacaagccaacacaaactggaacagaccagtcctcattcaagcagaaaaccaagaaaccacaataggacttgtaacaccttcacagtggattacacatttgcatagccaaaatgagatattagcttcctattttgatacattggcagaaaccattaatgatgcagtgacagcggtcgataatgaagggaatgtaatcttgtggaatactgctgcggaacatacgtataagattcagagagatgatattattggtagaaaaatcggagagcatttcaaagatgaatccatcattctacatacgattctaaatgaagggcgccctgtgcgcggaacgtatcatcgtcctaatgaacaaactcacgtgctcatcaatgcatctcctattataagaaacaatcgagtcataggtggagtcgcaactgaacatgatattaccaatattgtaagattaaatgaagaaattgatgtgtctcttctcattccgaaagataatccattttcttctttcgcgggtatcagtcctgaaattaagcaagccgttgacattgccaaaaaagtggcatctacagatatgcctattttattaacaggagaacctggttctgggaaagaaatgctggctcaggccatccactacgggggatccaaacataaagaaccttttttatctttaaattgcgccactattccatcgggactcctggaaattgagctctttggtcatcaaaaagatgtcttttcagaagatccaacgaccattgcgggaaaactggagcaggctcataacgggacgttatttattgaagaaattgataaaatgcctcttgaaattcaagtgaagtttctccgttacttggaagaacgatccttttatcatgttggaggcacggaagaaattcaagtccaaacccgaattgtagcctctaccacgacgcctttggaagagttgctaaaagccggtgaattccatgaaaatctttactatttgctgaccgtcattaatattatcattccgccgcttcgagaccataaagaagacattgaagcattgactcagcaatttgtacaggaatttagtaaaaagtataaaaagaaggctcctttcatcagctctgaagttctcgaggcctttatggaatacgactggccaggcaatattcgcgagctgagaaatacgattgaacgaatgatttttctaagtgatcagtcgttgattacccttacgcaccttcctgacaacctgaaggatgcaagttctttcacagaagttcaaaaagaagaagtctctctccaagaagctaggctaatagaagagactcttcaaaaaacctatggaaacaaaagtgcagcagcagatctgcttggcatttcacgcggcaccctttataacaaaatcaaagaatatggattaaactaattaaaaaattcgacacaagcatctttagcttcgtgtcgaattttttgatttcctttagactgaacttatttctgttttctcgctgtcatcttcccttgtgtaaataatagaagataatcataccctccggctttcgaatccgttccggacatattaaaacctccaaaaggatgaacgccaactaacgctcctgtacattttttgttaatatataagttaccgcagtgcatagtagctaacgccctttgaattctctcttcgttttcagagaaaaaagctcccgtcaaaccgtagtcagtttcattgtaaatcttaatggcttcttcccagttatttgcttttgtcaacgcaaggaccggtccaaaaatctcttcttgcataattcgtgcttttgaatccacatctttgaatactgtaggctctatatagtagccatttccaggagctttagctcccccggcaataagctttccttcctctttgccaatttcaatgtaggctaatactttttcatacgctttttgatcaataataggccccatagaaggattgtcttcaggcagtccgacggttaattcttttgttaatgcggctaccttttgggcaatctcttcataagcagattctacaacaatcgctcgagagccagcagaacacttttgtccttgaaacccaaacgcagatgctacgatcgcttgcgctgccgcatctaaatttgccgtttcatctaccacaatgccatcttttcctcccatttcagcaatgacgcgtttcagccaaatttgtccagactgtatttttgaagcacgttcataaatgcgacatcctacttctcttgatcccgtaaaagaaataaaacgtgtttgaggatgttcgactaaatactctccaacttctatgccatctccagggataaaattcagaacaccagacggaagaccgacttcctccattaattgaacaaatttcgcagcaataaccggtgcagaatcagctggctttaaaataaccacatttccagatacaattccagctacagtcgttccagccatgatggcaagcggaaaattaaaaggtgaaatgactactcctacgcctaaaggaatatacgtcatctctgttgtttcaccttctaccggcgttaaaggctgatgctcattcgtttcacttaaacgaatcatttctcgggcataaaattccataaagtcaattgcttccgctgtatccgcatcagcttctgcccagtttttccccacttcataaacgagcatggcagaaaattcatgctttctttttctcatcagatctgctgctttgaataaataatcagcacgttcagcaggcgggacgttcttccatgattgaaatgctgctgacgcttcttgcattgcctgctcagcataagctttagtgccacggcttactctgccaatcacttcatctacctttcccgggttcgtagatacaatcacttcttctgttgagattttatcttttccaatcgtgagaggatatgtttgtcccagttcttttttcacttttactaacgccgcttgtatcgcttgtttattctcttctaacgaaaaatcagtaaacggttcatttttaaaaactgagatttttgtacttactgtcatttcaaccagtcccctttaattagaaatttatttcgcgaagtttttcagcacgaaccatacgttggcgggacgctcagctaggcgtctcatgaaatatccaaaccaatcaatgccgtaaggaacataaaccctgactttatatccttcttttactagacggtcctgcagctctacacaaattccataaagcatttggaactcaaattggtcatttgaaataccattttctcttactaatcgttttgtgtactgaatcatttcttcatcatgacttgctacagctgtatagtgcccatttaataaatgcattttaatgatttttttatagttttcatctacgtctttcttttccggaaatgatacttctggtgattctttataagctccttttactagacgtaaattggcttgatattgatgtaagtcattcatatcttgttctgtacgataaagatacgcttgaatcacaattccaacattatcgaattctttgcgtaattctttatacatatcaagggagatttggcagtgcaagtagtcttccatatcaattcgaacaaaaatattattcatcctggccgtgtgtagaattctgcgtatattttccacacaaagctctttgctaatatccaatcctaaagaagtcatctttaatgataaatttgattgaacgcccgattctgcaatggcttctagtgtctgaatgcacatggcagtagacaacttggcttcctcttctgtaaaaacaaattctcctaaatgatcgagtgtaacaacttttccactattgttaagctccttggatgtttgaattgctgattcggttgagtctccagcaacaaaacgagctgcccccatcctcaatccatactttttagctaatttgttcattgaatgatttttgccaaacgactgaaacatcgttctcattaatacttccatcaatcctaaacctccttttattttttaaaatcaaaaataaactaaattttcagattaataattttatttttctatacccttctcacatttctgtacacttatttaaatgaatttatacataagtgtttaaaatattttatgtataaacatatttgtctaattaatttgattatactcgttcattaaatgaaccgaagcaatattgttataagttctaactcatttttttacataaaaaagctctccacgttgtgtagagagcttttgtgtacagtttaataataagcgattaacttatcatcaaagcaacaatctttattttccagctgctagcatgccttttgcatatataaaaccgatggctgctgaaagtaaatctattaaaataataagcggataatctgcgtaccctttatatacagaaacaactatcaacaaaagcgtcagcgctgtggcaacatataagttatatgttactctagcaaacaggacaagcaatatggcgggtagaaaaactgcggcaatcgttttgacttccacaaacatttctcctttttatccgtcttttaaccagcttgtgaatcacgttttgtataattgtgtacaaacaaaatacctagttcatgatgttcgttgtcatacaatgctcgctgagtaaagcgaacttctccattttcgtcaataacttctagcttacaaaaagcacggttattaacttgtaatgcttcataaaatttatggacttcagatacagcgattccatttaccttaataatcacttctcctactttcaaacccattttctctgccggagaatgagggatgattcctaatacaaccaaaccttgtgtacgcttagtaaacagcgcgggcgctttttcatcgcttcgacgctgctgcaaacgaatccactctcttcctatgatcgctagaataacaacagctacagcggcaagaggataaaaaatagcagcaatcgtaataatcgttaatcccacgcctaatgctaatacacgcttaccggtaaattcaatagatttaaacggcaccatactttgaattcgctgataaaaaccgatagcaaaaggaacaaaaaacaggctaaatgatgttccgtcaatagataacacaggccaccatggaaacacagacgtaatggcgttgcctggaattaagacaaaaagcgggacaacccataatttttgagagtaatgagccccaatttcctgccctcttttacttttcacaatggctggagacgtaccttttgctccaaatttccaaattaaatatccttctgctaatacaagcagagacattaaaatagtcagagaaggtaaatctgcgttatgagcttgcacagaccacgtttgaataaatccttcaccgaaaccagatgccggaataaccaaggttgcaagcacagccagtcctacggtgtaagaaggagaaagccatttaaacgtccaagggccgcttatgataaaagttaaaacagctacaagtacaatcattcctatagatacatagacacctagcaacacggtaacaacggataaaatcaacccaataatgatacctggaaaaaataaatattttgcttctaaaataaaatcaaacacgcgaacatgaaaattctgacgctctctcttgacgcgagaaagacctacaaaaaacgagacgagcagaaataaataagttaacggatgtaaaaacaaacgcccgataccttttaagagctctaatgcaaaatccattttttcaccacctgtatttttcacatttttattacaacatttacgattgattgttatgtatcataggcttctttattttatcaaaatgcatcactaaccgacaatgttgtttttactaaaaaagttccgcgctttggaaaagcacggaactttttctacttcttattgactagctagctttaaagccgtttgaagctgacgatcttcatcttttgatttaattttttctagaagttttgtttgtaaaagcgctgctgtatcttcaccgatttcacctgtagctttttgcttattggctttttggaatgcagttacagctgtttctgtctctttactaaaatatccgtctgtacgtccaggttcaaagccaaggccttttagcatcacttgagcattcttcacttggtcacctgtcatatcacgtgttaatggctttttatcaacttgaattggatttgcataataataatccggctgcttgacttctactgttggttttatacctttttcgttaatccagtttccatcaggcgttagccatttataaaacgttaattttaaattactgccgtcttccattggaacagcttgttgaaccgttccttttccataggatttttcaccgactagcttgtatcctcctgcttcttttaatgccccggcaagaatttcagaagcggatgcacttcctccatcaatcaaggccacaattggataatcctttttctttttcattgaagaaaccactttttgacgttcaccgttacgatcttcaatttggatatatggctttttattcgttactaatttatcaagcattttttcaacgctcgttaaatagccaccaggatttccccgaacgtctagaactaagccatcaatatttttattttcaagttttttcaactgtttcgtaaattcgtctcccgttgattcagagaatgacgtaatttccatgtagccaatttttttattatttacatttttaacagaagaatagacggtttcaattggaatctcatctcttacaacttttactttcatcgtttctttcacgcctggtcgttgaacatctaatgtcacggtagagccttttttaccgcgaatttttaatactgcttcattcaattccagacccgcgatacttttaccatcgatctttaaaatctgatcatttggttttaatcctgctttttccgcaggagattgtttaaacggagctacgattgttacttttccatctaccatgcttacttcagcgccaattccctcaaacgatgaatcaagagactgcgtgaattgctgtgccgttttcttatccatgtaagatgagtgagggtctcctaaggtttgtaccattccttggattgcgccatctaataattttttgtcatctacatctttgtaatattttgaagatatcagttcataagcttgcttgattttgtctagctcttccttttccactttactatcatttgaagaagttgtaaggggggtactgaccgttccagcatttgcatactgaatgccaaaatatgtacctgctgctccaacaactaaggagagtgccattaatagtgcaacgattttccgattcaagttctttcatcctcctcaaccttaagccatctcttcttattataatagatacaaccaaaactatgtaataaaaaggatgcatgtgttatttgtagcaaaaggcaccacacaaatcaagtgcgatgcctttttgttaaactatatgttgagcttgtaccacgtatgctaggaacttaaaatttaatataactttcagggtttacagcggaacttttgcctttccaatcgcctttatgcaattcaaaatgcaggtgagcaccaaacgaacgtcctgtgttccctatataacctaattgttgacctttattgatagattgaccgcttgagacgctgtagctctctaaatgagcataaactgtaacccacgtctgaccttctacattgtgacgaataaatacggcattaccaaaagaagaagaatgatatgctctaattacctttccgcttgctgcggctacaactggcacactttctcctcgctttccaatatcaataccgtagtgtcctcttccaaacgtttctcgatacccaaaatgagatgttaccgggccctttgccggcctcgtaaacgacccgcttgtaacagggggtgcctcctctgttgccccggctttttcaatttcttgctgttgagcttgtactgcatttttttgatcagctaaaatagaagcttgctcttctaatccaacggcttcttcattaaattctttttcctgatctttgagcgtttgcatgagctgattcttttcatccacttgtttttgcagctgcgcacgaagatttttaagttcttcaagtgcttgatttacttccgttagcttgttttgaacttttgtttctttctcttcttttgcctttttatcggcttcatgctgcattaacaaatcacggtcagcccctacaattgtcgaaaccgcactcactctgctaataaagtctccgaagctttcagagcctagcagtacatctatgtaatccacagacccgccattttcttgtaaagcacgagcacgtttttttaatagctcatttcgtttttcaattcgtttttttacaacgtcaatctcgcttttcagcttttcgatgtcttgctttgctttttctacttcagattcacgactgcggatatctgcattcgtttgtccgacttctgaatccaagcgcgcaatctcagcgtcttcgtttttttgcttttcttgaacctcttttaatttctctttattttgattaatattttggttcacatcatcactttttttctctaaatcaccgagtttagtagtgctggcactttccgcataagcaattttttcattacctatccaagccgcacttaatccagctaaaactgctgctgtcattactaatgtcttacgtgtcatttgtttctccccatctgcacatatttccccgtataaacgggcattagcaagacccccattagcacttttttctatttttatgtgtaattacacaacaacctcacatttgataaacatcaaatgtgaggttgttgtaatctattatgttaaaaatctattcttattttcgcaagaacttacggatggataatgtacttccccacatcccaattagaccgccgatcactagtaataatagcgacacttgaagcacgaatggaaaggcaggtaaaagttcaaagaatccatcaaacttaggttgaacttcattatataaaacgctgtacacaccgataataactgcaattggcacaatagaaccaagcactcctaaaaacagaccttcaataaagaacggccagcgaataaaggagtttgtggctccaactaagcgcataatttcaatctcttcacggcgagctacaatcgtaattttaattgtatttgaaattaggaacattgctgtaaatagaagccctaaaatcagcactactccgatattacgagctactttcagcactttaaataacttttcaacttgatcttgtccgtattgaacttttgctgcatacggatatttctcaatttgtttagctacttttgcgacatcagtcggctcttttgttttaacaacaaatacatcatttaatgggttttgctgttcaaacggttcaaaagcttgtccttcatcacccatactattaattaaatcttttaactctttatctttagaagaaaacgtcaccgtatcaacttgcttaattgcatctagcttttctttcattgcttttcgatcatctgctgtcgctgcagcatcaacgtgaacacgaatttccacatcattttcaatcaatttagcaatgtggtttaaattcatcatcaacataaaaaatacgcctacaagcaagagcgtcacggtaacagcacttgcagatgcgaatgtcatccagccgtttcttcctaaacttttagatccttcacgtaagtggcgaccgaatgtcctagccttcatatccgtattcacctcttacttcatcgcgcacaatatttccattttcaatcgcaattacgcgctttcgaattgtatttacaatttcacggttatgcgttgccattaaaatagtcgtaccgcgtttattaatctcctcaaagatatccatgatttcccacgaagtctccggatcaagattccctgtcggttcgtcggcgatgacaaccttaggattattcacaattgaacgcgcaatagacacacgctgctgctctcctccagatagttcatcagggaaagaatccattttaccctttaacttaacaagctctagcacctctagcactcgctttttaatttcttcgggactttgctcaattacttctagtgcaaaagcaatgttttcatagaccgttaattttggaagcagcttgaaatcttgaaagactacaccaatatgacgtctaaagataggaactttgctatcttttatttttgctacatttgcaccgtttacaatgatatttcctgaagaaggcttttcttcacgatacatcattttaataaaagtggattttcctgctccacttggtcctacgatataagcaaactcaccttgattaatcttgatgctaatgccattgattgcttttacaccgttcggatacgttttatatacattttgcatttcaatcataagtaatcacctaatcaagtgtgttattttaatactatgtaaaacttgtcaaaatacgacaaaactctacaattcaaaccaaaaattcgactcttctcacgcgctttctcattataacatcactcttcgtgaaaataagcctcaaaaatattacatttttatttcaaatatgacataagtaggatatttttagcaagttatgagaatttatccttatttttaattctgttgttttttgctgtgcatttttttacgaatatcgttagaaaaagcacattcatgtctactttttttacaaacaaggtatgataaataagaaaaacgctgaggagagataacatgatcaccatttatggaagttcacgagaaaacggaaatacggaggaattagctaaagcagtcttaaaagatattaataccgaagaagtttacttgcgccggcataccattaaccccattactgatatgcgtcacgatgaacttggatttaccaatcaacaagatgattattataatatagcgaaaaaaatggcagcacacgatactattctatttgttacacctctctattggtacggtatgagcggattgatgaagaactttgtggatcgttggtctgaaagcctccgagattcaaccattaattttaaagaacaaatgaaaaacaagcgcgtttatgtattagtagtaggaggcacaggcgcatctgtaaaggcccttcctcttattatgcaatttcaatacattgtcgattttattggttcttcctttagcgggtacattattggagaagcaaatgcacctggagacatagcgaaagatgtcaaagctcaacagcaggcccttgtcttaaaccaagaattaaagcagctttaacacaaaaataagacggatacccgtcttattttttctttgccagccaagcagcaactttttttgcatcttcttcattgattagtccctttggcataccgccttgaccattattgataatgttttcaatttcagcttctgagtgcttgctgcctacatgctgcaagctcggcccatttgctcctcctaaatctacaccgtgacagcctgtacagtttttcttcacaatgtcttctgcactcgctgaagattcaccagcagattcatttttagagcttcctccgccgcatgcagacaaaacaagcgctagaccgattgttaacgtcagtaatacttttttcaagccttctcccccttgctgtagagttttcactctattataacctactccagaatgtttaaaacactctgtttacaaggactttgtttcaattccatgaattttctcatcacacttatgtatacgattaagcaattgattcgtttcctaaacgttttttgtatactacgcgcgaaattgtcacactgagctcatataaaagaagcagcgggacaataactaaaatatccgaaataaaatcaggaggagtaataagtacggatatcacaattaaagcaaaatatgatagcttccttgctctagctaaccttaatggatttagcacccctaagcgcgttaagaatagaacaactaaaggcatttcaaataaaaaaccaaacggtaaacaaagattaagcataaaacgaaaataatgctcagccgtaaacatcagtgaaaactgatcattcgaaaggcccgttaaaaatgctaaaaccattggaaataaaacaaaataaccgaaccccagcccgcttacaaacaaaagaaaaaagaatggaatgaaggtaatcagaaccttatattcttccttttttaacccaggtgaaacaaaccgaaatacttgataagcagctactggaagtgtaaaagcaagcgcaaaaacaaatgcaatcaccatataaatccatacgatttcacttggtccaagtaccgcaagcttgccgtccaaatctttcactagccactgataaatatcttgtacaaatacaaaactgacaacaagtaaaactacaaatgcacaaagtgttttaataatacgaacacgcaattcttcaaggtgctccatcaagctcatttctcccattgcatttctctcctttctgacaagtagaaatagacgagtttcctcgtctatttccttacttacaatgtggattcattctctttttgttcagaaacggttgcagtctgcttttctttaacactttcatcatctgatacgagcccttttgctgctcctttaaattcagttaatgttcgtccaaacgctcttccaacttccggcagcttagacggtccaaaaattattaaggcaatgactaaaataataaccaaaccagggattccaatattagaaaacatacttgacctcctttttcttactcagtttactgctggactttttctttctttttcaactcttgtttttcatgtgctttcccgtgtgcccgcatacgatcttcctctacttccttagaaatctttagtccacgcggtacgttatttacttcaacttccgtcataccttttccatcttttttatattgaaaggaagctcgagttgaaatttctgcaccaggctctgctacaaaaggcacaacgcgataatcagcttgccatatatcaggagttaccgtacaccttacatatcctctgtaatcattaaaaaatgtgaggtgtggattttgacttaaaattttatccgtatcagctcgtttatctgctccgttccctccggaagtgatggaggtgccgacgaactctgcaccaataattcttgaattaaggttagcaaaatccgcgtataagttagaagcccagttagcgtgtacatccccagttagtacaatgacattgtccaactttttcttttcaataaaatcaatgacgcgctgacgattcgccgtatacccatcccatgcatccatgctgtatgtaggcttagcagccgttccaaattttcttggcgcaaagaaaatttgttgagccagtacgttccaatgacacgctgacttttcaaaattagtaaacagccatttttcttgttcattccccaatagcgtacgtttgggatcaagagattctggcgtttgcggctttgttccgtctccgtttgcttgatcgtctctgtattgacgcgtatccaacacttgaaaagaagctagttttccatatgaaaagtcacgatataatctcatatccgctccgtggggcaaggatgtttgacgcaaaggcatgtgttcgtaataagcttgataagctgccgcgcggcgttggataaatgcttctactgattggcctttttcaggaattacatttgcataattgttttctacttcatgatcatcccacgtcacaatccacggaaaaacagcgtgagcagacttcaaattggcatctgacctgtactgagcatgcctgtttcgatagtcttgcagcgtttgaatttctgcgctgctgtgagtacgaacgtttccgcttgcagccacgtactcgtttggtccatattcatagatgtaatcacccaaatgaacgacaaaatctaattgttctttaaccatatgctcataggctgtaaagtacccatgttcatattgctgacacgaagcgaatgcaaacgtcatactggctacttctgcatttgctgaaggaagtgtttttgtttttccaaccgggcttaactcatggccgcttttaaatcgataataataaatatgactcggcttcaatccttttacatcaacgtgaaccgaatgagcaagttcaggtctagccacttctgttcctcgtttgacaattcgatgaaagtcttcatcttcactaagctcccattttactggaataggttgattaggcattccccctccattcaacgggtctggtgctaatcttgtccaaagaacaatgctatctgctaaagggtctcctgatgcgacgcctagagtgaacggataacttgaaaatttaggcgctgcagctgaaacttctactgcatttaaaccaatagactgagcaattgttaagccaagtgatactcccgctacttttccagctccttgtaaaaaacgccgtctatcaaaccctttactcgaagaaaagctattctgtttcacttgctctattaattcgtttaatgatttattttccactgtacatgccccttcctcatgatttaattaaaattataaatactgtttgtaaaaggaatataaaggattgtaaagaagcacttaccgcaaaataggtatttttaaccattttatttcattgacaaaataagcgaactgacgacagcaacctttaaatttctgcattttcttaattttctttttaacaatggttctttacgctcgtttttcttcatccaaattttacaaagtccaacaactaaaaaaggcagcatacgtaagtatgctgccttttgattaaatatgagaacgtaaatacgcatcgataaacggatctagatctccatccattacgctttgcgtgtttccgacttccgtatttgtgcggtgatcttttactaatgaatacggatggaatacgtacgaacgaatttgacttccccacccaatatctttttgttctccgcgaatttcagctagctgttcttgctgcttttcaatttctaattgatacagcttagattttaacattttcattgcttgctcacggtttttaatttgtgaacgttccgtctgacaagatacgactacattagttgggaggtgagtaatacgaacagctgaatctgttgtattgatatgctgacctccggcaccgcttgcacgatacgtatcaaccttcaaatcttccgtacgaatatcaattgaaatttcatcattaaattccggcattatgtcgcacgatacgaatgatgtatgacgacggcctgatgaatcaaacggagaaatacgaacgagacgatgaacgcctttttcagcttttaaatacccatacgcattatgacctttaattaaaagcgttacacttttaataccagcttcatctccaggcaagtaatcaagcgtttctactttgaaaccttttttctccgcccagcgcgtatacatacgtagtaacattgaaccccaatcctgtgattctgttccaccagcacctgggtgcagttctaaaatggcattatttttatcatacggctcgcttaaaagcagctgtaattcaaagtcattcatgcctgatataagctcttttaattcactaactagttcttctgctaaatcttcatcgtattcttcttttacaagttcataagacacttgtaaattttcatatgtttcatccaagtggttaaattgatttactgcatctttcaaaccattggcttcattaataacagtctgagctgcctgctggtcattccaaaaatttggatcagccatagtctcatctaattcatcgatacgagcttgttttgtatcgaggtcaaagagaccccctaaagtccgctaatcgcttagctgttttgtcaagttcttgcttaatttctactaaatccatgagttgaacacctctattttatttttgacgcacaggaaggaaatgagaagactcatttccttcctgtactaattcattctatactaattgactcttactttatgattctttaccgcagcagtttttatactttttgccacttccgcagatacaaggatcatttcggccaacttctatcgcatttacttttggcttcttcttagccggcgcgtctccttcttttggatgaacagccgcctgaccttgcgctacctcttgacgctcaaggttgttgttaatttctgctttcatgatatacttcgtcacttcttcttcaatggttgcaatcatattttcaaacatcgcaaaaccttccatttggtattcgcgaagaggatctgtttggccgtacgcacgaaggtggataccttggcgaagctgatccatcgtatcaatatgatccatccatttagaatcaactgctctaagaacaacaactttttcaaattcacgcatttgttcttcagggagctgctcttctttttcattataacgagcttttgcatgatctaccagcagttctaccatttcttcaggctctttacggcgaagatcttcttctgtgacttcaccttcctcaagaacattagcatttacgtaatcaataatcgcttgtaaattccattcttcttctaattcttcacgcggtgtgtttacttcaaccacacgctgtagcgttgattcaatcatacgttctacaatcgcacgcaggttgtctgaatcaagcacttcaaagcgctgtttgtaaataacttcacgctgttgacgaagcacgtcatcatattgaagcaattgtttacgcgcatcgaagttattaccttcaacgcgtttttgagcggattcaacagctcttgttacaattttactttgaattggctgtgagtcatccataccaaggcgatccatcattgccatcatattatctgaaccaaatcggcgcattaattcatcttccatggatagatagaattgagatacccctggatccccttgacgcccagcacgtccgcgaagctgattatcaatacggcgtgattcatgacgctctgtaccaattacagcaaggccgccagcttcaacgacaccttcacctagtttgatatccgtaccacgaccggccatatttgttgcgattgttaccgcacctttgtaacctgcattttcaataatatccgcttcacgctcatgctgttttgcatttaacacgtgatggcgaatgccttttttctttaataaagctgataaaacttcagatgtttcgatcgcaactgtaccaacaagaacaggctgtccttttgcgtggcgctcggcaatatcttctactaccgcattaaacttgccttccatcgatttataaattaaatccgctttatcatcacgtgaaattggcttgtttgtcggaataacaacaacgtgcatattgtagatattacggaattcttcttcttccgttttagctgtacccgtcatacctgataatttttcatacatacggaagtagttttggaatgtaattgtagctaacgtcatgctttcattttgaatctcaacgttctctttagcttcgatagcttgatgcaagccgtcactaaaacgtcttcctttcattaaacgaccagtaaattggtcaacgattacgacctgatcttcatcaattacgtaatccacatcattttgcatcgttacatgtgctttaagcgcttggttgatgtgatggtttagcgctacgtgtgaaatatcaaataagttttcaatgccaaatgcgcgctctgcttttgacataccttcttcggttagctgaacgctttttgttttgatatcaaaagtaaaatcggtttctttatcaagcgtgcgaacgaatgcattagcttgaatataaagagcagtcgatttctgtgcgctgccggatataataagcggcgtacgtgcttcatcaattaagatagagtcaacttcatcgattacagcaaaatgaagcggacgttgaaccatttgttctttgtacagcaccatgttatcacgtaaatagtcaaatccgagttcattatttgtactatacgtaatatcggctgcatatgcttcttgcttttcttcacgcgttaaatggtttaagtttaatcctactttcaagcctaagaattcgtataaacgacccatttcactagcatcacggctcgctaagtattcattgactgttactacatgtacaccttttcctgtaatggcgtttaagtatacaggcatagtagctgtcaacgttttaccttcacccgttttcatttccgagatattcccttcatgcagagaaataccccccattagctgaactttgtacggatacatgcctaacacacgtttcgctgcttcacgtacaaccgcaaaagcttcatctaataagttatcgagcgattcgccattttggtagcgttgttgaaattcagctgttttttcacgaagctgatcgtctgttaaagacgctatttcaggacctaacgcatcaatttggtccgccattttttctaaacggccgatttggcgttgattgccgtcaaacacttttttaaataatccaagcatattaaaacgctcctctatttataatcagtacattttatactattttcattcatatctgtatctttcattataaaacattctgagtaaaattgtaacattgcagctaaacaagtagcaacttgtaccctttttcgtctgtctctttacgagtactactctattaacgagttattttctattgtgatttcccctgcctcactcttacaataaaaaaggggaatgtagaatgaacgttcaatcgattacaaaagaacaagcttgggaagtccgacataccgtcatgtggcctgataaagatttcagttatattcagctgaaagatgatccatcaggcattcactatggactgtttgaagaaggagagttaaaatcagttgtttccttatttataacaggtaatgaagctcaatttcgaaaatttgctactttcaaagaagaacaaggaaaaggatatggcagccgtctactagaggaggtttttctcaaagctaagaaccttggggtacgaaagatctggtgtaacgcacgagaaaataaagtctctttttatcaggcgttcaacatgaaaaaaacggcgcgtgtattcaccaaatcttctacacgctacgtagtgatggaactatttttttaagctgctaaaaagcagcgtgcggaggcacgctgcttttactttactgctcttgtttaagagagcctataatcttagtttggttcaatcaatccatatcgtccatcttttcttcgatatacaacgtttgtaatattggtctcagcgtttgtaaatacaaagaaactatgtcctaacatattcatttgcaaaatagcctcttcactatccattggctttaagttaaatcgttttgtacgaactagctctaattcatcttcttcagttgcaacagctacgttcgcttcgctttctaatgctgcgaacagatacttctcagcgcctttttcacgcatttttcgatttacttttgttttgtgtttacgaatttgacgctctaatttatctaggacaagatcgacagctgcgtataaatcactgtgtgtctcttcagctctcaatacgagatcattcattgggattgtgacttctattttttgatcgttattgtagacttttaagtttacatttacgtcagcagttggtgtttcgtcgaaataacgctctaacttaccaagctttttctctacgtattccctaattgctggagtcacctcaatgttttcaccgcgaatgttatacatcatgttcgaactcctcctttaatccattgctatacctctacaattctacaatacccgacacaatcccttcctaaactattaaaattttttgaaaatttagtgaaaatttatggaacctgagaaaagtttatgaaaaaaccaaaaaaatagaccttcttcataagaagaagggttgtatttttttacgcagaattaattttttttatcgtaaaacatcccatcaaacgttttcatttcgtaagggtttacatagctgttactatgctttttttttgcttttagtaaacggagatctatcataatttgatgccgaattaagatgagcttttgatcaatttccttattcatttcgacaattttcttacctattgattcattatccctattttttggcggcagtttctctatgagctcacccctttttaatagaagatactctaacttttgaatgccttcttctcgatttttgtcagaaaatgtttgaataagccgataaatctcatcagttagctgatataggtcgttaatcatatttatgcttgaccgccgcttccatggacttgctggcggtgaagctgcacaacttgcttccatgtatcgcggaattctgttacatattgttcggcttcatccaagcttgctgtgtcattttttgtatttgcttcaattaaacactggttaatatagtcatacatagccatcatagacttagcaacttgcacgtttgtatcaagggtaatcactaattcttgaataatattttgtgcttttaacagattcgtatttttcagctcaatatttttttcctgtatgcctgttcgtgcaagtttgataaattttaaacacccgttatacagcataagcgttaactctcctggagaagcagtctgaacagctccttgctgatacgcttgatatggattatttgctgccataaacgttcactccttcttaactaaaatattgcgataactgcgcgctttgagcatttgcattttgaatggctttttccatagctgtaaactgacgataataccggtcctctacttgtgtgagcctgctttcaaaactagtgatttggctatttacgctttttaaattccgcccaagcaaaaattgttcacttgtccatgttgaacggccagcgcgctgctcaactttggatacggtttgagtaatcgtatctcgtaaacgtcgtacaatccctttttcacttgttgtactcccacttttcataaataaatccatcacagactgcggatctttttcaattgcttcttttaatttagttccgtcgccttctatgactagcttgcctcgatcgctatagtttgcgctagttgaaataccaatgtcggttagctgcgaaaatgctccgctcactcctgatacagaggcataccagttagaacgcatttggtttagcccgctcgataaaattgagtctccttttaacaaaccgcttttcgccttatcatcccactgctcagcttgtttatccgttagtttttctctttcttcatcagtcaaaggctgatagttccggtctctttcttccgtaatctttccgttaatcttttcaatcagttcattgtatttggtcacaaaatctttaattgtatcaaatactttctgcgtatcattgcttacattaacgcggatgtctcctgtgaaattgttttgaagggtataggtaacgcctcccgttgtaaatgtattggacttacgagttgtttctagaccgtttagcgtaaattttgcgtctgttccgccggtttctttttgagtatctaattttaagaaatttgttaaaaacgctcctgaaaacaccatcttttgaccgcctgcaccaccggcttttgacaaatctcctgtgtctttgcgagtaaagacaactttatctgttccttcatcgtaaaaggctgaaatacctacttttgaattactaagttgggtcaaaacagtatttaatgacgctgaaccatcaaattcaaacgacatactgccgtctgcattatctcctgttgcttttccactgctgtcatacgttgtaatagaaaactggaggacattttgcttatacgtaaaaccttgaacagtgctaccgtttgctaacgtggaaccgaatgtcatttcgcccgtattcatattaacgaatacatcattctctcctattaaagtaggatcgcctgtagtttttatattaaattcttgagaagattctccatttttcacttgaatagcagaaggcagacttcccccaaaaatagctcctttggataacttggcagtctttgtatcagcacttattgtaatatcaggttgcttgacctcttttccattccacgcactgccaagcaaggttttttgctcccataaacttttagcagggtcaatagtgccttctgaagagaattctgaaattttcccactactgatattttgcgcagcagtcgccattgtcacgtttgaaagtgtataagacgcgttacctgctgaggaagtagctgccgcttttactttcatttcatccgatgaagataccgttttagacgaataagaagactgcaaggtcatattaaaagcgagattattaaattctgataacagcaagttcatagagcgataatcatctcgctgccactctaacgtttgtttttgttttttcattttatcaataggcatgcgttgagccttcattaaatcactgacaatttgatcaatatccattccgcttgctaacccatttactcttaccacttaccatcaccaccgtttttttattcatctattcatcaactgttagccataaaatatgagtatatttttttgaatcaccctattcgtttataggttcaacacttctctattttgtatcggtaaaacagttatttttttcataggtcaaatggtgcaagatagaaaaagctcacttatttttctacaataagtgagctttttattattggccaaacaagttcagtttctgggataaatttctttgaatatccttaggaataagatatggtgctagatttataatatctcgtaacgaatcaatggttacagaggcagataaatttatatattcatccgttgtatctgcttgctcaaacgaaatggaatctggcaaattattgagcagagtaatttcattcatttctttatcgaccgtgacatcagcagccttatcaatatttaagcgatcccatacaagagacatcggaatcggcattcttcctaaatgcacgctattcacctttaaaacaagctttccattttcggcatttggtgttacgtcaactacaaactgtgattccataaaagatactacatgtttattaatataaaattttatatgttccggaagcaactcggcttctgctccgtcaaccgtttcatcattttcgtaaaggtagctgcgcaaataatcattaacatcgctctcgcttaatcggtatcctaaaataggagagcctccgttcagttctagcgacgtcgcatgagcggacttttcttgtgccagtgaagataatgaagcagtctgatcaagttcttcaatatttctgactggactaacgaaaaaatacaacccaactaaaaggataataaatagaaaaataacagctataaattttctcaaacacacgcaccctctcaaatattcttcttggaatataataccgatttctcttttatcatacaagatatataagatagttgtcgaaaacttgtataaaatgtacgtatataccggacatccctaatggcgaataagtctatggtgaataaaatgagtcttttttgacttgaaatgcgtcaattttagtaacttaaagtcgatttttataggaatttgataattggcacacttcttgcttattataaaggtaaggggaggaatttctatttatattttcagaatttactttattttctaatagtatttcgataattttaaaggagtgaatacgatgggaaacaaaacagaatcacacggaaagttaaagcaacgtcacgtttccatgatttccattgcaggtattatcggagccggcttgtttgtaggaagcggatccgttattaacgcaacaggcccagcagcagtagtttcatatgcagcagccggactgctagtcgttctattgatgcgtatgctcggtgaaatggctatggtaaacccagataaaggctcattcgcaacatatgctcagcaaggaattggcgcgtgggcaggttatgctattggatggctttactggtttttctggctaattgtaattgcgattgaagccactgcaggaggagcaattgttcatgaatggctcccttccgtaccaatttggcttttaagcttaatcttaacctttgcattaactttaacaaacttgttctctgtcaaatcatttggagaatttgaatattggtttgctatgattaaaattgtggcaatcgttgcttttatgggaatcggtttagctattattttcggattgatcccaggtacatcctcacctggtctagctaatttaacgggccacggaggctttatgccaaaaggtacgaactctatctttttaggagttattaccgttattttctcttattttggagctgaaattgcggctattgcagctagtgaatcagaaaatccagcaaaagctatcacaactgctattcgcagtgtcgtatggcgaattttaattttctatattggttcagttgctattttagtaactcttttaccttggaactcagctgatttactaaaaagtccatatgtaacaatgttagaaatggtcaatattccagcagctgcacaaattatgaatttagtcgtattagtatccgttttgtcttgcttgaactctgctttgtatacgaactcacgaatgattttatcattggctcaaaaaggacaagctcctcgcgctttagcaaaagtaagcaaatcaggcgtgccggcaagagctgtatggattagcacagctgccgcatatgtatgtgctatctttagcttcgtttcgccggataaactctttttattcttagttaatgcatcaggagccattgctcttattgtgtacttagctatcgctatttctcatttacgcctgcgtaagaaaatgaatcgagccaaccagccaattaaagggatgaaaatgtggttattcccgtatttaacatacgtaacaattgctgttattaccgtgatcttcttatcaatggcatttattgattcgatgcgctcacagtttttcttaactcttggattaaccgctgtggttcttctgtcatactcgttcatcaaaaaaacaaacaacaagcgacctgacgatcaattttccgagtcagaaaatattgcaaaataaaaaagccgcatctgcggcttttttattttgcttttgattatttctcaaccgatatgtcacgatgaagatttcgaagcggctgaggagggcaaatatgtcgcgtcgtgtaagaaacgataaaaatagttaacaacccgcctaccatcgcaaatgtacgaaacggaaacatgaccactccgtcttcaatcatcggatacggaagcagcgcttttaaatgaagcagcggttctcctccacctattcgaagaacaagagacacaataaacccagccaaagatccgtaccagttagctcctttaaagaataaagcacaaaccaactgcggaaaaagtatacaatacactaggtcccctgataaataccataaagagtagacactctcagagtttaaagcaattagagttgctcccgttccaatgataatgatagaacgtttaataactttatctaactgtgcctgtgtcgcatttggttttacaatcggacgatacacgttccaggctgccatccccgaagctgaaagcaacgaagccgctactgcagccatgacggcagcagctagtcctccaagcgcaatcgctcctactaaatcaggcgttaggtatttaaatacatacgttaaaatcatggacgcgctctcagggcttgacgctccaaatgaagaccagtctgcactgtaacctatcattcctattaaagttggaggcaaggccgctaacgcgcaaaagatgccggctgtaatagatagccacattgctgctttttcatttttagcagataacacgcgctgaaaatagatttgccatggaataccaccaaaaataagtaaaaatgtgctatcccaccattgccaatatgtatttccccatttcggatcttcccagccttttaatggaggaaataaatgaagagaaccagtcatgccttctgaatacgtagaaaaaacggctcccacccctcccgtattcgaaaatgcaaagggaagcaccagaaatagtcctaaaaacataatagaaagctgtaagatatcggtatgcgctactgcccacaggccgccaatcacggtgtatgcaatggcaataagtgcggaaagaatgatggaaattgaaaaactgaggcctaaaatcacaccgaatgttgttcctaaagcagttaagatagctgcgctccaaaacagctctcccagtatagctggaaaataaagaaccgtagccattttcttaccgaaacgagattctagaggatcgagcattgtcataaactcaaaccttctcatctttctagcaaaaaagataccgcctaaaatcaagctgattgaataacaccatggcgcttgagtccatgtcagccctgaggaataaacggtttccgccgttccagcaatataccctccacctacccaagtggcggtcattgtgaacattgaaatccatagcggcatagatcttcctgcaacaagcatatcatctgattttccttttttacttgcagcggctcgagcaccaataaaataaataacaccatacataatgaacattaaaatgaggcctggccaatagagatctggattatagagagaatagataaatgcgacaaccataaagatggaaaatcctataatagttgtccataagggggttagtagacggttgttcctgtttgatttccctgaaaagtcagaagtctcattcgacttttcaggcctggcttgttgtgtgtctgaacgaaatggctttttagcattttgcatcgtctcacatcctttaaattgataaagaaatctaaagacaaacttgtcctctattcctttttcctaccagcatacaattaaacctaaaaatagattttttaga

SEQ ID NO: 9 - DNA, 154658 bp, Priestia aryabhattai
  source 1..154658: mol_type = genomic DNA
attccattgtacgatgcagacacacactctgcaaattttacaacagaaagccctaaaaaaatcgattatgccatcgtttttttacgcaataattcattccagcgttttagcagcctttttcgaaaatcttttaacatgatttttcagctcctttgtttttttgcgatacctgcctgtctctctctgtacttttattatatgatgaaaagggagaggtttctcgtggttaaatatggaaaaaatgtaaaaaggaccgtccatttatagagaaaccagcgcttgtttgatataattggaaaggcttaacaaagagataaaaaattataaaaaataaggtgataaacatggaacgaaagattattttttttgatattgatggaacgttattggatcatgataaaaaactgcctgcttctacaaaaaaagctgtccagctgttaaaagagcaggggcatgaagtggcaattgcaactggaagggctccttttatgttcaaagatctgcgtgaagagttggatattcaaacatatattagctttaatggtcagtacattgttttaaatggagaagttctttacaaaaacccgttaaataaagaagagcttcaagatttaacagcttttgctgttgagcatgaccaccctgtcgtatacatggatcatgaagatatgaaatcaaacattgagtttcatgactatatcgaatccagcatcagcacgctgaaaattggatttacccaccctcaccacgatcctacttatttcgaagggcgtgaaatttatcaatccctcttattctgtacagcgggagaagaagctccttatgaagaaaaatttaagaaatttgactttattcgctggcatgaattttcaactgatgttctgccaaaaggtggatcaaaagcgagaggaattgagaccatgattgaaaagcttggctttgacaaaaaagatgtatatgcattcggagacggcttaaacgatatcgaaatgctggaatttgtcggaaatggcgtagcgatgggaaatgcggaagaagtcgtgaaagaagttgctaatcttgttacaaaagatgtagcagaagatggtattctccacggattagagctagtaggattattaaagtaagaaaaacgcgagctctagctcgcgttttttagcgttcatatggaaaagcattttcaggttcttgaaatggattttctttattaatgtaatcataaaacataattccgtctaaatgatcaatttcgtgctgaaatacaacagcaggaaggcctttcaaacggattttcacttcttcgccttcaagcgttgtgccttttactgtgatacgtgcatatcgaggaacaaatcctgggatatcttgatcgacagacaagcagccttcaccgcctgtaaggtatgtcttttcaactgagtggctaatgatcttagggttaaataatgcatagctatatagcttgcctttttcatccgtaacgtgtaccccaatcattcgttttgatacattaatttgaggagcggcaagcccgataccagatcgcagtccatatttagcagcaatttcaggatcttggctgttttttacatattctaataagctatgtaaaatctttttgtcttcttcagaagcaggtaacggtacttcttttgctacttctcgcagcgttgggtgtccgtcttgaataatatcgttcattgtaatcaactttcacatctccctaggctattttataggtataaagtgtaccaaatccgtataaaaaagtcattacctcgaccttgaccacataaatgtttctactaaattatatgtatcaagcatatggaaaaacatgcataagaaaaaataaaagcgaccgttagccgcttttattgtataattaccagccgccacagctgcagccgataataactaataaaatgaacagtacgattaataacacaaaacctttattagaaccgccacagccatatccaccataacccaacataatgtaacctcccgtagttatcaatcccaaggtaaaaagtaataaactccctttttttcacgattgggttagtataatatattaaaaggtggaaaaagggtgtagataaattgctaatttcctacaaaaattgtataatgacccatggataagggaggatttaccagatatgaaatgcgtcggaagatatatagttatcggcattgctgctatgtcactagcaggctgtgcagaaggttcatcgcctgagcttgaagtatataatggattagaaaaagtggtagcacaagaaaagcaatttgctgatcagcaaaaaccgttagctgatttagaacagcaagaaaatgcgatatacgaccaaattattgagctagggatcaaagataaaaagaaaataaaaaataaagcacaaaaagcgcagcagctattagatgagcgtgaaagtaaattacaaaaagaagaaaaaagcatcagcgcttcgcaaaaacagtttgaagcgacagagccaaagatacaaaagctagaggatggcaaagcaaaagaagaggcgcttgaactatcttcgttaatgaagaagcgttataaggcctatcagtccttacatgatgcctatcttcattccattgaattagatcgtcagctatatacgctctttgaaaaagacaatgtgaaattagagaatcttgaaacacaaatcgcttcgatcaatgctacttataaagaagttgaaaagaaaaaagaaacgtttaacacattaacagctgactataacaaagccaaagaggatttttataacaaaacgaagttaaaggtgaaaaatagcgaggataaataagaaggcctgtgaagtttacaggtcttttttttggctgaaaaggaaggttttctgaaataaagagagagtttcgacatgattcaagtaaaaattacaaaaggttattgttttaaaaaatcgtttatttgtggcaagataggagatgtgtagacgtaaaaaaagagaaggttattataaaacatataatacagtttgtatctgtgtaatagtacagcatgtcttttttatgtgttttatttcacaaactaaaaaagcgtaatttcttgatgtaaatgcattgacgaactgttttagtgtattgtaaactaggtagcgtagtaagtgttgtattaatcatttttgcaaaataattaatacagtttaacgaaacgctcgtttcgcttaaactttccttttacgtaaatgtttgcacagaattcgctggggaatacatagaaatgttaaggattagcgaattcaaaaagctactcgacaaaatatgacttttacttgtccatttgggacattctaaaagcgtgtatgtttgtttgattagtaaaatgaatttatacggcttaaatgaaaggaagaggtgacttagatggctgctaaaactaaaaaggctattattgatgtatcaaagcaacttgataaaatcgctgagcagtaccaaacgttccaaattcttaatgaagagggcgaagtagtaaataaatcagcgttgccagatttatctgacgaaaaattaaaagagttaatgactcgcatggtatacactcgtattcttgatcaacgttcaatttcattgaaccgtcaaggtcgtttaggtttctatgcaccaactgctgggcaagaagcttctcaaatcgcttcacatttcgcattagaaaaagaagacttcattttacctgggtaccgtgatgtgcctcagttaatttggcatggtcttccactatatcaagcgttcttattctctcgtggtcatttccacggtaaccaagcgccagaaggtgtagatgtactttctccacaaatcatcatcggtgcacaaatcgtgcaaactgctggtgtggcactaggtcttaaaaagcgcggtaaaaaagcagtagcaatcacttatacaggtgacggcggagcttcacaaggtgacttctacgaaggtatgaacttcgcaggtgcattcaaagctccagcaatctttgttgtacaaaacaaccgctttgcaatttcaacaccagttgaaaagcaatctgcagcacgtacaatcgctcaaaaagcagcggctgttggtatcccaggcgttcaagtagacggtatggatgcactagcagtatacgttgcagtaagcgaagctcgtgagcgtgcagtaaacggtgaaggtccaactttaattgaaacattaacttaccgttatggtccacatacaatggctggtgacgatccaactcgttatcgtacagctgagcttgacactgagtgggaaaagaaagatccacttgttcgcttccgtaaattcttagaagctaaaggcatctggaatgaagaagaagaaaacaaagtaatcgagaaagctaaagaagatatcaaacaagctattaagaaggctgacgattatccaaaacaaaaagttacagatttaatggaaatcatgtacgaaactatgccttcaaacttacaagagcaatatgaaatctacaaagagaaggagtcgaagtaagccatggcgcaaatgacaatgattcaagcgattactgatgcgttacgcacagaaatgaaaaacgacgaaaacgtattagtttttggtgaagacgttggcgtaaacggtggagtattccgtgcgactgaaggtcttcaacaagaattcggcgaagatcgcgtattcgatacgccattagctgaatctggtatcggtggtcttgctgtgggtctatcgactcaaggtttccgtccggttcctgaaattcaattctttggtttcgtatacgaagtacttgattctgtatcaggtcaagctgcacgtatgcgctaccgttctggcggtcgctggaatgcaccaatcacattccgttcaccatttggtggaggcgttcatacaccagaacttcacgctgatagcttagaaggtatcgtagcatctcaacctggtttaaaagttgtaattccttcaactccatacgatgcaaaaggtcttttaatttcatcaattcgtgataacgatccggttgtatacttagagcacatgaagctttaccgttcattccgtcaagaagtacctgaagaatcatacacaattgatttaggtacagctgatgtgaaacgtgaaggtacagacgtaacgcttatcgcttacggtgcaatggtacactcatcattaaaagcagctgaagaactagaaaaagaaggtatctctgctgaagtagtggatttacgtacagttcaacctttagatatcgatacaattcttgcatcagttgaaaaaactggtcgcgtagtagtagttcaagaagctcaaaaacaagctggtatcgcagctaacgttgtagctgaaattaacgatcgtgcaatcttaagcttagaagcaccagtattacgtgtaacagcaccggatactgtgttcccattctctcaagctgagggcgtatggttaccagaccacaaagatatcgttgaaacagctaagaaagtacttgaattttaattagcattttactgtgatagaaatcagctttgtgctgatttctgtcttagataaaataaacactaacaaattgaacgcaactaactaggagggtgaagacacgtggcatttgaatttaaactgccggatatcggtgaaggtatccacgaaggtgaaattgtaaaatggttcgtaaaagctggagatgaaattgatgaggatgatgtactagcagaagtacaaaatgacaaagctgttgttgaaatcccatctcctgtaaaaggtaaagtattagaagtaaaagttgacgaaggtacagtagctactgtaggacaagttatcgttacttttgatgctcctggatacgaagacttaaaattcaaaggtgacgatcatgatgatgcaccagcagaagaagctaaagaagaagcttcaactgaagaagtgactgaagaagcaacagctcctgcagcacaagctgatgttgatcctaaccgtaaagtaattgctatgccttcagtgcgcaaatatgctcgtgaaaaaggtgtagacattaaagctgttcctggttcaggtaaaaacggacgtattgttaaagatgacatcgatagcttcttatctggtggttctacagctacagcaactgctgaagctccagctaaagaggaaactacttcagctgaaccaaaagcagcagcagcacaagctattcctgaaggcgacctaccagaaactcgcgagaaaatgagcggtatccgtcgtgcaatcgcaaaagctatggttaactctaaacacactgctccacacgtaacattaatggatgaaatcgatgtaacagctcttgttgctcatcgtaaaaaattcaaaacagttgcagcagatcaaggtattaaattaacattcttaccttacgtggtaaaagcgttaacttcagcacttaagaagttcccagctcttaacacttcaatcgatgactctacagatgaagtaattcaaaaacattactacaacatcggtatcgctgctgacactgaaaaaggtcttttagtaccagttgtgaaaaatgctgatcgtaaatctgtgttcgaaatttctgatcaaattaacgaccttgctggaaaagcacgcgatggtaaattagctcctgctgaaatgaaaggcgcttcttgtacaatcacaaatatcggttctgctggtggacaatggtttactcctgttatcaaccacccagaagttgcaattctaggtatcggacgtatcgctgaaaaaccagttgtacgcgacggtgaaattgtaattgctccagtattagcattatcactaagctttgaccaccgtattatcgatggcgcaacagctcaaaacgctcttaaccaaatcaagcgtttattaaatgatccagaattattattaatggaggcgtaataaatggtagtaggagatttcccaatcgaaactgatactcttgtcattggtgctggccctggtggctacgttgcagcaattcgtgcagctcaattaggtcaaaaagttacaatcgtagaaaaaggtaaccttggaggcgtatgcttaaacgttggttgtattccttcaaaagcattaatcgctgcaggtcaccgttttgaacacgctaaacattctgaagacatggggattatcgctgagaacgtaacagttgatttctctaaagttcaagaattcaaaaacggcgttgtaaacaaacttactggcggtgttgaaggccttcttaaaggtaacaaagttgacatcgtaaaaggtgaagcttacttcgttgacagcgaaactgtacgtgtaatggatgaaaattctgcacaaacgtacaaattcaaaaatgctatccttgcaactggttctcgtccaatcgagatccctggatttaaattctctgagcgcgtaatcaactctacaggtgcattagcgcttaaagaagttcctaaaaaattagttgtaatcggtggaggttacatcggtactgagcttggtactgcttttgcaaacttcggtacagaagttacatttgtagaagctgctgatgaaatcttagctggttttgaaaaacaaatgagttcacttgttaaacgtaaccttaagaaaaaaggaaacgttgaaatctatacaaaagcaatggctaaaggtgttgaagaaactgctgacggcgtacaagttacgtttgaagtaggcggagagtcaaaagtaatcgatgctgactacgtattagttactgtaggtcgtcgtcctaacactgatgagcttggtcttgagcaagttggcgttaaaatgactgaccgtggtcttatcgaaatcgataaccaaactcgtacatctgtaagcaacatctttgcaattggtgatatcgtaactggaccaccacttgcacacaaagcttcctacgaaggtaaaatcgcagctgaagtaatcgctggcgaacctgctgaaattgactacttaggaattccagcagttgtattctctgagcctgagcttgcatctgtaggttatactgaagcacaagcgaaagaagaaggattagctgttaaagcttctaaattcccatttgctgctaacggacgtgcgcttgcacttaacgctgcagaaggcttcttgaagcttatcactcgtaaagaagacggagtagttgttggtgctcaaatcgctggacctagcgcatctgacatgatcgctgagcttggtcttgctatcgaagctggcgtaacagctgaagatatcgcattaacaattcacgctcacccaacattaggtgaaatcacaatggaagctgctgaagtagctattggaagcccaattcacattgtaaaataatgttttaaaaaagctgatgcgtatgcatcagctttttttttttgaagaaaacggttttcataaagcatcagatgcttgtcagacagtttttgttgctgatgagtatctccttttagaagaaacgtgtaaaaagcgctgaggcagtcttaaatgagctctagatgcatacatatgaagtgggacgtgctttccttataggtagataaaaaattgctcttttggataacgaatgaaaaggcggagaaggagctatgaagacgtatttcgtttggagcttacacattgttatttggatgggttattcactggttgaattgctatcaaaacgtgatcagttgacatctaaaattattttatttttagtatttgcttatttagcttacggcatagcagaaatgaacgttaaatctaaaagactggcgcttatgatgacgggtacaacttcagctgtctgcttgacatgttatcaactaattttattttgcacggcgtaagattgcataaaaaaagcgttagcttatataagctaacgctttttttgtcttacacagatttcttttctcttttcaatgcgccttcttctttaaatgctttcattaatgagaagaccgttagcactagcacaattgagaatggaagtgctgctataatcgcagctgtttggagcgcgtccaaaccaccggtccaaagcagaatgattgctgttaacgattgaattaagccccacgtaagtttaatagagcctgaaggatttagattaccatttgttgtctgcattcctaaaacaaatgtagctgagtcagctgatgtaatgaagaatgtagcgattaagcaaatagcgacaatggacatgaacgtaccaaatggaaactgttcaagtacatagaataaagcaacttctgttcctttattgttgataacatccataacaggaagatccttaaaaaagtctaagtagaccccggaacctccgaatacagcaaaccataatcccccaaatacggtcggaacagctagtacaccaattaaaaattctcgaatggttctgcctcgtgaaatacgagcaatgaacgtaccaacgaacggtgcccaagcgatccaccatgcccagtagaaaattgtccaatcttgaacccaggtgctgttatcaaacgggctcaatcgaaaactcattgacggcaagttttgaatgtagctgccaatggttgtaacgaataagtccataataaagttggttggacctgcaaataacaagaatagcattaacagaatagctaaaacaatattaatgttactcaaatacttaatacctttgttcagacccgtctgtgctgacagcatgaacaagaacgtcacgataataataacaattaattgagtcgtgaaattattatcaatacttggcgacaagtaagaggctccgccggtaatttgaatagcgcccagtcctagagatgttgccaccccaaaaacagttgcaaatacggcgatgacgtttatgatcgttccaagaggtccatcaacacgttttcctaatagtggacgtaaaatattactgatgatgaacgggtaaccttttctaaattgaaaatatgcaagggccagtgcaagaacggaataaatagcccaaggatgtaaaccccagtggaaaaacgaataacgtagagctgcgcgagctgattctgctgtaccgccttcaccagaaggtggagtatgaaaatgattgattggttctgaaacaccccagaatacaagtccaatccccataccagcactaaataacatggcaaaccacgagacataaccatactgaggtttttcgtcaggtttacctagtttaatatttccgtactttgaaaaaattaagtacagcgtaaaaactaagaataatgtagctgctaataagtaataccagccaaatttctcgatgataaaactatgtattgccgatgtgacaggtgtaagcgctgcgcttcctagcacagattccggaataacaccccatacgataaatactgcagcaataataaccgaaatgataaaaacaggagtcagttttttcatcgattatcactcctttcctattctattttacataacatagtttctcatataacctttttagctatacatgaaaccatatggttatacattctagtaaagtttgtatgaaatgtctaccctattagtaagaaaaaacgacaagagcccaaattcttatttttggtaattgttttaaagtgctgaaatagatgtgaaattagacattgttttttcatataaatagagatgatgctaagcgttcagctttttgaaaacaaatataacacttatgagaaaaatatttttaatgtgacatactaattagttgttgacatattcaatgtgacataataatataatatcaagagttataaaacgcttacaaaaaaagacggttaaaggggagtttacaaaatgggaacaatcgtatgtcaaacatgtaactgcacaattgatcatttcgaagatgagaaagtgacgcgattatactcaacatgtaaaagcggagaatgtcaaaaagcagatgaagatttagattaattcaataaaaaaaggtgcggaaattcgcaccttttttttattgaattgctttatgttctttaatgacacgaaatgtttttaattcaaaatcttccggaccctgcactggtaaacctgcctctaagtttgtttcaatgtaggttaaattttcctcagtgatgatttccccaggaataaaaataggaataccaggaggatagaccatcacaaattctgcaataatacgacctgccgactcatgaaaaggtacgacttctgtttcagcgtaaaaagcatcgcgaggtgttaaagccaatacaggaatatcaggcaataaaatagccggttttgccgttgtctcagaaagattatggaattttgcggataactcacgcagagccgtgatcagacgtgaaagatcttcttctgtatctccaggcgtgataatacatagaatattataaaggtcagacatttcaacttcgatattatgagcttcacgcatccatttttctacgtcatagcccgtaattcctaaatctgaaacagaaataattaatttagtagggtctaaatcatacgtagcttttgtgcctaaaatttctctgcctatacatcggatatgctcaattgtattaatttcttttcgtgctttttcagcaagagaaattgcacgttcagccagctctttcccttctgtagctaaacgttttcgtgcaacatctaaagaagccagcagcagataagatgttgatgttgttgtcagcatgcttaaaatagactgtacacgttttggagatattaagccttcgcgtatgtttagaattgaactttgcgtcatagaaccgcctaatttatgcacgcttgttgctgccatatctgcaccggcctgcatagcagacagaggcaaatcatcatggaagtgaatatgaacgccatgagcttcatcaacaagtacaggcacttgatacgagtgggcaatttctacgattttacgaaggtctccggaaattccaaaataagttggattgataacaagcactgcttttgcttcagggtgctgctttaaggctttttctacagagtccgatgtaataccgtgagaaatgccaagattttcgtcaatttcagggtgaataaaaataggcgtagctcctgaaaaaacaatcgcactcataacagatttatgcacgtttctaggaacgataattttatctccaggcccacatgtcgccatgaccattgccataatggctccgctcgttccttgaacagagaaaaaagtatggtcagcaccaaatgcttctgcagctaaatcctgcgcttgtttgataatgccttttggctggtgaaggtcatcaagtggaccgatattaattaaatcaatggataaagcatcatcgccaataaatgagcggaattcaggatccattccatttccttttttatgtccagggatatggaattgtgttgggtttttcttagcgtgattaaccaatccagtaaataatggagttgaaaattgagaagacaactttgctatacacctcttttatcataaattgtcagtccctctaagcaaagcttagagggactttgattgttttttatcaaattacagcattcaattttatataccaaaaactagtggctgttgaattctacatattaaaatatcagatcttttttctataaaagaaattcaacagaaattctactcggcagttttcttgattttaaccattatataaatgaatgaaacgtgtatgtttactactgtttgataatataaatacaatttttagttaaaaaaatacaagtaattgtaaactgcttattacttattattttatagttctttatgttttgaaaatccccataaaacaaaagaattatagcacttattaacccatttgcaaagatattttaaagagaaaataaaaagaaaaaaaaggagaaattcttttgtgtgaaaagagaataaattttgtgtacattatagattgtgatagagttaagaatatagatatacatagattgaagaaataaatggagtgatgagaagtggaatatcagtaccctatctcccttgattggagtacagaagaaattattgatgtagtgaagttttttgaaagcattgaacgagcttatgaaaaaggtattgagcgtgataacctaatggcagtctatcgccgatttaaagaaattgtgccaagtaaggcagaagaaaaaacaatctgtaacgattttgaagaccaaagcaaatactcttcttatcgaacgattcaaaaagcaaaggctgcttcttctggagacattataaaaatgtaaaaaatggagccaagcttggctccattttttttatatcaattcgttaaaattatgcatatgcttttttagttagttcatataatggagttaccgtatgaaatgtttgttcaatacgagctatccattcttcgccgttcattgcaattgcttcttcttttggaattgtaatgccgcataggatctcagcttttttaaccgtctctagacgttcaaacaaactctctaagtcttcagaagataagtcgcccattttgtcactatcaggttttgtatgatctttcgaccaaacaaacgaggctgggatattttgacgaatctcctcaatgttttgttttagcagctttccaaattgttctttaataggtgattcgtaaatgacggcgaaccacacaaagacatgtgtttcccaaaggccaatttgaaaatgagggagctttttatacccgcgtttactgttagcaaaggctacccacgtatctgctggcgggttaactgttcttcgtgcatgtttggcaatgtgtacgaacatttcatctccacaaagtgtagaaagagtaggagcaaaatgattgctcaattgttcgaattttgggcgtatcgttgtcttgagggcttccatacgtgcatcaagtccctcgatacggaatacgttaaagtcatcttgtgaaaatcctgagaatgccatgtgaaacctccgttttttagtgaatatgtatagctgctgtgcatctatgcaagtaagtatgatttacgcgaagattctaccacatgaaaagcataaacaccaattaattcgcatatgcttgtcaaaacgtgtctatcatttttttataggtaatcacacaatttagttacatgagattaggtttcgacatagactatatcaatcaaaatatctgaaaatttagttttctataagcgggttcaataatttgagaggggtgtttgaagcatgaaacaagtggtgaatatgtataagaagaatgatggacaaaaaagattaggtgtaattcgtttggagttagattacgagttagcgacgttatatgaagccatgatggagaataatgaggaacaaaaacaaaaatgtaagcgaaagcttgagaaacttcgtgaagaaatgatatctcttcagtagcagatacgggaataaaatagaacaaataagggtaaactgtaaaaaaggattaaactgaatgagcagattcataagtggtaacagagcacgtgggagaagaagcggcagttcttctcccacgtgctctgttaattgacatcttgcagaggtttttttaagcttaaataagagacgtatttttgagggggaattgagatgacacaacgctggaaagaaattgatacatacgttaaagagtggctaaaagaagctggacaaaaaattcaacagtcgtttagtaaagaacttctcattcaaacgaaatcgaatccaaatgatttagtaacaaatatggataaagaaattgaacagttttttatctcaaaaatcaatgaaacctttccgcaacatcatattctcggagaagaaggatatggagaagagcttgaatcagaagaaggaacgatttggattatcgatccaatcgacggtacgatgaattttgttcatcagcagcgaaattttgctatttccatcggtatatttgaaaatggtgtaggacaagcaggttatatttatgatgttattcataatgagctatatcatgctttaaaaggacagggagcgtttatgaatgacatccaattgccgaaacttgaacctgtaccagttgaacaagctattattagcctaaatgcaacatgggtgacggagaaccgccgtattgatccttccgtattaagtccgcttgtgcgtaaagtaagagggacccgttcatatggatccgcagctattgagcttgcttacgtagcggctggacgcttggatggatacattactttacgtttggctccatgggactttgctgccggtaaagtattgattgaagaagttggaggagttatgacagatttagaaggaaagccgttagaaattcttgaaaaaagcagtgtatttgtaagcaaaccaacattacatgacgaaatctttcgtacgtaccttgaaggaaagtggaataaataaaatagaagtgaagacttacgtgtagtcaaaggattttgtgatgaaaaaacgtcatgaaccattttgatgttgcaaatggccatgacgctttcaatcatcgcaaaaaaaattacagctgccctttttctcgcatttttttcttagtcgtaaagccaaggcccattacaacaattaaagctgcgatagctaaaatgaccccgagagcgcttccttctccgataaatatgccgattgacataattgccgcagttgcgataaatgcatataaaacaaatacccacttaatgtttctcatgttgattcctcccatttataacggatatttatagtgtacaacaaaatcattctgcaattctagagttagtgtgatataatagcttagttattacaagcataggagtgaaatgcgtgaacattcgtaaagatttacgtaatattgccattattgcccatgtagaccatgggaaaacaacgttagtagataaattattacatcagtccggaacattccgtactaatgagcatgttgaagaacgtgcgatggattcaaatgaccttgagcgtgagcgtggaattacaattttagcgaaaaacacagctattaattataaagatacgcgtatcaacattatggatacgccaggacatgctgacttcggtggagaagttgagcgtattatgaaaatggtagacggtgttctacttgtagtagacgcatatgaaggatgtatgcctcaaactcgctttgtattgaaaaaagcattagagcaaaacttaacgccgattgttgttgttaacaaaattgaccgtgactttgctcgtccaactgaagtagttgatgaagtaattgacttatttattgaactaggtgcaagcgaggaacaaattgagttccctgttgtttatgcttcagcaatcaacggaacagctagcacgaaccctgaaaagcaagatgagaacatgtcatctctatttgactcaatcattgagcacattccagcaccagtagacaacagcgacgaaccacttcaattccaagtggcaatgcttgactacaatgactatcttggtcgtatcggtgtaggtcgcgtattccgcggaacaatgaaagtaggccagcaagttgcattaatgaagcttgacggtacggtaaaacaattccgtgtaacaaaattattcggtttcctaggcttaaagcgtgttgaaatcgaagaagcaaaagcaggagacctgatcgctgtatcaggaatggaagacatcaacgtaggtgaaaccgtatgtccgtttgaccaccaagatgcactgccaattttacgtattgatgaacctactttacaaatgacgttcttagtaaacaattcaccgtttgctggtcgtgaaggtaaatttgttacatctcgtaaaattgaagagcgcttaatgtctgaacttgagacggatgtaagtttacgcgtggaaaatactgattcaccggatgtatgggttgtttcaggacgtggagaacttcatttatctattttaattgaaaacatgcgtcgtgaaggatatgagattcaagtatcaaaacctgaagtaatcgttcgtgaaattgatggcgttcgctgtgagccagttgaacgtgtgcaaatcgacgtacctgaagaacatacgggttctattatggaatcgatgggtgctcgtaaaggtgaaatggttgatatgattaataacggcagcggtcaagttcgtctgatctttatggttcctgcacgtggtttaatcggttatacaactgagttcttatcgttaactcgcggattcggtatcattaaccattcatttgatagctaccaaccaatgcagcaaggtcaagttggaggtcgccgtcaaggtgtgcttgtttctatggaaagcggtaaatcatctacttatggaattcaaggcgtagaagaccgcggtacaattttcgttgagccaggtacagaagtatacgaaggcatgatcgtaggagaacatactcgtgaaaatgatatcgttgttaacatctgtaaaatgaagcaaatgacgaatatgcgttctgctaataaagatcaaacaacaggtatgaaaaaacctcgtattatgtctttagagcaatcacttgaatatttaaacgaagatgaatattgtgaaattacaccagaatctattcgtctacgtaaaaaaattcttgataaaaatgaacgtgaaaaagcagcgaaaaagaaaaaatacgctgacacgaaataataaaaaaagtaagtcgttagctctatttgctagcggcttgttttttatctattatatcagaattttctattttttgaaagcgttttataaagaagggatttggaaaggaaaaaggtggcttatatcgaataatgtaaagtatggaatagggggaagaattatggatgtaaaagaacacctttcattttttgctgctttgtatcaagtagatgaacatgcaaaaataggaatgtggctgttatactttaccattttagggctatctgttcttgtgtacaaactcgggtttgcaaagaagctgccgcttttaaaatctgtggttatttatctatttttagcttttggatgtacgatcttaacgtttttaggcatttttttacctgtagctgaagggcttgtagttgcagcgcttgtattaattatttataaaatacggctgtatcaagctaaaaagcaaaactccacgttgggttcataaaagactacataaaaagacgcttgtagctacaagcgtctttttagtatgatatagccgaagacaagagcggctgcgaaaattaaatggcccgctgtccaataaaaaatcgctcctgcatcatccaccgcaggcgtaggcttgagcgcaagcagcgtcaacggaaaatacaaaggaatgattggaagtgttaacaaaaaggaacacaatacgatttttcgaatagacatattatttaatttatctactatgtaaacaaaaacgatcccaattgcagcggcaatgagtaaatgaaaaacaaactctacccattcaggccattgaatagggccaatgataggaataaaatcaacatttaataaaagggtataaacttgtttgccggttagccattctatccattttaaacataacccaaggataatcccgcttaacatgccaatacttattcctaatcggagcaccttaccaatcctcctctgtctttttcgactcatatagtttaaaattaccagtagctatgcgttcttttgttcgtttttcaatccgttcagaacattcattgcacatatatgtatggataggacggttgcgcagtcgttttgccacgagcgtttcatcctcaattgtttcaattttatcgcacatgacacattgtactctcatttctatcacctcaacttctctatacatcattctagccgaaaatgcttgttttataaagtttttttgcggtgctatctctcagtagaaaaggaacgataggaaaacattcctaaagaagcaggtaattttgcttgttagctcgaagatagtaactagtaagtacataaacagtaggagggatgaaaatggccaacgaagtcgagactcaattagtagatgcattatacgatgagctacagacagagagatttgcaactatttcaactattgattttgaaacaaacggtccaaatgttagtgccatttcgtggttagtagctccgactaaacaaaaaattcgatttgccgtagatgctaaatcgaggattgtagaaaacattaaacatacgaataaagcagtggtaaatattcttgctaatgaatcatgctactcaatcagcggaatagctgaggtagtgcaagaaaagttagaaggagtagctttaaagctgacgctaattgaactagatattaatgaagtaagagatgtcatgttctatggttctaagatttcagtaaacccttcatatgaaaagacctatgatccagtagcagccgctaaactcgataagcaagtaattgaagcgataaaaaaagcttagcagcagcctgccgctaagcgactttcttattcatttttttgaagatgattattagattgtttttcctgctcattctttaaattttgctcttgtttattatttaatttttgattgtttgtatctgttgaactaggatttcggcggatttcttctgcaaattcaggcatcactcggtttacaatggctgctaattcatctaaaaaccctgtaaccggccgacctttgcgaatttcatttccaatttgttttagccgagcgaccgtatcaggatctgcaataacaacggaattagcaccataaggatcagctttcaaaccttcagcaacagtatatttgattgaacttacttctgaacgatcaatatttttgccgacgtcaatgcctacgattgcgtacttgccaagcacaatggcagtagcatcgtttacattgggaacgcttgaagccagttcaactaaatgagctgatatttcattagcagtacgcttgtgagaacgttcaggagatgaatttttgacctgtacaattcgatctgttttttgcccttcttcaacgtctgcttggttattgttgcagccggttagtgtaataaaacataagctaatggatagaaaaaatttgttcatgtgggagactcctccttatgaatgactcattttttgtagtaatttgtatttagtttctaatagttcttctatctttatacacgtgttcatatatttaaagaaaatggtccgtccatttaaggtcacttcacacatgtgcgttacatagtatataaatggatgggtgccttgtttcactccttacaggaaaaacaatcggagtaggaggctgaattattgggaaaaatttatgtattagatacgaatgttttattacaagatccgcattcaattttttcatttgatgataacgaagtagtgattccagccgttgtactagaagaagttgattcgaaaaaaagaaatatggatgaagtcggacgaaatgcaaggcaggtatccaaactcattgataacttgagacaacatggaaagttatatgagaaaatccctttagaaaatgggggccatttgcgaattgaacttaatcatcgctcttttcaacagcttcaagaaatctttgtggaaaaaacaaatgataatcgaattttagctgttgctaaaaatctatctcttgaagaggaaacaaaagaagatggacgtgaagtgatactagtgagtaaagatgtgttggtacgtgtgaaggctgacgcaatcggcttaagagcagaagattttttaagtgatcgagtagtagaattcaatagtatttatacaggcttttctgaagtctatattgcaaaagaactgctgagtcaattttacgaaaaaggagagttactaacgtctcaaattgcgaagcactccttttttgctaatcaattcttagtgatgaaagatgcatttgggggatccggatcagccatcggcattgtcgatcaaacaacaacgaaagtaaaaaagcttttatttgaatatgatcatatctggggaatcaaacctcgaaatgttcagcaaattatggctttagaacttctccttagagacgacgttcaactggtcacgttaattggaaaggcaggtacgggtaaaacgctgcttgctttagcttcaggacttatgcagacggaagatctagggtgctttaaaaagctacttgtagctcgtccaattgttcctttagggaaagatattggattcttgccaggagaaaagcaggagaagcttcgtccatggatgcaaccaatttatgataacttagagtacttattcaacactaaaaagcctggagaactggatgcgattctagcggggctcagttcaatagaagtggaggccttgacgtatataagaggccgaagcattccagagcagttcattattattgatgaagcgcaaaatttaacgaagcatgaaattaaaacaattttaacaagggtaggagaaaagagtaaaattgtccttatgggagatccggctcaaattgatcatccttatttagatgaatataacaacggattaacgtacgtagttgaaaagtttaaagagcaaaaagtatcgggccacgttcggttaatcaaaggagagcgctccggactagcacaattagcagctgatattctttaaaagaagtggggttccttttggaaccccacttcttttattatgtaacgatgatttcttccacatatttaatagggttatttcggttagatccgtcaggtaaatagacatagataggcccatcttctctaagaggctttccatcttggctgaaaccaaagattagtttttgcgcttcttctaatgaaaaagaaatcagcgcgtcttttgttttaaatgaaacgttggtagcttcttcagtaggtgaagcgtttgctagaaaaggtgcaaataaaatgccaaatgttccatttactagctcctgttttttaaatttcttttcggtttttaacgtaggaggaaagacggctccctcttgaatttcacggtcccaatgcttcgaaacagcctttgtgtacgcttctgtctcgtctttttgctccggtggatgttcaaagaaaacgtccatatcgagcttgcggtcatcgaaaatccacacgcttgggtcgagtgtcagcgtatattttacttttccttttaacataataattgaattcatcataaatgcccccttgctaaaagtataagcgctttctacttatttgtcactttgatgaaaaaatttagttgagagtgattctcgtatgatataatgtaaaggtcaacgaaagtgcgaaatttcctacgtctatggtaactgttttgagaaagtaacagtataaaaaagacggccagcctcacggacatgtttatccttgcttttttggagcatagcctttaaaattgagagatagattaggtaatcgctcgcgaacggagggattgagtttgacgcctgagacaatgatagatcatcgtgaaaaagcgtatgcgttgttaaaagctgatgcagataagattttgcaattaattcaagttcaaatggataacttaacaatgccacaatgtcctctttatgaagaggttttagatacacaaatgtttggtttatcaagagaaattgattttgcagttcgtcttggtttaattgatgaacgtgttggaaaaacattgctagaccgcctcgagcgtgaactttctgcactgcatgaagcgtttacaaaaaaataaaaatcgcgcgatcgaaactcaaactatatacaaacgtagtttgagttttttattacaggtggttgaaatttcctaatttactcaaatttgtacataaaagatgaaacgaaacagaaacacgtcatttttaaaggaagagggttatggtaaaaaaaatatttaggcattttgactattcaattgtaattccagtgctgcttctttgtgcggttggactagttatggtttacagttcaagtatgattgtaagtattacaagatatcatacgtcaagtgatttcttttacaacagacaaaaaatgtggcttgcttttacgcttgtattgttcattttaacaatgctaactccttacaagctgtatcctaaaatactgccttatgcgattctgggcatttttgtactgcttttgcttgtgtttgtaatgggtcatacgagtaacaatgcgcaaagttggctgcagcttggcggggcaaacatgcagccggctgagtatgccaagcttgttgtcattttatatttatcgtatgttttgtctaaaaggcaagagtatattgacaatatcaaaaaagctttttttggacctatgggtcttgtatttctaatattaggttttgtagctattcagcctgaccttggaacgggatcaattatttttgctattgccgttaccattatgctatgttcgggaatctctaaaaaaacctttttccgcatgctagcactaggtatcattttgcttacggtaattattacgattggtttttttacaggtcagtttacggccaatcgaattggccgttttaccggtgcatcagatccgtttgccaatgctcaaggaaccggttatcagctggttaattcatatttagcaataggtacaggaggcttaaaaggccttggtttaggagaaagtgtacaaaagtatggttatcttccggagccccataccgatttcattatggctattattgcagaagaattagggttctttggagttatgctcgtgctgggccttttaggcttcttaattttcaggattttagtgctggctaaaaaatctcaggatccgtttgctagcatgatttgtattggagtagccagtatgataggtattcagacaggcattaaccttggagggcttacgggactcattccgattaccggcgtcacgcttccgtttatcagttacggaggatcttcgctgctaacgctgatggtatctatgggaattattgtaaatatttcgtttttcgtaaattatcaaaataaaaaacagaaaaatacggaaaatattgtgctacatccgaacaatacatcaacaacaagcgattgattttcgtgaaaaaattgtgtaaaaaaagcaaaaatttattggaattttatcattttccattgatttttgcttttcttttatctaattttgctatatattgaagtttatacgaaattgagaggagattagcaacatgagttttgtaactaaaaaaatcaaaaaagtattagtagcaaaccgaggagaaattgcaattcgtgtatttcgagcatgtactgaactgaatattcggactgttgcaatttattctaaggaagacgcaggctcttatcaccgttacaaagcggatgaagcctatttagtaggagcggagaaaaaaccgattgatgcttatttggatatagaaggcatcatcgatattgctaagtctcatgatgtagatgctattcaccctggctatggttttttgtcagaaaatatccaatttgcgaaacgttgtgaagaagaaggcattatttttattggcccaaaatccaagcatcttgatatgtttggcgataaagtaaaagcacgtcatcaggctactcaagcagatattcccgttattcctggtacggatggtcctattgattcaattgacgaagcaaaagaatttgctaatcagcatggatatcctctaatgatcaaagcggctttaggcggaggcggtcgaggcatgcgtatcgttcgcgatgcagacagcctgaatgaatcttatgaccgtgccaaatcagaagcaaaagcggcttttggtaatgatgaagtgtatgtcgagaaattagttgaaaatccaaaacatattgaagtgcaaattttaggtgatgaacaaggaaatgttgtgcatctttatgaacgcgactgttcggtgcagcgtcgtcaccaaaaagtagtagaagtagcaccaagtgtttctatagatgaagacttacgtctccgcatttgtgaagcagctgtgcaactgatggaaaaagtgcagtacataaatgctggtacagtagaatttttagtatcaggaaacgatttttattttattgaagtaaatccacgtgttcaagtagagcacacaattactgaaatgattacaggtattgatatcgttcaatcgcaaattttaattgcagacggctacgcgcttcacagcaaggaagtgtccattcctgcacaagatcaaattcacgtacatggatatgcgattcaatctcgtgtaacgacagaagatccgttaaacaattttatgccggatacgggtaagattatggcttatcgttctggtggcggttttggcgtacgcttagatactggaaacagcttccaaggtgctgtaattacgccttattatgattcactattagtaaaagtaacaacatgggcattaaccttcgatcaagccgcatcaaaaatggtgcggaacttaaaagaatttcgtattcgtggaattaaaaccaatattccgtttcttgaaaatgtagtgaagcatgataagttcttaacaggtgcttatgatacatcatttattgatacaacgcctgaactttttgtttttccgaagcgaaaagaccgcggaactaaaatgcttacatacattgggaatgttacggtaaacggattcccaggtgtatcggaaaagaaaaagccgatctttacgaaaccgcgcgttcctagtgtggatataagcaaaccaattcaaaacggaacaaagcagattttagatgaaaaaggcgctgaaggtttagtaaattgggtgaaagaacgcaaagaagtgctattaactgatacaaccttccgtgatggccatcagtctcttttagcaacgcgtattcgtacaaacgacttaaaacaagtagctaacccaactgcacgcttgcttccagatttattttctatggaaatgtgggggggagcaacgtttgatgtcgcttatcgattcttaaaagaagatccgtgggatcgcttgcttactttacgtcaacaagcaccaaacgttcttttccaaatgcttcttcgcgcgtcaaatgcagttggatataaaaactatcctgataatgtaattaaggaatttgttgaaaaatcagcttatgcaggtattgatgttttccgaatctttgacagcttaaactgggtgcaaggaatgactcttgcaattgactctgttcgtcaaacaggaaagattgcagaagcagcgatgtgttatacaggtgatattttagatccgacgcgccgtaagtatgatttggattactacaagaacttagcaaaagagcttgagcagtctggagcacatatcctgggcattaaagatatggcgggtcttttaaaaccacaggcagcttatgatttagtatcggctctaaaagaaacggttgatattccaatccaccttcatacgcatgatacaagcggaaacggtgtatacacgtatgcaaaagcaattgaagcaggtgtagacattgtagacgtagccgtaagctcaatggcaggcttaacgtctcagccaagtgctaactctctttattacgcattagaaggtgcggaccgcagaccaaatctggatattaaaaatctagaagagctttcttactattgggaagacgtgcgaaaatattaccaagacttcgaaagcggcatgaacgctcctcatacggaagtgtacgagcatgaaatgccaggcggtcaatatagcaacttacagcaacaagcaaaagcagttggtttaggaaaccgctgggatgaagtaaaagatatgtattcacgcgtgaatttgttatttggtgatattgtaaaagttacgccatcatcaaaagtagttggagatatggcattgtttatggttcaaaacaacttgacagaagaaacgctgtttgagcgcggtgaaacgcttgacttcccggattcagttattgaattgtttgaagggtatttagggcagcctcacgggggattccctaaagagcttcagcgcatcattctaaaaggcagaaaacctattacagttcgtcctggagaactgttagaagatgtggacttcgatgcagtgaaagaaaagctgtttaaagacttaaatcgtcaagtaacgagttttgatgccattgcttatgcgctgtatccaaaagtatttatggattatcacaaagcagtcgaacaatacggggacatttctgttcttgatacaccgactttcctatacggcatgcgtttaggagaagaggttgaaattgagattgaaaaaggaaaaaccttaattgtccgccttgtatccattggagaaccgcaggcagacggtacgcgaacagtatactttgaattgaacggtcagcctcgtgaagtcgtgattaaagacgaaagtgtcaaaacaaccgttacggcaaaacaaaaagccgaccaaggaaatccggcccacatcggcgcttcaatgcctggaaccgttattcgagtagtagtagaaaaaggcgataaagtctcaaaaggtgatcacttaatgatcacagaagcaatgaaaatggaaacaaccgtgcaagcaccatttgacggcgtgattaaacaagtacacgtgtcgaatggagatcgcatccagccgggagatctattaattgaattagaaagctaattaaaaaaggtacgagctctgagctcgtaccttttttgatcaattatgtgtatgacgcgttgcaagtaaggttaagtagcttaatacaccgaataggaaagagataattaaagaatgagcaagcgcgagctctagctgcagacgtgtgacaacaacaagcataccggaaaccgcctgaaaaataactagaatgagagcagctaaccatccgtaaaaaatatttttttgatggcgataatatttaactgcatggataaaggcagctaaaatccatacaaacgttaaaacagcagcgaatcgatgtcccatttgaatccactgattcaaatcaacaggtagccaaccgtttccgtttgaacaaaatggaacgtctggacaagccaagctagcttctttatggggaacaagcgcgcccgtgtacacaacagcatatgtgtacaagataaccccgtaaatgtgtttttttattttagagcctagctgtatattagttgcgtcgagcttttgatccacttcaaagataataagtgttagcagcagcaccgaagcaaacgaaataagggaaataccaaaatgaagagcaagcactgcatctgattgcccccacataacggcagcagccccaattaatgcttgcagtactaggaagaaaaaagagataaacgctaaaggtctaacttcttttatatgtcctagtgaaatccatgcccatacgcataaagcgagcacaagaaagcccgacacgccagaaactaaacggtggcttagttcaacaacggtttcaaatgttaaagggtcaggaatgagctgtccattacacagaggccaagaatctccgcacccgtctgctgaaccagttttcgtgacaagggcaccgccaagtagaataagtaacatggccatgctcgtcacaacggataaaaactttaatccaagtcgcacaataatcaccttcctaaaagcaaagtaagtaatataacgagctaaacaatttatcctaatctttttgtatattaaacataaatttcatttattctccaaaaacttgattgaatttgttataatggtagaaagtgtaagctttgttcatgagtttgactctgcagatatgtaaaaggtatcgtacagaaaactattttacttgcacaaatatcttttaacaagtgacagggacatgcatttagctcatgacaaaaaaaatccatatttttttcatgaattcttcacaaagtaacggcaaaatatggtttaataaacatgagaaatagatatttctctactattttatcgtttacatgtgaagcttttaagtagctttggtgagaggaatatgacttctttgtgaacaaagaggagatttttgtaaaaatatgttgaaaacgccttcatttatagactctttatttactagataaaagtctgtggatgagtaaaggaggaagcgccatggaagattcaaaaatggtggaagattcaacgctttctgcatcgcctaacacagctcatgtaagcgaaaatagttccgtttggtcagactttttagctacgattaaaattggaatagtcaactcaaatttcatcaccacctttactggtttttggctagctcttttcttcaacgaacaacacttcttagaaaacctggataaagcattttttactttaataggttcttcacttatcatcgccggttcatgcagtttgaacaattacatagatcgtgacattgaccctctaatggaacgaacaaagggacgacctacagtgacaggaagttttacacctttgacggtccttgggattggaatcgtttttacgttaaccggcttgcttatgctactagttgtttcttccgtagccgctctcatcggattagcaggaatacttacatatgtagttctttacaccatgtggtccaaaagactatacacaattaatacagtaatcggaagtatatcaggcgctgtcccgcctttaattggatgggccgctatcgatcccaatttacatgtagtggcttgggtgttatttctaatcatgtttatttggcagccgcctcattttctagctcttgctatgcgaagatgtgaagaataccgggcagcgggaatccctatgttgcctgttgtacacggttttgagcttacaaaacgacagattctcatttggattgcttgtttgttgccattacctctttatttatacgaattaggcactccatttctaattttggccactgttttaaacataggatggctatttttaggatttgctcaatacaataaacaagaagacacaaagtgggctagcatgatgtttgtctactcactaaactatttaactattttatttgtctcaatgattgtcgcaacgctttttgcctagataaaatctttcactgaatgcgacactgcacaagggggatttcttctacatgtagaattcattatagaaggaataagttttatgctcaagagggcatagatgaaatcacgtcaatgaaagagaggttggggaatggtatgaaaaaatggcgattgaactttcgtgttttgtcgttatttacgctgcttgcattcgtgttatcggcctgtggaaaaccgtttttgtcaacacttaagcctgcaggtgaggtagctgaagaacaatattcgcttatgctgcttagtacagccatcatggttttagttattattgttgtcaccattatctttatatttgttattctgcgctttcgtcgtcgcaaaggcgaagaaaatgtgattccaaagcaagtagagggaagcagaaagttagaaattatatggacagtgatccctatcttgctgctgattattttgactgttccaacggtcatctcaacatttaagttagcggatgtaaaaggaatgaaggacaaagatgctgtcgtagtaaatgtgcgcgctaacttgtactggtgggaatttgagtatcctaatcaaaaaattattacatcgcaagatctagttgtgccaacggataaaaaagtctactttaacattaaagcttctgacgtcaagcactcattctggattccttcagttggaggaaagctcgatgctaacacagaaaatgataataaattctggctagtgtttgattctaaaaaatcgaaggaagctaacggggttttctacggaaaatgtgctgagctttgcggtccatctcattctcttatggactttaaagtacgggctgtatcaagcgatgaatttgatacgtgggcaaaagatttgaaaaaggcaaagcctgatgtagaaacagcatccgcaaaagctggtcaagaggtctttaatgaaagctgtatcggatgtcatgctgttgacgtcaaagacaatcgtccagagcaagctcgtcaagcaccaaacttagccggtttttctgaacgtgagcgtgtagctggagtgcttcctcacaacaaggaaaatatcaaaaaatggttaaaagaccctgaaaaagttaagccgggtaataagatgagtggtacatatcctgacttaacagatgaacaagtgaatgagctagcagactatttaatgagtttaaaagaaaaataaacgtccagtcgtttttaaaaggggaggtttagcgatgagtacactcagtcaaaagaagggtgtaggtggaacaatttgggactttatgacaaccgttgaccataagaaaatcgccattctttatttaattgccggcggtatcttttttctagtcggaggagtggaagcgctatttatacgtattcagctggctataccaagcaatgactttgttagtgcaggaacgtataatgaaattttaacaatgcatggaacaacgatgattttcttagccgcaatgccgcttctttttgcgatgatgaatgcagttgttccgctgcaaattggagctcgagatgtagcatttccatttttaaatttgttaggtttttggttgtttgcctttgggggactctttttaaatctaagctggtttttaggaggagcacctgatgcagggtggacatcatatgcttcgctgtctattgcatcacctggtcacggaattgatttttatgcgataggtttgcagatttccggagccgggacattgatttcaggtatcaactttctcgtgacaatcattaacatgagggcgccaggtatgacttatatgcgtatgccgctgtttacgtggacgacgtttgttgcatcagctcttattttgtttgcgtttccagcactaacggttggattgtttctaatgatttttgaccgcttattcggtggaaacttttttgacgccacaatgggtgggaataccattatctgggaacatcttttctggatattcggtcatccggaagtatatattttaattcttccagcgtttggtgttttctctgaaattttacctactttttcaagaaagagattattcgggtactcgtcgatggtttttgctaccgtattaatcggatttttagggttcatggtgtgggctcaccacatgtttacaaccggacttggtccgattgcaaatgccatttttgctgtcgctacgatggctatcgccgttccaactggaattaaaattttcaactggctgtttacgctttggggaggaagtattgagtttacgtctccaatgctgtatgctgtcgcctttattccatcatttgttatcgggggagtaacaggagttatggcagctgtagcacctgcagattatcaatttcaagattcttattttatcgttgctcacttccattacgttatcgtaggcggtgtcgtatacgctatattagcaggtgtcacatactggtggccaaaaatgtttgggaagatgttagatgaaaagttaagcaaagcaacgttttggctctttttgattggtttccacttaacgttctttattcagcatttcttaggcctaatggggatgcctcgccgtgtatggacgttcttgcctaatcaaggtctcgaccttgggaatgcaatcagttcatcaggagctgctttcatggcagttgctacgctcattttacttgttaatattataaaaacaactgccaaaggacaaaaggtaggaggagacccttggggagacggacgtacattagaatgggctatttcatctccgcctccagagtataactttaaacaaacgccgcttgtacgcggattagatgcatattggattgaaaaaatggcaggaaataaagaaatgacgccagccgaacctcttggtgatattcatatgccaaactcgtcgtttattccatttatgatatcgcttggaatgtttattgcagggattggctttttgtatcgaaatgatcatgcgtggggcgatattgtagggattatcggaatggtcgtcatgtttttatcgatgttcttccgttcatggattgatgatcacggctttcatattcacaaagaagacttagttgatgatgacaaggaggcgaagatgtaatggagactgaacaaaagctaactgctgaaactttccctgcttcgcctgaaaaagcaacgcttgaagggaaaaataaatttactggcttttggctctttttaggcggagagacggttttgtttgcttcactttttgctacttatttagctttacgtaattcaacgatgtcaggacctaagccagaagaattgtttgatatcaaacttgtttttgcagccaccatgattttattaacaagttcattaacaagcgtatatgctatgtatcatatgaaaaattttgaatttaaaaagatgcagctatggttaggcgttacgtggcttttaggtttagcgtttttagggctagaaatttatgagttcaggcattatgttcatgaagggcatacgtttacaagcagcgcattcggttcttctttctacgcgctggttgggacccatggagctcacgtaacgttcggattgctttggattggttctttgatgattcgaaatgcgaagcgggggttaaacttatataacgctcctaaatattatgtcgcaagtttatactggcactttatcgatgttgtgtgggtctttattttcacggttgtatatttaatgggaatggtgggataagctgatgacgacaaatcaatcaaactcagataacccaaggctcaatttagattatcgtaaaaaaagaaacgcagaagatatgaagatgcaagttatctcttttgcgatgatgttgtttctaacactaattgctttttttgcggtttatcaagagtttagcggatggtacattatgccggtgattgtgctcttggccgttgttcaagtcatctttcaactttattatttcatgcatatgaaccacaaaggacataccataccagcatttttcttgtattcaggcgtattggtagctcttttaaccattttagcttttgtaaccattatttggtggtaaagagaagggctggcatgcgccagtccttttcatcatctgtagaaggaggaatagaagttgattaacaatttgcagatgtttgggtttgaagcactttggagtccttactattttttaaccatttgtctggtgaccgtcttatattttttcatcgttggtagatggagagggaattttataggagcggaggccgtaagcagaaaaacaaaagcgtattttgttattagcatggttcttttatatatatgtaaaggaggacctgtagatttactagggcactttatgtttagtgctcatatgacgcaaatggcaatcgtttacttggtgattcctccgctttttattttaggaattccgccgtggttagctcgttctgttatttatataagaggggttaaacctgtttttaaattctttacaaagcccttaattgcgctactattattcaatgggttattttctttgtatcatattccgctgctttttgattttattaaaacggatatgatgctccacggaatcgtgagtgttgtattatttatcgctgcattttgcatgtggtggccactcgttaatcagctagaagaagaacaaacgctaagttctttaaaaaagcttggatacatttttgcagatggcgtactccttactccagcgtgcgcgctgattatttttgcaaatcattctttatatgcgacgtatacagactcaagcgcttgggtacaagctctttccctttgtgtaccgccttctatgattgccagtttagggcagcttgctcccgagatgtttaatacgctgccgcccgtggaagatcagcagctaggcggcgttattatgaaaatcattcaagaaattgtgtatggaacggttttaggctttattttttttcagtgggctcgaaaagagcgagagaaagatacgtacatgcctgattttagtgaacgtcaagatataaaagcaaaggagattccatctactcctcctttgaattaaaaacagattgcgacataactacattaattcaatctaaagacaaacaaatgggataaaggagctgaaccgcttgtaacaccgcagtggatttccatgcaaggcttccctttccgcgggcgggcgctgagcctcctcgtcgcttttgctcccgccggttcccatatgtgccgcttttcccgcaggagtctttgccttgctctccgatcaacagctagaagcagctacacgaaaactaggttcaatatggcaacaaaaaacgaactaccaatcaataattttgattagtagttcgcatttaacttcaactaacatacttttgtctcagcctcttttatttctatagctgaacggtttcaagctgtgatttgatttgtgttaatatcttttcacactgttctacaagggatggcggaaagtattcgccgtctccatattctacaccatgaggataataatgtttgcctagtagaggtgtcataagatgaataacagcatgcctgccccctacatcgcctgaaatagcatgtccttggactcgcaaatagaaggtatctcgctgaaactcgaattttcgatcgtacgtgacgcgttcataatcccattgtccggcgcggaccagaccaaattgatgcataatctcatctaataaatctaaatcaacctttaatgaatcaaattttgcatattcaaatttcatatgaactccctcccaaaacagatataccccaattaaatcataagccgaatggataaaacttgcaatatctaataaggaaaaatgtaaacgttatctatttttatttaaacgttttaaatacgaaagtttactaaaaagttggtcacactataaaacgaacacacgatgtaaaggaggataaaacaatgaaaactgtacaagaggtaatgacagctgatacggaaacatgcaccacgcttgataacgtatatgaagtggcagtgaaaatgaaggaatggaatgtaggagcaattccaattgtcgatagagatcagctagtaggaatgattacagatcgagacttagttataaaaggcattgcagaaaagaagccaaattcaagtaaagtaacggatgttatgagtgaagagcttataactattacagcggaagcctctgtagaagaagcttctaagcttatggctcaacatcaaatccgtcgtcttcctgttgtggaaaatcaaaagctagtagggattgtatcgctaggtgatttatcaacgtttcgctatgcaaatgaacgtgcaggagaagctctctcagacatttcacaacaaacgcattaaaaagcgaaagccaactgtttgcagtatattcgtaaatagttggctttttcttttgtttccttcataccgatagctatttttttttgaatgcatgtataatagagataaaaataagttaaacaggtaaagaaaacaggtgtaaggagaggaagaaaagctgaaaaaagttatttttattctcgtattaatagtggcatttgtatacgcagaggattatttacctcagctagaaaaatatctaacgggtcaaaatattgagcaaaaccaaacggattccaaaagtcagcccacacaagaagtggcttcttatgaaaaacaaagtgaaaatatgatgaggctcattggagatcattcagaacagttaattggaatgcttggagagccggatcgtattgattcttctgcatatggctatgactggtggatttacaaaaagaatcgtcaaacgtatgcgcaggtaggagtagaaaataatcaagtcgtatctgtatacgtcattggctcaaaaacaaatacatatccttttgagattggtgagaagcgagaggaagtagaaaaaagagtttcactttcatccgaactcacgcttcaaaaagacggaaatgaataccgatttcgtctgagtgaagaggatatgaaaatgcgtccaattattaaatatggagatgtatacgtccaactatattttgatcagttccttaatacaatctcaagtattcgaattatggacatggacacgctattaaaacagcgtccgtacgaaattgtttatcgcggcgagcttccaacagctccgtcattgacatcggaggagtggagaagtgtccaagaaggagaagagcagcaaattatcgatattacaaatgtaattcgagaccggtttcagctgtcacctttagcttgggatgaagccactgccggagtagcttatttacacagcaaagaaatgagcgacttaaactatttctctcacgtttcaccagcacaaggtgatttaggcaaccgtctgcaaaaaggtgatgtagtataccgtatcgcgggcgaaaatattgcctcgaattatcaggatggaatcgctgcggttgaagggtggcttaatagtgagggacatcgtaaggctttactcaataaagagtttacgcgtcttggtgtaggtgtatatgagaaatattatacgcaaaactttatcactccgatgaatgaatagtaagattaaaacttccttttgaaaataggtctactcttgtcctctttctcataagttttagtagaggttagaggagggacgagaatgaaaggaagaatagtaggaatattgctcgtacttttctttgcatatacgactactgtacatgcagctgaagggcagtgggagaagcttgataacttatctgatcaaacgctatcgcttgtagagcaaaaggagtataaagcagcccaacatttattcagaaacttttcgaatgaatttaccagtctcaatacagcttctttgggcgtatccgccgaagatatacgtattttaactctttgttatgaacaggtagaaaggtctcttttatcttctgattccagtgatgaagagcgtcttcaaaaagctactcaatttcgattattagtcgatgcgctgcacagcaagcatcagcctatgtggactgagctcgaaggcagtatgctcgcaacatttaaagagatgcgaaatgaagcggtaaaaggagaacaagcagcttatgaagcgcagcttaagcaatttttgaaggagtatgatatgatcttaccgagcgcgcaggtagacgtgtcgtctccctacgtacagcgtgtgagcgcggacgttcactttttacagactgaaggaacgctaagtgagattaacgatgagcagtttaaccaaatggaacaaaacttgaaagatttttttgaacaagtaaaagaaaatcgtacagacccgtcttttatttgggttacaattaccaccggaagtattattattgctacacttttttatgtaggagcgcgaaaatatttcgctgaccagaaaagaaagtcagccagagggcgtaatgattgacgtaaaagcgcagaattgtctaaaataaaagagtagtcaaacacataatgaaaggtgtgggtaaatgagctttttgatttattttctcattattattcttgtgccaatttgggcacagtttaaggtgagaagtgcttacaaaaaatattcacaagtaagcaactcatcaggaatgacaggcgcagaagtagcaagaaaaattttagatgaaaacgggttgtacaacgttcacgtagagcctgtaggcggatttttatcggatcactacgatcctcgttcaaaagtcattcgtttgtcagaagacaactattacggaacgtctgtcgcaggcgctgctgttgcggctcacgaagtgggacacgcgattcaagacaaagaaaactattcgtttttacgtcttcgccactcgcttgtgccggtggcaagccttggatcaaacgcttcttggattttaattatgattggaattatcgcgtcgattaagccgttgctattgttaggtattatcttcatggcagcagcggtcgtattccaagttgtaacactgcctgttgaatttaacgcttcaagccgagcgatgacgcaaatcgtctcagtcggagcgattcgaaatgacgaagagcgcgaaacgcgcaaagtgcttaacgcagcggctttaacatacgtagcagccgcagcagtagcagttcttgagttggttcgcttaatcatgatttatacaggaatgaataacgacgactaataaaaaaataccgctaatgcggtatttttttatctttcaagcggttttttattttcatcaagggtaaatccttcgcctaagacatcatgaacatccgtaactgcaacgaatgcgtgtggatctacagaagtaataacttgctttaaacggaaaatttcatttttactaaccacgcagtataacacattggtatcttgcttagaaaaagaaccttgtccttttaaaatcgtcacgcctcgatccatttctttcataattttatccgatatggcttcgttatgatttgaaatgatcgttgcccctttggcggcatacgcgccgtcttgcataaagtcaataacccgtgcagcgacaaagactgcaacaagtgtgtacatagcttctcggtaggataaataaatgagagacgcactaatcacaataaagtcaaaaagaaacatcgttttccccatattccacccgatatatttttgaacaacacgtgcgatgatatccactcctcctgttgttcctccaaacctgaaaataatgccaaggcccactccaataaaaacaccggcaaaaagagctgctagagtcatatcatgacgcaggggcatattcaccgggaagcgctggaatatccataaaaatagcgataagctaacgactccgagcatggtataaataaatactgttctccctaatagtttccaccctacaaaaaacaaaggaatatttaacactaagttagaataagagggatcaatgttaaataagaaaaataaaagcagggtaatgcctgtgaatccaccttcagctaaattgttttgcatgttaaaattaacaagtccaaacgcaaatatggcagcaccaagcagtataaaaataatatttttaaatctgagacctttcatacttacaaacctcctatgaccgtttttgcactaccttatcataaaggaatatatttcatttcgtaaataactatcgaaaagatttttgaaaatagtaaaaagtgatgatgtttcttctagtgctatgtattagtagtatcctcaattcgtaaaatatagacagatttttgagaattaagggaaacgtgaggaatattgtgaaagagcatctgacaaaggcttggtaagaagaagtaattacactaaataatttgaagtaaagatgttataatagtaagctgagtgtacttctaaaagaggtgaaataaaaagatgtcaaaaaaaacgatggagcaaatgcagcaagaagttgatgcatatattagccaatttaaagaaggatattttagtcctcttgctatgcttgcgcgaatgtcggaagaagtgggcgaattatcgcgcgaaattaaccactattatggtgaaaagccgaagaaaacgactgaagcagaacgtacggtcgaagaagaaatgggcgacattttatttgtattaatttgctttgcaaattcattaaatattgatttacaagaagcgcatgatcgcgttatgaataaatttaatacgcgtgacaaagatcgctggacgaaaaaagaagactaaggagagaaaaagaatggacaaaattcgaattgtacttgcaggaccaagaggtcgtatgggaaaagaagctgtattattaatagaagaaacagagcattttgaattagtagcagcggtagatcgtatcaatgaaggaaaatacataagtgatattgaaggaatgccaaatgtacaagcgccaatctacacggatattgaaaaatgttttcaagacgttaaggcagatgttttagttgacttgacaacacctgaaattgggcgcgttcatactaaaacagccctaacatatggagtaagacctgttgtaggaacaactggcttttcagaagaagatttaaaagaattaaatcagcttgctgaagagaaggaacttggctgtatcattgcacctaattttgcaattggcgctattttaatgatgaagttttcacaaatggcagctaaatactttgatgatgttgaaattattgaaatgcaccacgatcaaaagttagatgcaccatcaggaacaggcgtaaaaacagcggagcttatcagtgaagttcgtaaagcaaaaaaacagggtcatcctgaggaaaaagaattgctagaaggggcgcgcggtgcagattttgaaggaatccgcctacatagcgtacgcctgccaggactgattgctcaccaagaagtgatgttcggaggatttggacaaacattaaaaatccgtcatgactcatacaaccgtgcttcttttatgtcaggtgtgaagctagctgttgatacagttatgaacgtagacacacttgtatatggattagaaaatattattgactaaggagcgagaaaaatgaaaatcgccttaattgcacatgataaaaagaaaaatgatatggtacaattcacaacagcctatcaagcgattttacaggaacattcgctgttcgcaacaggaacaacaggaacgcgtatttcagaagcaacaggtttgaaggttcaccgctttcaatcaggaccgcttggaggagatcaggagataggagctttaattgctcaaaatgaaatggatatggttattttttttcgcgatccgttaacagctcagcctcatgaacctgatatttcagctctgatgcgcctatgtgacgtctatgcggttcctcttgcaacgaatatgggaacagcagagattttaattcatggacttgaacgaggcgatttgcattggcgttcaattataaaaaaatagggtgaagataatgaaagaaacaatagatatccttgcctttggtgctcatgccgatgatgtagaaatcggcatgggtggaaccattgcaagaatgagtgaacaaggtttgaaggtagttatttgcgatttgacgcaagctgaactttcttcaaatggaacggttaaaattcgaaaacaagaagcgtccaaagctgctaatgtcttaggtgttcatgagcgaattcatctggatttgccagacagaggtttggttttaaaggcagagtatatagctgaaattgcatcagtcattcgcacgtatcaaccaaggattatatttgctccttactttgaagatcgtcatcctgatcatggaaattgtgcaaagcttgtagaagaggccatgttttcggctggcgttaaaaattatatcgattataagaagcaaaaagctcatcgtgcggagtctctttatttctatatgataaatggatttcataagccagattttgtcgtagatgtatcaagcacgtttcaaaagaaagtagctagtctagaggcttatgaaagtcaatttacaaaaacagcagatacgtttgatacgccgctggtaaacggatatattgaaacggtagagagcagagagcgattatttggcaaagaagtcggggtagcatacggtgaaggttttttatctaaaaaaccgattttgatgtacgacgatttagtaggtggaaaataaatgaagttaaaaattggtattacatgttatgcttccgttggaggttcaggagtggtagcaacggagctagggaagctgctggctgaaaaagggcacgaaattcattttatttcctctagtatgccttttagattgacgaaagtatatccaaatatttattttcacgaagtagatgtaaatcagtactccgtctttaaataccctccgtatgatcttgctttatccagtaaaatggctgaagtggctaaaagagaaaagcttgacattattcatacgcactatgcaatcccccatgccgtttgcgggattttagctaaacaaatggttgagcacgaagtgaaaattgtgacgactcttcatgggacagatattacggttctaggagaggatccatctttaaaagatttaattaaatttggaattgagaaatcagatgcagtgacggctgtatctcagtcacttgttgatcaaactcatcatttaattagtccagataaagaaattgaaacgatgtataattttattgatgaacgagtttatcataaaaaagaagttcagtatttaaaagcggaatatggcatattagaaaatgaaaaagtcgttattcatatttcaaactttcgtcaagtcaaacgagttacagatatagtcaaaacatttgctattattaataaaaagcttcagtctaagctgctgcttgtaggagacggccctgaaatgacggttgtgtctcaattagtaagagagctaaatcttcaagattctgtgttatttcttgggaaacaagaaaatgtagcagaactatattcgattagcgatttaaaactgttattatctgaaaaagaaagctttgggcttgtacttttagaagctatggcttgtggtgttccatgcatcggaacaaatataggcggaatacccgaagtaattgaacacgaaaaaacaggatatatttgcgaagtaggagacgtcgaagaagcagcgagcaaagcaattcagctacttgaaaatgaacagctgcatcaccaaatgagggaagcgtctctaagcgcagttaatcataaatttcattcaacagagattgtgagtcaatatgaaaaactttattataaattggtacagggttgaagaatggaggaagttatgaaagaaccgttcattcatccgctttatattattgaaaaactggagacagccggttacgaagcgtattttgttggaggagcggtccgggatctcattttaaatcggacgattggagatattgatatcgctacgtcagctaggccagaacaagtgatggaactctttcctaagacgattcatgtaggaatcgagcatggtacggttgtcgttgtccatgagaacgagacctatgaggtaaccacttttcgctctgagggagaatatgatgattttcgtcgtccctcgtccgttacgtttatttcgtctctgatagaagatttgcagcgtcgcgattttacaatcaatgcaatggctatgaatgcaaaaggagaaatcattgatccatttaatggaagagaagatttgcgaaaccagttaattcgcactgtcggaaatgctaaagaacgctttcatgaagatgctcttcgtatgatgagagccgttcgctttgtcagtcagctggcgttttcgctgtctgatcaaactaaaagagccattcagcaatacggtgaactgctgaggcatgtttctattgaacggattacagttgaattcgaaaaaatgctgagcggaaagcgtccgtctttagcattagcacttgtagcagatacggagctgtatcgctacttgccccaattgaatgtagatccgcaaaaattccgatctgtttgtgcacacgattggatgatgcttcagcgagtatcggagtcatggacacttctggtacatctactcgacattcaagacaagcaggcattttttaaaagctggaaattatctaataagcaaattaaagatattcagcttcagtctattggtcttcgagacgttttggaaaatggatggtcaaaacgcattatgtatacaattggagagcaggccagcgtaagcgtgaatcgtattttacaacttcttcgaagcaatgagtatatgaatgaacatgagcttctttacatctatagcgagctgcctattcattctttaaaagatttagatataaatggtcaagatcttttagtgtggacaggtaaaaagggtggtccatgggtgtctcaactgttaaaagaaattgaggagaaagttctatacaatgagttaatgaacacgaaatcttcaataagaaagtgggtgcagtcttgcagtcagatataagaagaacgctgcttgaaatgtttacgaacgcagatggggactatgtgtccggccaaaagatcagcgatttattaggctgttcaagaacagctgtatggaagcatatcgaagagctgcgaaaagacggctatgaacttgaagctgttcgtaaaaaaggctatcgcattgttgggaagccgaacaaagtaagcagcaacgagcttttgttagggctccaaacaacaaaaatcggtcagtatattcattatgaggaaagcgtgcattctactcagaaaattgctcatcgaattgctcaagaaggagcaaaagaaggaacggttgtagttgctgaagagcaaacagcagggagaggaagacttgatagagcatggtattccccaaaatatactggtgcctggatgagtattatattgcgtccttctatccctccgcagcaggctccgcagctgactctactatcagcagtggctgttgtacaggccattcaagaagtgacgaacctttctccagacattaaatggcctaatgatgttttattaaatgggaagaagctagttgggattttaacagaaatgcaggctgattttgaccggattcattcggtcatcattggaattggcattaatgtgaatcagcaggaaacggattttaatgaacaaatcaaacacattgccacatctttacgtattgaaaaaggtgaagaaattaatcgtgcggctttgatgcaagcgtttttcttaaagttagaaaccctttacgaagaatacttaaaaaatggctttggtttaattaaagttctttgggaaacgtatgcgatcagtattggcaagcgaattatagcacgcacgatgacagccaacattgaaggctttgcaaaaggtataacggatgaaggcgttttattgattgaagatgatgaaggagttatacaccgaattcattctgcagatattgagctctctgctaaaaaatagtagaaaaataaagaaatttttattataatacgagtatcaaggtagtatcgcaagaacttcacttgatactcgtttgtttatttttaatacgacaataaatctgccttgatccattaaggactaggacagagggatgacgcgtaggtaagcacattaggtaaagtgtgctttttatagataaagtctgtcaaagtccttcttccttttataggtagaaggactttttgtgtgcagacgtgcgctcatctcctctgagaaggaggagaaagttagtgaaaacaaaattagattttttacgtatgaaacaaaacaatgaaccaattgtgatgctgactgcgtacgattatccgtcagctaagtacgctgaggaagcaggtgtagacatgattttagtaggcgattctctaggaatggtcgttttaggatatgactctaccattcctgtaacggtagatgatatgattcatcatacaaaagcggttaaaagaggatctgctgatacatttatcgtcaccgacatgccatttatgtcctatcacgtgtcgaaagaagacacgatgaaaaatgctgctcgtattatgcaggaaagcggagctcatgctttaaaagtagaaggtgcaaaggatgttctttatacaatttcagaattgacgcaagctggtattccggttgttgcacatctcgggttaactcctcagtctgtcggtgtcctgggcggttataaagtgcagggaaaagaagcgaaagaagccaaacagctaatccaagatgcgatcaagtgtgagcaggcgggagctattgctgttgtattagaatgtgttcctaaacaagtagcaaaacaagtagctgaacgcttaagcattcccacaatcggaattggagcaggagctgacacggatggtcaagtacttgtataccacgatgtattaacgtacggcgtagagcgtgtgccaaaatttgttcagtcatttgcgaaaataaatgagcctattttacaggggctttcacagtatgtaagtgaagtgaaaaaaagagagtttccgaaagaagcacatactttttcaatgaaagaagagcagttaacggcactgtacggagggaaataagatgaaagtcattacaacaattaaagacatgcagcaggagatgaaaaaagaaaagcagcttggacgttcaattggatttgtcccgacgatgggctatttgcatgaaggccacgctactttgcttggagcggctcgcacagaaaatgaagtagtggcgctaagtatttttgtgaacccgactcaatttggaccaaatgaagattttgatacgtatccaagagattttgaacgcgatgagcgcgtggcaaaagaagctaacgtcgactatttattttatccttcagtagaggaaatgtataagtcaagccgttcagttgctataaccgtgacagatcgtgtagacgtattgtgtggacagaagcgccccggccattttgacggagtagccacggtactaacaaagctttttcatattgtaacaccagatcgtgcatactttggtaaaaaagatgcacagcaagttgctgtggtagatggcttaattgaagactttaatttcccagtggagcttagagcagtagacacggtgagagaagcagatggattagctaaaagttctcgtaacgtatatttaacggataaagaaagagaagaggcacctgttttatttaagagtttacaaagcgctctgcagcttcttgaaagcggagagaagcaagtagaaatccttaaacagatcattcgaaaagaaattgagcaacatacgagcggtaaagtggattatatcgatgtttatacgtatccagagctaaaaacgattgagcaagccgctggaaaaatcattattgctttagctgttcaattctctaaagcccgtttgattgataatgtaattgtagacgtacagggggataactaaatgtttcgcacgatgatgaacgctaaaatacacagagctcatgtaactgaagccaacttaaattatgttgggagcatcactattgataaagatatcatcgacgcagtaggaatcactgcaaacgaaaaagtccaaattgtaaacaataataacggagctcgcttggaaacgtacgtgattcccggcgaacgcgggagcggcgtagtttgtttaaatggagctgctgcaagactcgtgcagcctggagatattatcatcattatctcttatgcgctcgtagccaatgaagaagtagctcaccatcgtccaaccgtagcgattatgaatgagcagaataaaatccaacaattgcttaaacaagaaccagctggtacaattctataagaacagtccccctttatgagggggatttttatttgaatacatacgctagtaagtgaacggtataaacctctatacacactaaagtaaaacttcgatgtatgaaagcctctctgtttttcacgagaaggagttgcgcttttaaagcatatagagcaggctttcactttatactataaaaagacagacttgcgaggtgttgaccgtgaataaacgctttgttgtggtagatcttgaaacgacgggacattctccaaaacaaggagataaaatgattcaatttgctgctgtcatagtagaagacggcaaaattgttgaacgtttttctagttttttaaatcctggtatggatattccgccttttattacacaactaactaacattcaaaatgatatggtgaaagatgcgcctttatttgaagaaatttcacctaaaattatagaattgctagatgatgcttattttgttgcacataatgtggcttttgatttaacttttttacaagaagaactctatcagtgcggaagggagacgctttataattcaaccgtagacaccgtcgaactggcccggattctgctgcctacagttgatgggtacaaacttagccaattagctgagtatttacatattgaacatgaaaaccctcatcaagcagatagtgatgcagaagtaacggcacgtattttactgttactaattgagaaattaaagaagctacctctaacaaccttaaagcagctgtatgcgctaagcttgcactttaaaagtgaaattggagaactgattcaacaagttatagatgataaaagttatgccgaggatgattcttatgaatttatacatgggattgcgctaaacaaatatcagccgcattcagctaatgaaaagcagcactctcatacttacgagatatttgaaactgaaaagcaaaagctgttccatcaggctctgccattgtttgaagaacgaaaagggcagtgggagatgatgaactttgtacaagagtgctttgcaggtaatgagcatgctttaattgaagccgggaccggtattggtaaaacctacgcttatttagttcctgccgtgttttatgcttctgttcatcatcacccagtcattatctcaactaatacggtaacgcttcagcagcaaatcatcgaaaaagatgtgcccattctagaaaagattgttccgtttcctgtgacggcagctgttttaaaaggaagagaacactacattagtataagaaaatttattcagctcttaaaagagcgcaataataattacgatgcgatcctcacaaaagcgaagctgcttatttggctgacggaaacggaaacgggcgatagcgatgaaataaacctgccttctggcggcaaacttttttgggaacagctaaatgaaagcaatccgtctccaagtgactttaagcatccttggaaactttattctttttatgaacgagcgcagaacagagcgcaaaatgcccatatagtagtgacaaatcatcgcttgctgttgatggatgtgatgagtaatcatgagctgctgcctgagtatgaacagattattattgacgaggctcatcacttagaagacattgctggagaagagctgggggagcgcttagattattttgcggttcatgcgctattaaaccgaatcggaaccattcaagacaaagggctgttaaaaaaagttcatcatacgtttgtgaaatatagcatcgagcttaacactgaacttcttcaaaacctgtttgtgcagcttcattctgagtgcgatgatttatttcgtttgattcattcttttgtccaaaaaagaatcggcaatcagcagggcgagattggaagaagcagctatcgatataaagtggaaaaagagcatgggcattactggacggctattcaagaagcagcgtcgcgcattcgttttttaattcacgatctttttacatggaatgatggggcaagacattcctttgacgaactatatgacaaagtcacaaaaaatgaacagtcgtctcttcatgaatttcaaactgctgttaaaggatttgaacacatatctcagcaaatagaaaagcttttgttcaaacagcagagtcatcacgtaacgtggtttgagattgaaccaaaaggagcagcgaatgctacgtatatctatagtcagcctacctccattgccgatacgctggctgatgaatttttcgctaagaaacaaagcgttattttaacatcggctacattgacggtgaatggaacatttgattatttaattcaagagctagggttatatgactttcagcctgctcaactcattctcccttccgagtttgattatgagaagcaagctagagtctatattcctcaagatatgcctgctgttaacgaagtatcattatatgagtatagcgctatgatggcagaaagtattcttgacgtagctaaagtaacaaatggtcgtatgctggtgctttttacttcatacgacatgttgaaagctacgtatggttatttaaaagagttaaacgaccttgaagaatttgtactgctcggtcaaggagtcacaactagaaatcgtaatagactattaaaagacttcagccagtttgagcattccattctattaggtacaaacagcctgtgggaaggaattgatctgccaggaaatttattatcatgtctcgtaattgtcagacttcctttttcatctccaaatcaacctctgctgacagctaaatttgagcagatgaaaaaagaagggaaaagtccttttatgaattattcacttcctcaggccgttatccgttttaaacaaggatttggacggttgattcgttcaaaaagtgaccgaggagctatatttatttttgataatcgtattacgcgaacagcatatgggtaccatttccttcattcacttccaaaagtccaggttgttcaaaaaacgttttcgaatatcttactggactacaaagaatggtggaatgaaaagacttgagcatacgcttaagtctttttttatgcatactgtttcttcagttgagagacgatagtaatatactatgataagcaaatgaggacagtgtatgattaaaatattaataagtgctgtactgttttttagttttatgaactgttcggtttcagcagccgtcattaaaaacgtagattttggtttacaagctgatgaagtagtgatcacctttctacctctttcagctggagaagcgagtctgattcaagacggaagcggtgagattattttgataaataccgggaatgcatcttcctatcccgagctaaagaagtggttgaagcgatataaagtaaaaaaaatcaaccaattagtgattacgaaacagcaaaagtactatgattcaaatgttcagcgagctatgaatgattatcatatagagcgtattattgtccctgctcagtaccaggcggaatttcaaacagagaagtggaaagaaagtgatttatttcagttaacaaataatatacacgttgatgtcttgcatgcatcgaagcaaaaaacagcggctatggatctattgtttacgatcggagaacatcggattctatatgcaatgagcagctcagatgaagtagaagaaaagtttttacgcattcctcttacccatgtagatgtattgaaaattcctaattttggagagggaacgtttttttcgaatgcatttttgaagcaattagatacacagcttgcggttgcgtttacgaaaccaggccgttcctattcccctcgactgctttcaaatttaacagctgaatggattgaattatatgacgtaagggaggggagcgcttactctattaaaatgtcgctaaaatcctatgatgtgatgaaattttctgcaaaataaacaaatttccttttgcaaaaagaggtaaattccttataatattatatatgtttacttatttattcggtttttacgcaaaacgtacagattggattgatgagtgaaaaagatgacgatggtttttgatacctgttataatacgaatatcgtcatttttgcgtcgtgatagacgagctaggaggtttacaatggaaagtaggattgaagtattatcaactgtccgcgtggaaaattcctcggatttatataaaattgttgatagtttgaatcgcacgttgaaaaagcaagatttgatgttcggattagcgttagatgaagaagatcaaagcaaagctgtatttacaatttatcgtacataagtagggattttatgaaaaagttaattattgtagcggtagctgctgtgcttttaattatcgggggcatttcttttagcatttatcactcgtccgtgaaggatgtgcagtctgctgaggaaaaagcagcatcccaagcaaaaaaagaatttaatttgaaatctgtcacaagcacccagccatatttcggcaatcatgcattttatgtagtagaaggtacaaaccgaagcaatcaaaaggtaattgcttggatgcctaaaagcaaaaaacaaacagctgttttaaagaaagcaagcagcgggatcacaaaagagaaagccatttccattgtgaaaaatgataaaaacccgcaggaaattaagtcggtgcgcctaggcattgaaaataaaaagccgctgtgggaagtaacatatgtggataaagataagaaacatttaacatactattatcttgatttctctagcggtgaatttataaaacgatacagcttatctcaatcataaatcgtttataccatatgaaataccatatgtgtcataatataagatttcagcgctttatgaaaatgaagccaattttttatctataatcagcccgcgggctgattatagctttagttcatagggggagattttagtgaagttagcaaaacgtgtatcagcattaacgccatcatcaacattagcgattacagcaaaagcgaaagaattgaaagcggctggtcatgatgtgattggacttggagcaggggaacctgattttaatacgccgcagcatattttagaagcggctgtcacagcaatgaatgatggtcagacaaaatatacgcctgcaggcggccttgcaccattaaaagaagcggtaattgaaaaattcaaacgcgaccaaggcctgacgtattcaccttctgaaattattgtttgtacaggtgctaagcacgcactgtatacgttatttcaagtcctgttagacgaaggtgacgaagtgattatcccaactccttactgggtaagttatcctgagcaagtaaagttagcagaaggtacaccagtattcgttgaaggttctgaaaataacgaatttaaaatcacacctgaacaattagaagcggctattactgctaaaaccaaagctgttattatcaattcaccaagcaacccaacaggtatgatttacacaagagaagagctacaagctttaggagaagtttgcttgaagcacgatatttttatcgtatcagatgaaatttatgaaaagcttgtgtatggtcaaaatgaacatgtatcgattgctcagctttcaccagcgttaaaagaaaaaacaattatcattaacggtgtttctaagtcacattccatgacgggctggcgcattggatatgcagctggtgatgctacagttattaaagcgatgacaaacctagcgagtcacagcacgtcaaatccaacatctattgctcaatatgcaacaatcgctgcttataacggcactcaggagccagtgaaaatgatgcgacaagcttttgaagagcgtctaaacgtaattcatgaaaagctgattaacattccagggttctcatgcttaaaaccacagggtgctttctacttattccctaatgcaattgaagctgcaaagttaactggttttgatacagttgatgcatgggtagaagctattttagaagaagagaaggtagcgctagtgcctggttcaggattcggttcacctgaaaatgtacgtctttcttatgctacatcactagatctgctagaaaaagcagtggaacgcatccattcatttatgactcgtcatatgaaataaaaaagcttatatttaaaaacaaaggagccttttagcacaaatcacacgtgttagaaggctctttttgtttgttacttgttattatgtttgtcgaaatgtataataggatggcatacataattacgaaatgtaagttttttggagggatattaatcgtgaaaattacgatttcagaagcaagcaagcatgtaggaaaagaagtaacaattggtgcttggttagcgaataaacgttcaagtggtaaaattgcctttttacagctgcgcgatggatcaggattcatgcaaggggtagttgtaaaagctgaagtagaagaagaaacttttaaattagctaaatctatgacgcaagaatcatcactatatgtaacaggtgtggtacgtgaagatgagcgctcaccgtttggctatgagttaacagttacaagccttgaagttattcatgaagctgttgattatccaattacgccaaaagaacatggaacagagttcttaatggataaccgtcatttatggctccgttctaaacgtcaacatgctgttatgaaggttcgtaacgaaattattcgtgcaacgtacgaattctttaacgaaaacgggtttacaaaagtagatcctccaatcctaacaggaagtgctcctgaaggaacaacagaattattccacacgaaatattttgacgaagatgcatacctttctcaaagtggacagctttatatggaagcagcggcaatggcgcttggaaaagtattttcatttggtccaacgttccgcgctgaaaaatctaaaacacgccgtcatttaattgagttttggatgattgaaccagagatggctttctaccaattcgaagataacttgaaagtacaggaagagtatgtgtctcatgtcgtacagtctgttttaacaaactgtaagttagagttaaatgtactaggccgtgatacatctaagttagaacaaattaaagcgccattccctcgtatttcgtacgatgaggctcttaaattcttacatgaaaaaggatttacagacattcagtggggagatgactttggagcaccgcatgaaacggctatcgcagaaagctatgacaagccggtattcattacacactatccaacgtcattaaaaccattttatatgcagccagatccaacaaatgaagacgtagtattatgcgcagacttaatcgcaccagaaggctacggagaaatcattggaggctctgaacgtattcatgatcaagagcttttagctcagcgtgtagaagagcacaaattagatactgaaacgtataagtggtatttagagcttcgtaagtatggctcagttccacattcaggatttggtttaggccttgagcgtacggtagcatggattagcggcgtagaacacgttcgtgaaacgattccattcccacgcttattaaaccgtctatacccgtaaggaagtgaaaaaagtattctgactcttgtagtcaggatacttttttagctttttttatgaatcataaaaagaaaagaaaaacgaggcttttacttatatcataaggaaacaaaggcaaacatagaaaagagtctaacttaaaagggagttgcaattctcgaaaaaataagttagtgtaatattcttggaaggaagtcatcgttcgtatatattttatatgtgcagagcaatggtacggtttcagcggaaagttttacatagaagcttttttagcttcgaataattattactttgactataaacttcatgatatactaactactgaggtgttcggatatgaaaaaagaaacgttaattgaatggtttgaacaaggcacagtttcaattccgaagctgctgtttaatcactatagcgatttgggaatgaacgaaacggaattcatgacgttaatgcatatttatgtttccattgaaggcggtgaaggtttcccgacacctaacgaattggcggcaaaaatgagtatttcaagtgctgtctgtatggatacgctgcgagcattaattcagcgcggctttttatctattgagcaagatcaacagcaaaacgcccttatttgtgaacgttattcattaaaaccgctttgggaaaagcttattcatcatatgatgcaagaaacaagagaagtagaaaaaagtgaagaagaacaagaagagcttaatttatatacaatgtttgaaaaagagttcggcagagcattgtctccgtttgaatgcgaaacgctagcgatgtggattgatcaagatcatcatgatcccattattattaaagcggcactaagagagtcggtgatgtctggaaaattaaacttccggtatattgatcgtattttatttgaatggaagaaaaatggtattcagaccattgatcaagcccgcaagcatagccaaaaatttcgtcaaaatcaacagcccaaaaaactgtcttctgttaacccttctcagtctacatcagccattcctttttttaactggctagagcaatgacaggataaaaagctgcttcaagatccaagtaattgaatcttgaagcagcttttttaaaagaatatggacaaaagtagcatttgacaggaaccctattgtaaaataggagggaactacctgtaagaagaaggagaactagtatgttaacgttaaaacaaatcagacagtgcctagatgctatggcggaaatgtttcctgacgcccactgtgagttaaatcatcggaatccctttgatttagtcattgctgtggcgctatctgctcagtgcacagatgctctagtcaaccgcgtaacagcggatttattcaagaaatatcaaacgcctgaagactatttagccgtttcgttagaagagctgcagcgagatattagatcaatcggcttatatagaaacaaagctaaaaatattcaaaagctctgccgtatgctcattgatgaatacggaggagaagttccaacagatcgtgatgagctgaccaatcttccaggagtagggcgtaagacggctaatgttgttgtatccgtagcttttggagtaccgtcaatagcagtagatacgcatgtagaacgtgtaagtaaacgccttgggatttgcaggtggaaagattccgttttggaagtagaaaaaacgctaatgagaaaagttccaaaagatgaatggtcagttacgcatcatcgacttatcttttttggacgctatcactgtaaagcacagtctcctcaatgtcatgtctgcccgcttctggatctttgccgagaaggaaagaaacgaatgaaaggaaaagagaagaagacagatgttaccgattgaagtgccgtcacatttcatatgcgaaccattctattcaaaagaaaattgggttcttgaagtagatggaaaaaatgggagaaattattttgcttatgatattttatacgatgtacataaagaaacgaaaacaccttggagggatgttcaaaagaacatacggccattttttgaaaagtgggaaacacaaagggaagaactgtacatgcttttttctcagcgaaaagcaaaagaagcagccccttgtatgaaacaagctgctgctatgtatattagtttattgttttggattaatggacagcccgttcggcgtttaaatcggctgcaagaagacatagcggacctaacctataagcctattaactgtgctgagagacttatgtttttactgcagcgagtttcttcttatcaagcgtatattcagctgacagaattatttaatgagctgcgtaagcagtatgcaaaaatgcttattcttcacaagaaataaagcccctacaagtgtaggggcttttttctgctacgttaattttcaattgttggctcttgctgcggtgtagcaggtgttgccggcgtcgatggtgtagcaggggtttgtggtgtttgacttcctgagtcacttccaccgttgtctgctggaggagttgttgtgcctccgttattactattgttgccgctattaccatcgttagcattgccgctatcattattgttattatcggtattgccgctattgttaccgccgttattgctgccgttattgctgccgttattgctgccgttattgctgccgttattgctgccgttattgctgccattattgctgttttggttatcatccggctgagtagatgaatcgtcaccttgatcagagccgttgttttgatcagtgttgctattgtcttcattttgattatcgtccgttgttccgtcatcttcaggcttagtagaatcatcttcggtagcttgatctgatgaatcagggacctttacagaagaactagcgctttcgcccgtatttgttgttacggtaaaactatacgttgcgcctggtgctgggctggaaattgtttttccaccggctcctgcgccagatgcgagttgttcagaaccattaggagatgacattgtgactgtaaaggtcgtatcactggctgcgtttgacgctgaccagttaactgaaattgctcctccgctatacgaagcagtaatttttggcttcacatctttattgtcttttttctcttttttgtcctcttttttatcttctttcttttcttctttttctttcttcacaaacgtttgagatacttttgtcggtgcagtaccgcgcacaaagtattctttagtaattaagctcgaaggagtagagccgcttgggcgttttaagtctttgcccgttggtttttccacggaacgttcaactacgctgtccggctgcttgaaacttcctttaggtttgccttcagaaatatgagtaataacatgcttaaagatattttttgccatgcctgtttcattagcacttaaaatatagccgtctttagcagtttcatagcctgtccatacggaaatcgtatagtttggcgtaaacccattaaaccaaacgtctttttcaccagcgtctggaatattgtatcgttgcttttctgcagcactaaagttcgaagttcctgttttacccgcaatttctaatcctggtgtacgaacagcacgagctgtaccatatgattcgtttacaacagatttcatcatgtccgtcatcataaatgccgtgtaatcttgcattgcgcgttttggttttggggttaaatcaatttctgttccatcagggaattttacctttgtcactgtatgcggtgcgttgtacataccttcatttgcaaacgcactataggctccagccatttgtagcggtgtaacacctgtacggaagcctccgatagaataagattcagaataagcttcgccgtcttcttcgtctaattttagcccaaggcccgtagcaaactcttttgctttgtctgccccggttgcttgaaacgcttttaaagcagggatgttcagtgagcgtcctaaagcttcacgcgctgaaacccaccctttataattgcgtccaaaatttcggattggcgtgccgtttgaataatgatattcttcatcttttatcggttgtccagtggaccactttaagttctcaatcgctgggccgtaatctaagatcggcttaattgttgagccgggctggcgtctcatatttgttgcaaagtttaagccgcctgacacacgattacgtccgcctccaattgcttgaataccgcctgtttcattatctacaacgacaagacctgcttggaatttatcgttcgggaagttgactactttgttattcatcacatcatccacatagtcctgagcattagtgtcaagcgttgtataaatttctaagcccgcagaaaatggatctgcgtctgttttcttttttacttcttcgattacttggtcaataaatacatcgtacttagatgttgattcagtttgtttagctaagtgagcctgtacatctacttgttttgctttgtcggcctcggcttgtgtaatgaagccgtttttagccattaagtttaatactgtgttacggcgtttagtagcattctctgggtttgtaactgggttataagtagttggcgcttttggtaagcctgccaacatagcagcttcatcaagagttaaatcttttacgcttttaactccgtaaaatttctcagctgctcgttcaataccgtatacttcacctgatgcgaaatatattttgtttaaatacatttcaagaatttgttgcttggaatatttacgctcaagctggtaagctaaccacatttcttgtactttacgtttaaccgtcttctttggtgataagaacgaattctttaccacttgctgagtaatcgtactaccgccttcagcaccgaagccgtttttaaagttcgccattaatgctccgccaattcggtaaaagtcgacgccgtgatgtttataaaaacgaacgtcttccgtagcgataaatgcgtttttgacgacttgagggatttcatcgtattgcacatatgtacgtttttgagctccaatttcttttacaactgtctttccatcgtttgcatatactttagatgaaaaagagttttttaataccgagtcatcaacttttggagcatcgcttatcatagcaaaaaaagttcccactccggcaatgagcccgatgattcctatcagtaaaactgcggcaacaattttacgaaataggcctccttttttcttctttttcggtttcccttgagatttaccttctggtttgttgtcattcatagctcttcgtcgttcttcacgagagcgataattatctgacataaaaactcctacctttcaacgcattgtaagagaatgatttccgtaaacatatatatcatactcttaaaagtataatttatctatagtttttatgtaatcgattctcggatggtaaccaagttcgatgaaatgtccttttttttcaatatctgccttagggattgattttcgtccattttttttcatggcatcccaataaggaaaaaggaactgtgcttcgaacaagtatatttcttgtaaagtagagaacattaatataacgaaacaaaccccgttttgtttcacaatttgcttcatatgttcaatttgatgttcatgaaaattacgcagcggaaatgaggttttatttctcgtttcttttgcttcaaagtcaaggtgttttcctttatagactccattatagtctgtagtagaagcctgtttaaaataagcttctttgataacagcggcacttctcttcggatagtctacttttacaatttgaacaggggttggttttttgtgaacaatggctattccttttgaaacatagtattcgtttgtttcgtttaaatcgtcctccagcgtcataccacgattgctatagctagcttctagctttttaggggaaggactgctggtattcaatggcttataggcctttccgttaggatagcgaatcataaccatcactcctttagtgtaaatctattaaacaaacaaattctattataccaaatcctacaaataaaaatagatgaaagaagatgaagagatgtcactcaattgttcggaacaagcgctgttgacagcgattaaaaaaacaacagacaagctgaatattgataatatatcaagaacccaggcttatgcaactttttatcatagatatcctgaagtaaggtgggcatttctcgcaagtatggtatcacgaaacgcagggtggaatatgtgtgatttgcaagggaaaaacatgaaaaaagcgttatcaaagcaaacacgcgatttattatttttgacgtatgaaagagcaaattggcttatttttaaagatgccttcccgcaattactattgtatgctgtttcgcgtaaaaaacatgtctcttatattcatttacttccctatttaaatgtttcgtcttttatcgaagagaagtggaggcaatttatgcggaaaccttgtgaactgcagcttattcatgcgttaattgtgaatgagcagcatgttattcaacagcccgttattgaacagcctttttatcaagatagagtgtttaaaagtacgctgtttttttttcaagatatattccactttagttccgtcctttttcctactacaaaaggggagctatacggttgttccgttcatgattttacaaaagtaaataatcggattgatttggggaagaaattagcggctttattatttcatgaaaagtattatcccttgttttatgaattttctttaaaaacaaagcatacgggttcgagatacgattatgagcagtattttgtgaatgaaaccagttgccgtacacctgctctgcgaatggtgtatccggctattagacatcatgaaaagaagagagaaaagtggtttttaacgaaaaaagaggaacgaaagcttatgaaaaagccgccttttccaaaaaaagttcattttacaaagtggtatcttcaaaagcaaaagcagctgtatatattaatgaaagtagcgcaagtatttaatgtaaataaaaacggtcacaagtgaccgttttgttcttaagtagaaggctggttaggaccgtttaactttttaggatcaccgtaggtttttgtttcaggcttatttttaggctgtgatttttgctgtttgttggccatatctaggcacctcctatcatgttgtaataaacgttcagcagcggaatgtatctgcttagctgaaatgtctatactagtgttttcaatatgctcactttcgattcaccataaatgaaaatgtcgaaaacatctttctttgacgaatagaaactagttttgtcatgtgtgaagggacaatgaagaaaagagagaatacgttatgcaaaggaaaatttggagggatggcgatgaaacaaagtatggttaaaacaagcgaaatgatgactttattagatagcttactagagcaagtagatttagtggataaaacgatgtctacatctataaatgaagcatttacacattgtgaagaaacatatatggaacaagttcatcgcattgaccaatcactgcaagaaattgaagtagctgtgtacgaaagcatgccttccgaaacagaatggagtagaacccgaagagaaatggttcttcatacagtataaagattgtttatgttacaatagtcatcgtagaggtgacgaataacgatgaatgaagatgtgaaaaaaagtacggagatcatgtttcaatataatgaagtagcggtagaacgattagcgtctattcaacaggaagaaaattatgaagtgaaattctttgaagaagtaaagccttatggagatattttcttcaaagaacttgatgaatgggctagtctcgtaacggaatggctgaagaaagagcgaccaaaatatattcatgtgaatcaggtagagacgttaaaagaaaatttacaaaacgttgtactacagtcattttatcccgagacgcgagaaaagcgatttaaaaagatgtatcactcaaataagtatgtgctcgagtcgatattgaataattaatcccggccttccgttaagatctacaaggtggggattttctatgtatgcctaaagagaaaactctttaggcattttatcattatcaataaaaagttaatcaaaatctttttgagattggatagaaacagctgggtgatcttgtgaagctactgtatcgatatgataatcaactttttcagtatgtttagaagcaacggcgttatttgttttagttactgcgctttgtccttgctttttatgatcaaaatgttttccgcgactcatgagatagacctcctttattgaatactacgttaaagcttttatagtataaacaagtcaaaaaagaagtatgtgtccactttacaggaaacaaagaaaccaccgatttctcggtggtagtaaaaaaattaatcatcttgtgcactaaaatcgggcttagtagctccaatttgttcgagttcacgtacagcggctttgtaattcataggagttaaaaaaccttttaaatactgctgctgagcaaaatcgagtaattcattacttgactgcggctcatactgtttcaccgcaataaaagcttcttgaagttcgttcacatacatgtaaattccctcctaatccccatttgtgccactacgtatcgtagtatcacttgttcttatcgtaccatatatttaaataatctcgtttttttgaaaaatttaaactttcgacagaaacctacatatttttgaatgtgttttccaaaagtacaagtagacgaacgtcacctcttatttctgcatacatactatatattatgtaatattaaaaaggaggtattgattttgcatgtatacaagtaagcattatccgtattatgagcaacatcaaccagaacgttttgatttaagtcaggtacatccatttccgcagtatcatcagcagccatggacggaagcttatatgccgcaacatccgtacgctcagcaacaaatgccttttggtcctcagcaaattccctatatgaacggaatgtaccagcagcccctgtacaataatgcaggtgcgccttttaatccataccctaaagctcagcaacaaaagcctcagccttctcaatttcagtcattaatgtctcagtttaaatcgagtgatggcaattacgatatgaacaagatgatgaatactgcggggcagatgatgggagccatgaaccaattaacatccctagtaaaagggttttccgggattttcaaagtataaggactagaaggtgttttctagtccctgcttattattttttcttttgatttttcaaataggtttctccaagaagtgtaaatacttcattgtaagttaatccagactgagcatttaaacgtttgacttcttcgacatctgttgttgatgaagttgaaatttgatgcttgctttttttcataaaacctctccttccctatgtaaaatgaataacatcccatcttagtatatttccaaatgtgccccttctataagtggaaaaaaacgccgaagacactcatggttcttcggcttttttttgcaataaagatgagtggttagagaaattaagaacggcgagagcgacgagaagaacggcgggtactgcgggaagaacggcgagagcgacgagaagaacggcgggtactgcgggaagaacggcgagtactgcgggaagaacggcgagagcgacgagaagagcggcgagtactgcgggaagaacggcgggtactgcgggaagaacggcgagagcgacgagaagagcggcgagtactgcgggaagaacggcgagagcgacgagaagaacggcgggtactgcgggaagaacggcgagagcgacgagaagaacggcgagtactgcgggaagaacggcgagagcgacgagaagaacggcgagtactgcgggaagaacggtgagtactgcgggaagagcggcgagtttcacgagaagaacggcgggtactgcgggaagaacggcgagtttcacgagaagaacggcgggtactgcgagaagaacgccgacgtcttgtcaaagggccggcagtcggctcttgaaacatgaaagattttaattctgtacactctagggcttctgcagcctctttaattttttgagctgtaatatgcaattaaaaaacctcctatatattggactaggtattgtcttaataggatacgctgcagtactgaattttgatataaggcaaaagtggaatttacataaatagttgataggatgaggtgtcatggcgaatttgaggttcatataatttattaattgaagaaaggtggtcaagtaatgaaacaaaaagaaattcctcaatacgctttgtttgtaaatgtaaaagatttaaaagaaatgcatagagacatttggtcagaagaagtcgttcaggcaacgatgaaatttaacaaaaagcgctacgatattgatttgttgctaagaggctcacatattcggaagatgaagaaaaagtcatattatattgaattttattccccaaaaatctttcagcattctaaagaaatacatttgaacgctgaatacaaagatccatcccttatgcgcaacaaattgtcccttgattttttctctaacttggatgttttgtctcctcaatctcagtttgttacccttacgattaatgggaaaaacgaaggggtatatcttcagcttgaatctgtcgacgaactattcttgaaaaaaagaaatttgtcagatggctccatcttttatgcagtggatggggatgctaatttttctttaatgagtgatttggataaaaagccgaaaacttccttgttatcaggttatgaagataaagtagtgaagcaaggggatgaggaaaaattagaacagtttatatttaatcttaatacatggacaaatacagaattcgaacagaatattgagaagtacctaaacgtcgaccgctacttgtcttggttagtgggtattatttgtatgcaaaattatgacggttttgtccataactatgctctctatcgaaaccatgacagtggacgctttgaactgattccatgggattatgatgcgacttggggaagggatgtaaatggaaaagtaatggaaggagattacgtccgtgcacaaggattcaacacgcttacagctcgtttgttggcagtagatggaattaaaaagcgttatattaaaaagatgaacaatgttctaaataatcaatttacagtggaatatatgcagcccatcgtctatcaaatgcacgaagagcttaagccttatattttgaaagatccttatgtaaaaaacaatatagcacaattttatgaggagccggcatttattttatcctttataaaagaccgcacagcatatattaaaaataatcttcttgctttttagataccataggatgtaggcagaagtggaatttgttaataataggcaaatgtacgaaatcaatagctgtacatgatacgtatatatacagtatgaatgaccaatatggatgactaacaaggaggaaaaagaatggaaaactattattattattattatgggcaaaatcaaggtcaaaattcaaatccaaaccgaaaacgcagccaaagcaaaaatgcaaatcgacctgataaaggctattcttcgcagtttaaagctttaaaaggaagaatggtgactgtttatcgaggaggtcctgaatcaaaaacaggttatttacttgatgttcagtctgattatttaatattagcagtagaaaacgataacaataataacaatgatgaaaataataatgagggagatagcaaccaaaataatcaaaacaaccaaaataaccaaaataaccaaaataatcaacaagaatatactgttgtatattatcatttatcccatgttaagagtattacggaagatgctatgtcaaattcagcacagacgtttaccgggtttgataatgagggtactttagagttgtatagaggtaagacatttgctagtactttatcattactgaaaagtaaatatgttcaaataaatcaaggcggtcctgagaaaaaagcaggccagctacttgacgtattaggttcttcagagtctgcttacctcgtattactatcggaagatgatggtgttgtctatatcaatgttgaacatgtaaaaagtataagtgaatatcaaaatgataatgacaataataacaataataaaaatcaaatgaataatcaatttgctacaaatcaggaaccgacttatatgaaatcaaaaaactttaataatttatttactcatctatcacacaaatgggtatcgatcaatggcggcggtccagaagctgtagaaggtgtattggtgcaaagtcggaatggcacttttacccttgttcaggacaatcaagtattacgcttacaaccaagacatgttaaaaccatttgtgtaggagcaaaaggatcttttaaacaaaataataatcaagatgatgagcagaaagaggaaaatacaaatactgaagacggagggtcaacagaaggggttccagaaggtcgtacaggaagaaaccgcagcactggttcgtactcgtcaagaaaaagccgccgcacagattcacaatcgtcagcgtcaagagagcaagtcatccaaacaaagaattatcgttggaaagcataatgaataagaacaaaaaaggtgcttataaagcaccttttctgtcatataggaaagagggaggagaatgagtataaatcattatattaataagattgtagaagtagatatttcgggaaaaactaagtttattggcagacttgttgacctagggttagatgtcatgattttgtataatggacatgattatttgtatattcctcttttacacatgcatcgtttgcgagaagtatcagaagaagactatacagttttacgtgaaatagaagagaacttaatagaagaaagtcagcggatttcctatcgtaatattttacagcaggcaaaagggaaatttattgaaatttatgtaacaggaggaaaatcattgcatgggtatattacaagcgtgctcaatgactatcttgtgttttattctcccgtgtataaaaatgtctttgtttctctgcatcatttgaaatggcttaccccttacagtaatgagttaaccccttattctttaagtgacaaagagctcccagtaaggcccgcctctgcaccttttgtcagaaactttgaagagcagcttaaaaaatatgaaaatcaactggtcgtattagatttaggggatcaatcagaaaaaattggcgtacttaaagaagtttctaataatattgttgaactaattacggcaaatggagaaagtatgtattggaagttagctcacgtaaaatccgtgcacttgccttagaaaaagagacctcactgtcgtctctttttttatgtgcttatcaggacaagtttattgaataaacaaatgagatgatttaaattttttagaaaattatgttgacaataaagaaaatctttattaaagttattaacaacaaacgttaaccaacaacaattatatagaactcttatcaagagtggcggagggactggccctgcgatgcccggcaaccatcaaatgaaatattcatttgaacggtgctaattcctgtggaacatcagtattgttctaacagatgagagaaatcgtgtataaacgaacactcttccatctgtgaagagtgttttttattttgagttaaggggagaaatagatgaaaattgaaactttattagttcgttcaggagtaggccgtgacccttcaacaggttccattacaacacccatttaccaagcatcaacatttgctcatcctgctttagggcaaagtacaggatttgactatgcacgtacggcaaaccctactcgtacagcattggaagaagcaattgctgctttagaaaaaggagaagtgggagtagcattcgcttcaggaatggcgggtgtaatggcagttttagcactatttaaaaacggagatcatttaattgtatctgaggatttatatggaggaacgtaccgagtactaaatgaaatcttttcagagcaaggaattactgtttcatatgtcaacacagctcatcttgatcaagtaaaagatgtgcttcgtcccaacacgaaagctttatttattgaaacacctacaaatccaatgatgcacgtgactgatttgccagaagcaattgcattagctaaacagcatgatttgcttactatcgttgacaatacattcatgtccccttactatcagcgtcctttagagcttggagcagatattgtgatacatagtgcgagcaaatacattgggggtcataatgatgtagttgctggtcttgtagtggctcgatgtagtagcttaggagagaaaattcgtttttatcaaaatgcagctggggcgatcttaggtccacaagatagctggttgttattacgcggtgttaagacgctagcgcttcgtatggaaaagcataacgaaaacgcactgaaaattgcaaattggcttactgctcatgatcttgtggaaaaagtatattaccctggccttgaaacacatccaggctatgaaatcatgaagaaacaatcgactggatttggaggcatgatttcttttgctgtctcacaccctgacatcgtgtcagtacttttagaaaatgtcaaagttattacatttgcagaaagcttaggaggcgtggaaagtttaatgacattcccagctcgtcaaacacacgctgatattccggaggaaattcgaaatcgtgtcggagtaacaaactgtttactgcgattatcagttggaattgagcacgcagatgatttaattaaagatttgaaggaggcatttgatgcataccaacaataataaacatagatttggtacgaacttaattcatgcaaatacaggaattgacggtcattttggagcggttaacgtacctatttatcaggtatctacatttaaccaagaagatgagacgaacaacggccgctatgactattctcgttcaggaaatccaactcgtgaggctttagaaaacaccattgctcagctagaaaatggatacgctggttttgctttttcatcaggcatggctgctatctcatcggtgttatctatttttgaatcaggggatgaaattttagtttcacatgatacgtacggcgggacatatcgtgtattaacacgattattttcaaagtttggtatcaaaacaacttttgttgatacaacgaaggttgagaaaatagaagaagctatcacaaaagatacgaaggctatttatatcgaaagcccttcaaatccatttttacaggtaacggatattaaagcagtagcaagtttggcgaaggagagcaatctccttacaattgtggataacacgtttttaacaccttatctacagcagccgattgaccttggtgtaaatattgtgattcatagtgctacaaaatatatcagcggtcacagtgacgtcattggcggtctagttgtggtaagcgatgaaaagctagcagaagaagtaaagtttgtacaaaatgcttttggtgctatcttaggaccgcaggattgttttttactgcttcgaggaattaagacattaaaagttcgtttagatcagcagttaaaaacagcgctgcagtttgcaaagtggcttgaaaaacaatctctagtgagccgtgtatactacccaggcttaaaaagtcacccagaccacaaactgatttcagaacaagcaaatggatacggagctatgatttctttccaagtacaggatgaaaaagtagcacgacatattttacaaggagtcaaattggcttcaattggcgttagtctaggtgcagttgaatccattctaacgcatcctgcaacaatgtctcatgcaagtatcccaaaagaagtgcgtgaagaaaaaggaattactgattcacttcttcgcctttcagtagggttagaggaattcgaggatttgaagcaagactttaacgctgtttttcaaagcttagaagaaaaggcgttaattaaataaaaaaaggacttccatcaaggaagtcctttttactgttatatacagctatctaaaaggtttgtgtatagggacgtaagcgcaactttttcatcagaggaaagactgctgtttagaattctttttatgccaagatgatattttacatacggtgtttgccggacgcgtggatgagtcatttcatcttttaaatctttcagaatggcttcgtgaagctgatcttcacttgtcatggcttgtttagaagcgaacgaacggttcaaccatagggtttgataagctgctagtaaatgttcagaagtcattgtgcaaagagctcctttagattagtttcttcattataataatctatagtttaccataagtattaatacgtgtacgtaacttttacagaagcagatacagtcaaggactgagcttgaatagggggagaggctgctaataacttaggcgaggacccagatgactgatagacggggccttcttcaattaaaatggggatttggttaataggaagctgcagcgtgttggcaatggtaaaagccttttctttagcgttaagcaaagctttacttatcgcttcttgttcatatttatcatcatttgtaacgtggaattgaagatcttgcgctatgttggctccgcttgaaaaagtagcgttatagacatcgccagcttgttttacatcttgtactcttactctaaataagtgctgtacttcgtatcctgtaagagtcgattttccatcactgtaatcatatttaggatttatggtgaacgaagctgtttcaatttgctggtcattgattccaagtttttttatctcttgcagcagagtatttgaaacagctgaattttcttttaaggcttcttgaacgtctcggttttccgtgcgcgttccaatcgtcatggaaatttcatttggaactgctgaaacacttccttcaccaattactttaatttctctattttgtgtatctacgcgcagttgctgtgtaggttcataagggaaataagaatgttgcataccaaaaacctcctttattgatctttagtatatatatgataagaaaaggagattaaaaacaaaaagagattgagacataactaaatcaaccgctagaagcacctacatacatgaaacctacattcaccataccaataaaaaaatccgaacgaatttgattcttcatcaagaatcaaattcgttcggatcttccttcaactaacatacttttcttcagcttctttttgtttatttcgattcttttattaagatttctttcatttcaatgaattgattttgaacatcgtttgacggtttctttgttagtaaacttacaataataacagctaataagcttaaaaagaacccaggaatcatttcgtaaagggcatccttcaatggagtatttacccaaattaatactgtagcagcacctacaatcatccctgcaagtgctccccatcgagtcatacgcttccagtaaagacttagtaaaatagcaggaccaaaagctgaaccaaatccagcccaagcatatccaaccagccctaaaatcgtatcactaggttttaaagaaagcaaaatgccaataattgcaacacctaaaaccgcagctcttccaaccgtcacaagctctttgtcagaggccttgcgtcggaaaaatgttttataaaagtcttctgtaacagagcttgccgttacaagcagctgagaagaaatggtactcataattgcggctagtaaagctgcatataaaaatccagtaattaacggattgaagagtatatccgcaaatttaataaaaatagtttcaggatctgctagtttcatacctgttttttctacatatgcaatcccaacaagtcctgtcagcatagcaccaataatagaaataatcatccagctcattccaatacgacgtgcgggttttaactccttaacagaagagatagccataaagcgaacgataatatgaggctgtccgaaatagccaagtccccaggctaagaaagatataatacctaaaacggtcgtacctttaaaaatgtcaaggtatgctggattaatgtcctgtacaatatctattgttgtgttaacgcctccaacatcggtgaaagctacaatgggtactaaaactaaggcaagaaacataataacaccttgaacaaaatctgttaaactaacggctaaaaatccaccgaaaagagtgtaggcaataacaacagatgctgttacaaataagccaatttgataatttacaccaaatgccgattcgaacaatcgtccgcctgataccataccagctgaagtgtaaagagtgaagaaaataaagataacaatcgctgatactgttcgaagaaccttggcatggtcgccaaagcgattttccaaaaagtccggaattgtaatggaatcattcgctacttccgtataaatgcgaagacgcggagcgaggattaaataatttaaataagcaccaatagataaacctactgcaagccataaacttgaaagacctgtcacatacatggatcccggaagacccattaacatccatccactcatatctgaagcacctgctgaaagcgcagtaacagccggacctagtccgcgtccgcctagcatgtaacccgatacgtcttgagttgtttttgtgtaagcataccatcctattccaagcattcctacaaaataaatgcccagtgaaatataaacgccaatatccaccaaatctcccctttatgcattttttatgcatgaaacaagcactgctcgccatgcaaacatcttatggtttctaaaattaacaaactttccccttactatcaacccacaaaaccgtaaattacctaagtctaaaatcccctaaacctttatattaaagaaatgaaaacgatttcaaaataaagtaaaataaaaatattcagaaacttataaacgcattttttatgcaatattttatgcaataagtaaaatgaaaagagcattttataaaatgctcttttgacattcatgtatattagattagcgtgaattcgggaacacgcgtcgaacaacttctgaaaactcgtcaaacagtccagaaactggtttacccgtttgaagcttgtctacatatccgttcatacggtttacaaagtcagggtttgttgatacaaatactcgatgaacactgccgtcggcttttctcacttcatgcgcgattttacgctccatatcttttgtgagattaccttctttgttatcgtctaatacagctgctacataagctgtatgatcagttacgattacattagcatcttttacgttttttaacgctacgatacgatcagccgctacatcggctactctcattccgccggactgattatactgttcattttcgttacgctgtacgtcttgcgtatcgtttacgtcattcattttcgttttattgttcccattttcgtatgtgacgttgcggactgtatcatcatcaatgacgccatctttaccttgatctgctgtgctgcagccgaataaagtaagggtcgtcatgcagcctataacaaacaaaaacgatttcttcataatagtatcactccttataaattttaacctttcttataatttgttaaaaacgtgtgaagcatacatgaaaaatacaaaaaagcctatactatcgaaaaaggaggaatatgtatgagtggaatccaacaaagcatatttgtgcttcatacaaaagaagaaaaccatgaagaaacaacaacgtttgcactaacttcagaagaagctaaactattatttgagaccctgcaaaataaacgaaaagaaattatcgacgcccatattgataacatgttgacgtaagaagataaatattttgcaaaacggatgagccatatgttaagaatggcccaatatttgcattctacatataggtatagtataatgtaaacgcaaccaaatttaataaatgtaatgaatactacgtttgaccatacactcgaattagatttagtgaaaattcacttgttataaaggagatctacttcgcgtaggtctcttttataatatgtgaattttttatttacggtataaatgtaaatatagagtaacatattaaaatttttacattttttggaggttttttacatggctactacaggtacagtaaaatggtttaacagtgaaaagggcttcggttttatcgaagtaccaggcgaaaatgacgtatttgtccatttttcagctatccaatctgaaggcttcaaaacattagaagaaggccaaaaagttgaatttgaaatcgttgaaggccaacgtggacctcaagcggagaatgttgtaaaattataattcaacgctacatatgaaagctgccgataggcagctttttttgtggaaatttgttttatttgtatgattaagaaaatagattaaagtaggggggaagggaaggcatgagttcatttcattgctgtgctacatgtcaacattttcaaagcattaaattggataagggaatgaagtatcgatgcaaaagactaggctatgaaacccgtccttcttatcagtttacatgctgggaaccaaaagaagtagttaaaaagctaatggaaaaacgaaatcaaaaatgaggctgggacataactgaatcaattcaatctacagacggacaaatgagctagtagggatcgcttgttacacaacagctgttgatttccgtgcaaggcttcgctttccgtggggggccggtgagcccgcaggagtcttcgccttgccctccaatcaacagctagaagcaagctacctatataaaacctatgttcactctaccaatgaaaaaatccgaacgagtttgattctccaccaagaatctcgattcatcgttcgaattttccttcaactaaaatacgtttgtcccagcctcttttaattattcctcgttatttgtaccttcctctgaaggcaaatgcttcccgcaaaactcttttacagcttcttcttcctcttcttcaagatcgaagtctaatactttatttgttgaaacttcgtagaaatgagtttgggcaatagaagtgttatcttcgcctttaatatatactacgcgtagtgctaggtcgttacccgtatataattcatcatcttcttctacctcaatgtataaatgaaattcatagcgttcacctagaaggagaccaaatggatcctgcaactgttcagccgtatattctttaattgtaaacatatgtacgtcctttccatatatcagtaaaatacttgcatcatctattatagtttttctttgcaaagaaagaaagtgcatgcgtaattcatgcacggatttattccttgatcattctatttagcgaatcgatggcgcaaggacttcgatgatttacttaaaggcggaagaaacgcgcgtatgtttttgcttatacatggcagcatctgctttttgaattaatgtatctagattggtgtcgtgtgaaggcgcacatataataaatccgtaactcgcagacagtgcatatggcttattaaattctttctttttatcttctagctgttcattaatattttgccacagctcttgtacgtattcttccgtttgttcaggagcaattaataaaaactcatcgcctccgtagcgaaagagcgtatcatctttgctaatataaccgttaattgattctgctattattttaataagccagtcgccttctctatgaccgtattgatcatttactagttttaaagaattaatatcgataaaacataatagaaaagatgtatgattggttttagctctcagcagttccagctgcagtttttccattccgcttcttcgatgtaaaattccggttagcatatcagttgaagcgtgcaagctcaattcatgcttaaccgcttttaaatcggttatatcggtaatacctgcgagtatgcagctttcgctttgatactctagtaattcataattgatcataacccacttagaatctccatattcacgtgcttctaggacgtagttttttacatatttctcttgttgaagacgttttaaaatctcctctcgatcttcatcggtaggatagattataaatccgtctatttgatcaagatcttgagaagcaagattgtaaaaatgaatagctttattgttaatgagcagcactttgtggtcagataatctcgttaatagtaaaggataggaattaattttgaacagcgtaaaaaaattacgttcgctttcttttagctgtaaacgattcatatattctttgtgatggtatgtataaagaatgtatgaaataagtaaagcgatagcaactgctgcagttgtattgatctgctttgaaataagagaaaaagaatccggtacatatcgtgataagccgtaaaaaaaggtggttaggaataaaaatgatgcacagatgttttaatttcataggacataaaacagctgtggaaatcaaaagcatcatatatacgtctacgcgacctgtgaaaagctgactgttaatagtagaaagtgctgcagcaaatacgtaataaaatatatagccatatatcatggtgcttaagtagttagcaaaccgttcttttctcttactaacataatagaaaaataaataaagagaggagagagccaaactagtgaaatgaataccaattagtgtatgtctaaactgagatgtccccgcatgttgaagtaaagaaaaccctatataaatataaatataaataggataggaaactacaagagcaagtgaaactagcttgactctctgttgaagcatctctacattcgttttatcgaacattttatcttcattaacttctcttcctgaaggaaaacgaaatttcttcaaaaaggagaaaggtaaaagcgaaagaagaaatgacatgaccatcatctccatatcttttttaggtattttagcatgtttgtataagaaaagacatgaattttttaggtgaaaatgtttgctttttgattcagaaaaagcataaagatttatatgattaaaggtgaggccaaagagcctcaccttttttattgaagtttattcgattcagcatgtcgtacaaacatggtttcatcttctactaatccgcaagctccgcactgaatgcgtttttgcggtccgttataagcagcgtgaaaggcatcgagcgtatcgtttgtgtattcttctactacgtctccgcttcttggatccatttttacaggttttgcattttgttcaatgatattaaaacgcgttcggtttgttttgcagctagggcaaagataagggcttcccatttttaacatctccttgaaaaatttactgtattaataccatgtccgaatccactaaaaacatacaaaaacttatggttttctatcgaacgttcattcgttaaaatagaagcaggtgatgaaaatgagaatacgaaaaaacttacaagaagtaatggatatcttgcaaacgaatccatcgtatcagcaaaatattgttcattggcatacaatcgaagagaaagaagctaaaactgcgccatttccagcttatttgcatacgaaactgcggcaagcacttgaaaaccgaggaattggttcgctttatacgcatcaaaaaacagcgtttgatttggcgacagctaagaagaatgttgtggctgtgacgccgacagcatctgggaaaacattgtgctacaacttgccggtactacaaagtattatggagaatgatcaggctagagccctttatttgtttccaacaaaagcgcttgcccaagatcaaaaaagtgaattaaatgaaatcattgaagaaatggaagtacccatcaatagctatacgtatgatggagatactccggcaaatatccgtcaaaaggtgagaaaagcaggtcatattgttattacgaatccagatatgcttcattcagctattttacctcatcatactaaatgggtatcactgtttgaaaacctgaagtacattgtgattgatgaacttcatacgtaccgcggtgtttttggaagccacgtagccaacgttatacgccggttaaaacggatttgccgctattatggaagcaatcctatctttatttgtacatcagcgaccatcgctaacccaaaagaactcgctgaacatttaacgggagctcatgttatgttagtagataacaacggagcacctagcggccgcaagcattttattttttataacccgcctattgttaataaacctttaaacattagaagaagtgctacgcttgaagtgcgaaatattgcgggagagtttttgaaaaataaaattcaaacgattgtatttgcacgaagccgagtacgagtggaaattattttaacgtatctgcaggagctcgtaaaaaaccagcttcaaaataagtctattcaagggtaccgcggaggatatttgccgaagcagcgccgcgaaatagaaagaggacttcgagagggaagtatttacggggtagtcagtacgaatgctttagagctgggagtggatatcgggcagctgcaggtgtgtgtgatgacaggttatccaggcacggttgcaagcgcttggcagcaagcaggacgagcagggagacgtcacggagaagccgtcattgtgatggtcgcaagttcaagtccgcttgatcagtatatgattcagcatccggattacttttttagccgaaatccagaaacagctcgaattaatcccgataatcttgttattttagtcgatcatttaaaatgtgcgtcctatgagctgccgtttaagcagggagaaacatttgatggggtagaaattgaagacgtgctggagtttttgcaagaagagcgagttattcattttagcagagacaaatggtactggatgagtgattcgttcccagctcataacattagtctgcgctctgcatcccaagaaaatgttgtcatcattgatcaatcggacgttgcaaatgtgaatgtaattggagaaatggatcgctttagtgccatgacgcttcttcatgatgaggcgatttacttgcatcaaggcattcagtatcaagtagaatacttggactgggatgagaaaaaagcgtatgttcgggaagtcgatgtagactatttcaccgatgcaaacttagcggttaacttaaaggttctagaagctgataaagaacggatggagagaacgtattcaatcggttatggcgatgtaatggtcagcgccatggctacgatatttaaaaaaataaagtttgaaacgcatgaaaacatagggtcaggtcccatttcacttccggaagaagagcttcatacaaatgccgtgtggctaagctttgaaaaagaacagttttacgaatctgaagaacgattggaacaagcgctcatttccgtggcaaatgcccttcagtcaattgcaccgcttatggtgatgtgcgatccgtctgatttacatgtagtgcctcagataaaagcggtgcacaacgaacagccgactatcttcttatatgatcgatacccaggaggcattgggctaagtgacaaagtatacgaacaaatgaatgatgtgctaaatcaaaccaatcaattaattgtaaattgttcttgcgaaagcggctgtccttcttgtattggtatggaagcacagggagaacacgcaaaaagcgatgcgctcgtgctgctacaacaactgcaaagtaggtgaactcgtgtcttttaaaaataaattaaaccgtatgaaaaagcatcttcatgttacagaagcaaagccgccggttgaaagtaacccgaagcgacctaaaagcgcgtctattccctatgagcaggaatggaagggaaattatgctgtgccttactttgcggaagacagctactgtatgatcagagaagtggtttacccgctccactacaagcatggccattatgaatttaatgagctgaaaaaagtagtggaagtatggaatggctctacagttgctcatccgctttcatccaaaggccgcatatattcagatttatttttctttgatacggaaacgacggggcttagtacaggtacgggaacgactatctttttgctaggatatgcaagggtgctaaaagattccgtcgtttttcgtcagcatatattaacagagccaagtggagaagtagcattttacgaaagttttttaaaagaagtagactatacgacgcttgtgacttataatgggaaatctttcgattggcctcatgtgaagactcgtcatacgctattaagagatcatttgcccaagctgcctaagttcggtcactttgatttactgcatgcatcaagaaggctgtggaaacacaaaatgaattcggttaagcttgcgaatgtcgaaaaagaaatacttggaattgaacgagttgatgatattccaggtttcttagctcccatgatttattttgattttattgaaacgaaaaatccaagaggcttattcgacattatgaaacataatgaacatgatattttatcacttatcaccttatacattcatttatcaaaacatctccttactagtgaggagtttacagaaaaagaaacatatgaagtagcaaggtggtatgagcagttaggggagaataagcacgctttctctctttaccagggcgtagcggaaaaagaaaaagaagagcatgaaaaagctcagctagcgatgggttatcattataaaaaagagaagagttggaaagaggcagtggacatgtttgaacccttggttcaaacatgtgaaggtgacgtcgctatagaagcattggttgagctagctaaaatttatgagcatcgtctcaaagatgttcatcaagcacttctatatactgagctggccttggaaaagtggaatcaactcagagaaatgactaaaaaaacgtcaaaggaagcgcttgaaaaaagacttcttagactaaaaaataaatcagctaaagcatagacttcagctgatttattttaaaatattcagaattattattcttttgtttttgtggatgttttatattgttctatttttcagtcattgataaaattagtcaatgtaagacttattcttacagcttaaaaacagaactttggtgagatggagagaagcctcatgaaaaatgtgattttagtatcatttttcgcattaatttgtttaacagtaattgtcttaagcagtttgaaaaattcgtataactcctttatgtaggccaaaaataggtgtttgtcttagtacatgtacactacccttcacatattgtaatagtgtaataactaaacagtgaaaggggaaaaaggatatgtatccaagaccaacaaaatgtatgccaccaattgtgcatccaacaaaatgctgcacgcagtttacttctcaggaggtagttgtacctcacattcatccaagtcataatacattggtgaatcatacaaatgtgaagcacgtgcattacttcccgcaaacgcaatctgttgtaaatgaaacttcaaatcaacagttttttggcggtgcgcaacaatatccaactcaagtagggggagcaggctatccaggtcaaatgggaggctacccaggtcaagtagcaggtgctggttacccaggtcaaggaggttacccaggtcaggtagcaggtgctggttatccaggtcaaggaggctacccaggtggctacccaggtcaagtagcaggtgctagttatccgggacacaaaggttgcggccaaggaagctgtcatacaaaaggcgcgcatcaaggacctaattcagggtattttagataatgtacgttaataggagctgattacatcagttcctattctattttgttacaaaggagttatataatgaaggtgctaacggttactggttataagccattcgaacttgggatttttaatgaaaaacatcaaggcattacatacataaaaaaagcgctctataaaaaattacaggaattagtagaagatggattagaatgggtattgattagtggccagctaggagtagaaatttgggcagcagaagtggtatttgatcttcagctcgattatcccgagcttcagttagctgttttaacaccgtttttggagcaagaagaaaaatggaatgacgtcaataaagaattgtatgaattcgtcttaagtcaagcagattatatagatagcattacaaaaaagaaatatgaaagtccagcacagtttcggttaaaaaatcaatttttagtagaaaaaagtgaaggtatttgtttagtttacgacgaagagcacgaaggaagtcctaaatatatgttagaaacggctaaaaaacgtgctgaacgagaagaataccctattataatggtgacgtctcacgacttacaggatatcgtgggtgaagaaaaattttcgtctttttaacgccacttggcgaaacattttaaaagataaattgacatttgaagctatttttgaaaaaatgaattataataaagataaggtttatcgtattcgaggtgatagagatgttagctgataaaatccgtttaacggccaaagaaattttagaaaaagaatttaaaacaggcatgagaggctataatcaagaagaagtagataagtatctagattctgttattaaagattatgaagcatttcatgaagaaattgaagcattacaaactgaaaatttacgcttaaaaaagcaagtagaagagttatctaaaaagccgcaacaaccttcgtttaccccgccgccggctcaacagcagcagcaagcgggtacgacaaactttgatattttaaaacgtttgtcgaacttagaaaaacatgtgtttggaagtaaattatacgaataacctaaaaataggagttgcattcaactcctatttttattatactaaggaaagtcgttatcaataacgttcgggtaattgctgcatcacatatgaggatgtagaggaaagtccatgctcgcacagactgcgatgtctgtagtgttcgtgcctagcgaagtcataagctagggtagctgttaaaagctaacggcggggaaaaagcctaagtctttttaagatatggcttgactactctgaaagtgccacagtgacgaagtcttatcagaaatggtaagagtggaacgaggtaaacccctcgagcgagaaacccaaataatggtaggggaactttctggaaggaactgaacggaaggaaggacaaaatggttacattttgtagatagataattgccaccggagtacgaggtagctagccgcttgcagtacaatggtacaaaacatggcttacagaacgttattgaaaagcaatcgacacttgttgttatacactatattttaatccaacacagctcttcgtataacggaagagctttttttatgtcaaaatgacagcttatcataagctgtcatttttttgtacaatcagactgagcttgttgtcagcctcaggtcttaggagaaaataaagctctagctcgttttgaaaaaatgtcataatccttaaactaagtatatagataagcgaaaggaggagacaaaatgaaaaaagttggtttgtttttgattggagcggtagctgctatcgttcttcttgcaaatgctggtccgatggtagggcttgcacttggcttggttattttatacgtagcatttaaagggtttgttaaagcagagaccccctttaaaaaatggctctgggggtttattggtgttgtcgtactcttaacaactgtttcaaacctcccggcccttgctggtatcattgcagcagtcgtactttacattgtatataaaaagtggaacagcagcagccctataaaaatggaaaaagaagatccgtttaagcattttgaacgtcagtgggctgacttaaatcaaaaataataaaagtttactttattatctaaggagaggaacaaaatgagaaacttatttactcgaatgaaagaaacgatttctgcagaccttcatcaattgcttgatcacaaagaacaaaaaaatccaattgctgcactaaaccactatttgcgtcaatgcgagcaggagaccgaaaaggtaaggcagcttgttgagcgacagcacacgttaaaagaacagtttaatcgcgaatatcatctggcccttgacatgatgaaaaaacgccatgagcaagcacaagtagcacaagcagctgaagaagcggaattacatgaatttattttaaaagaacatgctcactacgaagagagagcaaagcgcgtaaaagaatcttatgaagatgcatccaagcagttagaggagcttgaacaaaagtatgaagaaatgaagcataaggtaaaagatatgcatatccgccgtatggaactaatggggcgcgaaaatattgctcgtgcgcatcatcgtatgaattcagtaatgaaaacagaagcatcttatacgtcctacagccagtttgacgaaatggaaacctatattgaccagcttgaaaatcaaattaatacaaattactatagacaaacggtagacagcaagattgctgaattagaaaaaagagtaaaatcatcgtaaaaaatcagtgtttctgcataaaacatggtattctaaaaaaggcgtaggtttctgcgtctttttaaggtgagagaatagatacctgcagcatccaaagcacgctatgtcatctacgaggagaaaggagagagagctgtgcaaagcgtaaacaaaacagaatctcttatgttcatttttatttgcagcttatttgtcctgtttattgaaattatgttttttcacagcggcttgatcttttctgtattaattgccggtgcgttcatgtatattgggcgaaaaaaaatgagaagaaaactagggcgcattttattttggattggcgttattgggcttgtgttgaatatatttaatacggttgcctttaagtttttagttattgctctttttctgtattttttacttagatttattcaatcaagaaagcatccggttgaattcagaccaactgacgaatttacacagcagccaaatcaaaatttggtgcaggtccggccggttttgacgaataaacttcttggtagtcaaagaaccgaagactccgtatacgaatgggatgatattaatattcaaagcgtatggggagacattgtggttgatttaagcaatactgttctgccaaaaggcgatgcggttatttttattcgtcaagtgtttggaaatattaaagtgctcattccttacgaaacggaagtatctgtgaatcattctaaactagcaggaaacgtaacggtttttggacatcagcgcggcttttcgttcaatgaaaatttgtctattaaaacagaggaatttgatcaatctgctcatagagtgaagattgttacaactgttgtgattggagatttagaggtgcaaaggatatgagtattcttcaacggcagttattatgggggattttcttaagcttttttgtatttgtatcggtgctccttaccgtgttttttgcatatcctgtttttcaacttagcgacttatggaaaacaagcgtatttggcatgccttttgtgctgttttcctttagtttaagccttacgattggaagcgtgattggaggaatcatggggtttatgtggagacagcagtggacatatgttgaaaaccgattatataaaatagaaaatggccaccggcatatgtcggcaaatgaaccgcttatccaagaaacgtctcgaattataagccgtttaaataaagtagatcataaaatgattcttcaagcacagcaatctcaaaagatggcaacggaaaaagtggaaaatcagcaaaaacaagtgcaagaaattgtttctcaggaacgaaatcggcttgctagagaactgcatgactccgttagtcagcagctatttgccgcttcgatgcttatgtctgctattacggaatctaatcttacgctacaagactctgaagctaagcaattaaagatggttgaaaaaatgattaatcaatcacagcttgaaatgagggctttgcttcttcatcttcgtcctgcagcattaaaaggaaaatcgctacaggctggaatgaaagaactgatgaatgagcttgctcaaaaagtaccgcttgaattaaattggaaaatagaaggatttgaacttgataaaggcattgaagaccacttgtttagaattttgcaagaatccgtatcaaatacgctgcgtcatgccaatgcaacagctttagatgtgctgctgattaaacgtgacttttccattattttgcgtattgttgataacggagttggttttgatgtagaaaaggaaaaagtcggatcgtacggcctgcaaaatatgtacgaacgcgcagttgaaattggaggcctattaaaaattattagtttgcccgacaaaggaacaaagctagaagtgaaagtaccgttagtagaaagagaggaaaagcaaaatgattaatgtactgttagtggatgatcatgaaatggttcgtattggcgtaggagcgtatttgtcggctcaagcagacattcatgtgatagctgaagcagcaaatggccaacaggccgttgaattagggcttcagctgcgcccggatattattttaatggatttagtcatggaagaaatggacgggatcgaagcaacaaaacaactgattaagcagtggccagaagcgaaagtgatcattgtcactagctttctagatgatgaaaaagtatatcccgctctagaggcaggggcaacaagctacttattaaaaacgtctaaagcaggagaaattgcagctgctattcgccgtacatatgaggggcaatctgtattagagcccgaagtaaccggtaaaatgatgtctaaaatgagaaaaccgtctttacctcatgaagaactgacagctcgtgaaatggaaattttactgctaatgacacaaggaaaaacaaatcaagagattgcagacgaattatttattgcgctaaagacggtaaaaacacatgtgagcaatttattaagtaagctggatgtacaggaccgcactcaagcagtcatctatgcttttaaacacaaattggcgcagtgaaaatcgttattcaaaagagaataacgatttttttgtgaaaaacctatttttttgcatgtattcattataaaatagcgatatgcgtaaatgcgaacgcttacgtaaaagcactattttgaggggttgagcacatggaaaagaaatggtggaaagaagctgttgcgtatcaaatctacccgcgaagcttcatggattcaaacggcgacggaattggtgacattcaaggggttatttcaaaattagactatttatctgatcttgaaattgatgtcatttggatttgtccgatttatcagtctcctaacgacgataatggctacgatatcagtgattataaagatattatgaaagatttcggaacaatggaagactttgatgagctgctagatgaaattcaccatcgcggaatgaagctgattatggatttagttattaatcatacttcagatgaacacccctggtttgtagaatctaggtcttctaaagagaatccatatcgtgattattatatttggcacgaaggtaaagatggaaaagagcccaacaattgggaatctatttttagcggatcagcttgggagttcgatgaaaagacaaaagaatattacatgcacgtattttctaaaaaacagcccgatttaaactgggaaaacgaaaaagtacgtcatgagctttatgaaatggttaactggtggttagataaaggaattgacggctttcgtgtagatgctatttcacatattaagaaagtggccggcttcccagatctaccgaaccctgaaaagctagattatgtgccgtcgtttgaagggcatatgaatcgaccgggaattcaagaacatttaaaagagctaaaagaaaatacgtttgccaaatacgatattatgacggttggagaggcaaatggtgtaacatcggacagcgcagatgattgggtagctgaagatggcggaaacttcaatatgatttttcagttcgagcatatgggactgtgggataaaggagaagaaaaaccgcttgatttaatcgagttaaaagcgattttaactaattggcaaaatggtttagaaaaaatcaacggctggaacgctttatatttagaaaatcatgaccaaattcgttctgtaaataaattcggcagcatagcttaccgagtggaaagtgcaaagtgcttagctgcactatactttttaatgaaaggaacaccgtttatttatcaaggacaagaacttggaatgaccaatgttaagttcgattctattgacgattatgatgatgttggtatgattaactactatcgtattcagcgtgaaaaaggcgattcacatgacgagattatgaaagtgatttgggaaacagggcgcgataattcaagaacgccaatgcagtggaatacagaaagaaatgcaggattttctactgggaacccttggatgaaggtgaatccaaattacgtagatattaacgtagaagagcagaaaagtgataagaattcggtactgaatttttacaaacagctcattaaaattagaaaacagtatgatgtgctggtgtatggaacttataagctgttggcaaaagaagattctgctatttatgcgtatacgcgaacattagaaggtaaaaccgctgttgttatttgtaatatgtcaccgaataatcaaacgttcgagtttccttcagagagctcatttgcaaacagagaagtgctgattcataattatccgttggataaaaacgaaacgcttgaaaaatgtacgctgtacccatatgaaacacgtgtatacttactttcataaacaagttgagcaaccgtttgcgcaattttaaagtgaaaagctttcaaaaacacatttatatgcgacataggtgaagaaactgctggctctatcaagagccagcagtttttgcattttaataaaaagatggagaaagctttgactacggcgcatgtatatggtacttttacacttagtgtagataattagaaacaaaatgaggttgaaaaatggcgaaatataaaattattgcaacagcagcaatgggaattgaagcactggtcgctaaagaagtgcgtgctttaggatatgactgtgaagtagataatggcaaggttatctttgaaggagacgagctcgcaattgctcgctgcaatttatggcttcgtacagcagatcgaattaaagtgcaggttggacagttcaaagctcgtacgtttgatgagctttttgaacaaacaaaagcattaaattggggcgattatttgcccgtagatgcacagtttcctgtatcgggaaaatcagttaaatctaaattgttcagcgtatcagattgtcaaagcattgtgaaaaaagcaattgttgacagcatgaaaaaacattataacaaaacaacaggctggctcgaagaaacagggtcaacgtttaaaattgaagtagcgctattaaaagatgttgctacattaacaattgacgcaagcggtgcaggacttcataagcgcggttaccgcgttgggcaaggggaagctcctttaaaagaaacgctggcagcggctctaattatgctaacgccgtggaatgcggatcgtccgtttgtcgatgttttttgtggttctggtacaattgctatcgaagcagcgcttatcggtcaaaatattgcaccaggatttaaccgtgacttcttatcagaagagtggccatggatgtcagcaagtatttgggacaaagctcgcgaagaagcagaagacttagcgaactacgaccaagtgctagatattgctggtcatgatattgaccatcgtatggtaaaagtagcggagcaaaatgcatttgaagctggacttggagatttaattcaatttaagcaaatgcaagtgcgcgactttacgacgccgaaagaatatggaatcattattggtaaccctccgtacggcgaacgtttaagcgatcgtccttctgtcgaaaaaatgtacgctgaaatgggcgaagcgttttctaagcttgatacgtggtccatttatatgcttacatctcatgaacaatttgaacaatactacggtaaaaaagcaacgaaaaaacgcaaattgtttaacgggtttattaaaacagactactatcaatactggggacctcgtcctccacgcaacgatcaataaatacaaaagccaagcggtgtaaaaaccagcttggcttttgtacgttatttctttttcaaaccccgataagctagcattccaaacatgcctatcccgagcacgacaattaataaaataaaccaaaatgtagcattaagcaggtatttatatagtccgtcataataatcatgcatatactcaccccattatgtttttttatagtatgggcgagtagcagggcaatatatgtattaatttcttttcaatagcaggcttaaaacgagaaatgattagcttatttctaacatatttacgaaagggaaatctcatactaaaacctaagaggtgataaaatgagaaaaaatcgatcagcacggatttttgggggatgatgcttctttcatggttaaccatcccttttataggacgacagcatattaagcgctatttatcatctactatgtttatttcctttttaattatggttgaaagctatattgctgaaaaaaagaagtggtggatattccctaatcctcctcatccatatctaacaggtgaagctgctttaatatacgtttaccaacatctagtagtagagaaaccgaaacctcagcgtgctttaaaaaataatgctatagaataaaggggcaggtatggaagcgtgattttcttgcctgctattttaatgccccagatgtcattcctgaaatgaactgcttttgcaaaaacacgtacgcaatcaataatgggatagaagaaagaacgactgctgaaaacagcatagggtaattagtcagaaattccccttgaaagtccaatagtgcaataggcagcgtttttacttctttagattttaacaatagcaaagggaataacagatcattccacacaatcacaaacgaaaaaattcccactgtagccattgatggtattgagagtcgaagagcgatttttgaatatattttccactctgacgctccgtccatgcgagcagcttcgaatagttcccttggcaaagttttcataaaccccgtgataataaacacaccgatgggaagcaaaaaacttatggagacgataatgacgcctgttagcgtattgacgagcccaagcttattcatcagcaaaaagacaggaatcatattgacttgagtagggacaatcattccgcaaacaaaaaagccgtatacaatccatccaagcttttgaggtagctgaataatagcataagcaatcatgcttgaaaaccatagaataaaaaacgtgctaaagacggtaacaatcacgctgtttttaatatagccaaatatgggttcattgacgagcagctgtttataattttcaatattccagcctgctggtaatccgattgggttgctgtaaagttcaggcgttgttttaaaggttgttaataaaaccaagcttaagggaaacagaatgattaaaccgtatatccctaaaatcagttgtctgaatgggttttgtttcataaaagaatctccttttacattttggtcaagcgaagtacgcgaaattgaagaaacgttaaaagagcaatcacaatcataaatacaactgaaatggcagaggcatagccgaaacgaaaattaataaaagcttcgtgataaagcagtgtcgaaagaatttcagttgagttggagggacctccatttgtcattgcaatgattaaatcaaatgctttaaaactttgtatggtcgtataagccacaaccattgtcgtagctggagctaaaagaggccacgtaatgcgcttgaatttttgccatcttgttgctccatcaatactagcagcttcatataactcactgggaatagcttgaattccagctacaaaaataataagcatttgaccagtatgtgcccaaaattgtacaaaagccaagctgtaaattgcgatatgcccatttccaatccaagactgggtccaatgctcaaggcctattttacttaaaaataggttaactcctccaatgttggggtcatacataaagttccacgtgaaggcaatcgacacggacgaaataatcgtcggtacaaaaaagagtgagcgataaaatgtattccatgcagaatttttataaagtaaaagtgcaaagcctaagctcaataacgtttgaaagatcagcacgccaattgtgaactttaagttgtttgtaagagactgtgtaaaaatagcatcgtttgttaaaatctctttgaagttttgaaaccctacaaatgagaactgagaagacaatccattccaatcagttgtgcttaaaaataaagcagaaagcgttggcaatgcaaagaaaacagtatatatgataaaaccgggaagtaaaaacaaccatagatgtctgcttttagagatacttttaaatgaaaagagaggaaaagagaacgaaggggttctcttttcttcttcttgaatagacgtattagtttttagcgacacgttctacctctccttgtgctttttcagcagcttttttcgctgacataccggatagtacgtcctgtacagatgtttcaacagcttttgatacgcgctcatttaaaattgtaaatcgaggttggaagaccgtttttgtgtctttccattttgcgctttctttgagttcaggtgaatcatatttcacgtctttgaccgttaataactggcccgtagcattcgcatactcagaagaaatctttggatctgcaaggaaagttaaaaatttcttagcagcttctttgtgttttgatttttcagcaacacctaataagaatgtcgtggtatgaacaccttcgtattttgctttatcttgatccactgtaatcggtgcaagcaaaccttgatcaatcttcggattttgctgtttgactgtagccatcatataagaaccttgagcaagcattgcgcctttttcctgagcaaaaagtgctgcagcactttcttttttcgtaccaagagcatctttttggaagtaacctttgtcatttaattctttaatttgagatagggttttgataaaccattcatcagttagcttgcgcttgcccgtttctacttcgtgaagggcgttgtttgtgggttcgttattcataatcattggattaataaattgagaaggacttacgtctcctgaaaataaaatcggcgtgtatccatttttctttaatgtttcagatgtttttaaaaagctattccaatctttaggaacatccaaatttagtttttcaaaaatgcctttgttatagacagggatgttatagactagctgataaggaagagcatattgcgtattatccgctttacccgcttggattagcttttcgtcaaatttgctgagtaagttttggtcgtccagctttgcaaaaccgtttgctttgcgaatcgtttcaaattgacttcctggaaaactagcaaatacatcgataccttctccagatagtagagatccttgaatttgtgattgataggaatcagaaggaaagacggtcatttctacatgaatatttggatttttcttttcaaattgctcaatgatagaatcaaaagctttcgaatcttctcctcgccaatgcgtaaagttaatggttacttttttagaagagtcgctgctgtcgccgcttgttgaactgtttttgccgcagcccgcgatgatcacggtgagcatggctaacagaattaataattttttcattttagttcccccacttatagaattctttttagatagttattggtcaattttgatacggttggtagatgcttggtcaaagaaatgagcatgattcatttgaaaataaaatggaaagtgctgatgaacttgaatatgttcatccccagggattttagccacaaagagctggtctcctaaactactgtatagtatgtactctgctcctaataactcagacacatctaccggtaatgaaatatgagaagcatcagaagaggcgcgcgtaatatgctcaggtcgaattcctatagtaatgaactgattattgtagcctttttcatgtaacgaatgcatttgattttctgtcagttgaaactcatgttcactgatgtgcagtttgctgttcactacttttcctgtgaaaaagttcattcccggtgatcctataaaactagctacaaacgtattctctggagcattatacacttgcataggtgaacctatttgctgaatttttccgtctttcataactacgattctgcttgccatcgtcatggcttctgtttgatcgtgagttacataaatgatggtcgtctgcagctcctgatgaagcttactgatttcagcacgcatttgtacgcgaagcttcgcatcaagattagataaaggctcatccattaaaaaaatttgagcattccgtacaatggctcttcctaaagccacccgctgacgctgacctcctgataacgcttttggcttgcgttttaaatagggttctaagtccaaaatatgagccgcttcacgaacgcgatcatcaatttcttgttttgggactttgcggagctgcaagccaaatgccatgttgtcgtaaactgttaaatgagggtaaagcgcgtagttttgaaacaccattgcaatatcccggtccttagaaggtaaatcgtttgcacgatctccattaataagcaattctccttctgttatcgattcaaggccggcgaccattcgaagggtagtggatttgccacaccctgaaggtcctacaaatacaataaattctttgtcttgaatatgaagattgaaattatcaactgcaagactatcttttccgtattttttatacacatgctgtaactgcagttctgccattttttctcctttcagcaggcttttaaaaaaataaaagcctctaattgcacagacggattgtacgtgtatctggcaattagaggctatcggttgaccggtaagcctgtattatgtagttttgagtgattgaatctgtaagtaattttaaaatatattattcctgtatgtcaagtgggaattaaaatattttaataagttcgattattttcttaaatgaaagaagccatttattaagccagagatgctggttttgagaataaaataaacagctggtgtatagaatgatagtattcacttttatagtaagcactacagagagaggatgtttatacatggatagaaacacgcagttcactatgattcgtcaagcgttggaaaacagctatcatttaatgcagcagggaatagaagtaagcggagagacgcttactcagctggaacaagcaaaagccgagtatgaagcggcctttttattgtctcagtccacggactcaaaattccgctgtaattaatttttaatagcacttattccgtttgcgttctatacactcagcttttatacaaaaaggttctgtccttacaggcagaacttttttatgttcagctctttttattgacattttagataaagtagtcaataattaagttttgcttacatgagaaatttactagataaaaagaagtgaagctaatttttattgatagatatttacataaataaaggagtcagtatcgatgatgagagagcggttgccttttacaattgagcgggatgaaaacttttttgacaaattaaatgaatggataggtgatgttttttatgatcatcttccagacgctgggttagaacttcgggatgaacaaatttttatggcttttcaaatcgaacgagcttttaaagaaaaaaatgtaatctttgcagaagcaggtgtaggaacagggaaaaccattgtgtatttactgtacgctatttgttatgcaaggtatattggcaagccagctattattgcctgtgcggatgaaacattaattgaacagttagtaaaagccgaaggagacattgcaaagctctctggtattttagatattaacatggatgttcgcctagcaaaatctcaagatcagtatctgtgtttaaagaaattagatgctgtgacagcacgaacagataatgaaagcattgaagaaatttacgatacgcttcctgattttgttcatgatcatagcggtatgcagtcgttctatcactacggagaccgtaaagaatatcctcatttaacggatgaggaatggaatcaaattaactgggatacgtttcaagactgctcttcctgtgagcagcgtcatagatgcggcttaacgctttcacgtgagcactatagaaaagcacatgacttaattatttgctctcacgatttttacatggagcacatttggacatatgaagcccgcaagcgtgaaggacagcttccgcttcttcctgaaagcagctgtgttgtatttgatgaaggtcacctgctggaatttgctgcacaaaaggctttaacatatcgcattcaagaagatacgttagaaaacttgttgacgcgtctattagaaaatgacgtgcgagaagaatttgctgtgaagatcgagcacgctatcgatgtgtatgcaatgttctttgaccgtttaagtgaagcaagcacagaaatcgttggttctagccgtaaagaagtagcccgcacaaacggattacaaagtgtaggaaaagaacttttatcgctgcttgagcatatcggaaacgagcttgtgtttgagagtgagacatatacagtagacgaatatacgctgcgaattgtagatgagtacctagatcaaattgattattcgctgcgtttatttatggacaacgaaaatgccatctactgggtggaagaaaacaactggcagctgacgttggttattatgccgcaagcagtaaaagacgtcttaaaagaacgagtatttgcgaagagaataccatatattttcacttctgccactctttcagataaccaatcgttcgattatttagcatatagcttagggattgcaaagccgctttctttttccgttgaatcgccatttgattatgatgagcaaatgaaaattgcggtaaaaaatgtttcggatgatcaagaagaagcgtttgctgaaaaattcgcctttgctgttgctcagctcgaaaaaacaaacggacgagcacttctattgtttaacagcaaagaagaactagagatgttcaaagaagtttccaaagagttaaatcagtacacatttttatttgaaggcgatcaagagatcagtaaattagtatctcagttccaaagggaagaagaaacggttttatgcgctgttcatttgtgggaaggattggatattcctggaccttcgctatctaatgtaattatttggtctctgccgtatccgccaaatgatccggtctttgaagcaaagcgcaatcaagtagtcgatccattttgggatgcagatatgccgtatatgcttcttcgtttaaagcaaggagttggaagactgattcgctctcataacgataagggtctaatcacgatctttatgccaaaaagcacagattcaaaagtgcgttcaatcattgaacaaaatgtcccaacgaaaatagaaaacgtataaaaaagcgcggttgtagccgcacttttttatacgcttaatagattgaatattcagttatatacacgccgttactattatgataaaataatttatggtgaaataaggaaagtaaggaggaaaaacaatgagagaagacatacagaaaattgagaaacagttttatgaatacatgaataaaatcaaaagttatcacgaggcaatcggagtgatgtactgggatttgaggacgggtgctccaaaaaaaggggcggatcagcgttctgaagttattggcatgatgtcatcagaagcgttcaatctttctgtttctgatgaaatggcaggttttattgagaaattaacaaaccctgagttacagccttacataaacgatattacgaaaaaagcagtggaagaatgtaaaaaagaatatgacttaaataaaaagattcctccgcatgaatataaagaatacgttacattaacttcaaaagctgagtcggtttgggaagacgcaaaagaaaaagcagattttgctttatttcaaccgtacctcgaaaaaattgtagcgttcaatcagaagtttgtggagtattgggggtatgaaggaaacaaatataaccgtttattagacctttttgaaccggggatgacggttgaaatcttagacgaggtatttggaaagctacgggagcatattgtgcctcttgttcagcggatcgcggggtcgaatacaaagccaaatacggaatttttattccgtacattcccaaaagaagcgcaaaagcaatttagtctagacgtgttaaaaacgcttggctatgattttgaagcggggcgacttgatgaaacagtccatccttttgctactggcttaaacccgggagatgtgcgcatcacgactaagtatgctgaaaacgatttccgaacggctatttttggaacgattcacgaatgcggccatgctttatatgagcagaatatttcaaaggatcttgtcggtacggttctatgtgaaggtacttcaatgggaattcatgaatcacagtcgctgttttttgagcagtttgtcgggaaaaataaagcattttggcagcatcattacgacgtcctaaaaaagcatgcgccgggacaatttgacgatgtagatttagaagatttttaccgaggagtaaatgaggcgaaaccgtcgcttattcgtattgaagcagatgagttaacgtatcctcttcatattatgattcgctatgagattgaaaaaggattaataaacggagaatataaagttgcagatttaccggaaatttggaatgagaaatacgaagaatatttaggagttcgtccaagtcacgatggagaaggcgtgcttcaggatgtacactgggccggaggaagctttgggtacttcccttcctacgctcttggctatatgtacgcagcgcagtttaagcataccatgttaaaagacttgcccaattatgatgaactcctcgaaaaaggagaaatttcgtcaattacaaattggctaacagaacatattcatcagtacggaaaaatgaaaaagcctcttgaaattttaaacgatgtaacgggagaaggcttaaatgtagattatttaattcagtatctagaaaagaaatatggagaaatttatcacgtataaaaagcgctataaccgaatattatgttttgtatcacaagtaaatgttcgaaaatatagtttttagatattttcaaataaaagatttgctgatataatacaattaactcaataacgcactcatataatgacgagaataaggctcgtaagtatctaccaaactaccgtaaatagtttgactatgggtgagcgatgaagtttgtttttcacttttgtgcgtaaaagctcaaaaacattgctctactcatatacgagtgcagctatgtttttgagcttttttaatacaaacgttggaggaacgaactatgaaagctttgcaaaacaaaattttaacagatggtatcgtattatcggacacggttttaaaagtagacacatttttaaaccaccaaatggatcctgtattaatgaaagaaattggagaagaattcgcttcgcgttttgaagatgcaggaattacgaagattttaacgattgaatcatcaggaattgctccagcgattatgaccgcattgaagctaaacgttgagatggtgtttgctagaaaaagaaaatctttaacacttcaagacggactcattacatcaaaagtatattcatttacaaaaaaagaagaaaatgaaatttcagttgctgataaatttattcaagaagatgacgtgattttaattattgatgactttttagcaaacggccaagctgcattcggcttgatggatatcgtgcaaaaagcaggtgctaaagtaggcggtattggtattgttattgaaaaagcgttccaagatggaggaaaacaaattcgtcaatcaggcgttaaagtagaatcattagcacgcattcagtctttatcaaatggtaaagtgacatttgttgaagataaaccaacagtggaggtttaatatgaataaaggaaaagtcttttcacttggtttacagcatgttttagctatgtacggaggtgcgattgttgttccgcttattgttggaggagccattggcttgactcagcagcagcttacgtatttagtggcgattgacttatttatgtgcggtgtggcaacgctactgcaagtatggaaaaatcgtttttttggaattggtcttccagttgtattagggtgtacgtttactgccgtaggacctatgatttcaattggaggttcttacggcgtatcctccatatatggttctattatcgtggctggtttactcatcgtccttctttctgcttttttaggtaaattggttaagtttttccctcctttagttacaggttcggttgtaacgattattggaattacgttaattcccgtagcgattaaagatttagccggaggagaaggaagtaaagattttggcagcttgagcaatttaggtttaggttttggcgttttgctattaattattgttctgtatcgatttacaaaaggatttatgcgctccgtctctgtgttattaggattagttgttggaacaattgcagcgtcttttatgggaaaagtcgatttttccggcgtaaaagaagaagcgtgggttcatatgccacatgtgctgtactttgggatgccaacttttaatattatggccattctgacaatgttccttgttttacttgttggcattgtcgagtcaacaggcgtttattttgccgttagtgatatttgtaaaaaagaagtggatgaaaaagatttatctaaaggctatcgtgcagaaggattggcgattttattaggcggattttttaacgcatttccttatacagcgtattcacaaaatgtagggcttttacagttgtcaggtgttcgcacaagaaatgttgtatttgcagcgagtggaattttaatcgttttgggttttctacctaaaatcgcagccgtgacgacagttatcccgagctctgtacttggtggagcaatggtagctatgtttggcatggtaatctcttcaggtattaaaatccttagtcaagttgatttagcaaaacaagaaaaccttcttgtgattgcatgttcggttggcatgggtctaggggtgacggttgtacctgaactcttcaaaaacttaccagagagtcttcaagttcttactggaagcggtattgtaatggggagttttacagcaatctttttaaatattgtctttaatatgatgaaatcaccacgtacgcaagttgcagaaacaaagctaacaaatgaagtagtatcgaaataaaaagaggctagaacaaaagtattttagttgagaagatccggacgattaatcgttcggatcttttcattgtcatggtgcaacaagcgatccatagtagatcattcatccaatttgttcgtctttcctattaagaccgtgttttgaaaaacagtgtataaagcatttttcccacgtcagggttttttgccactaatgaaatttttcttttgaatttgaagtctgtaatgggtaacgctttaatattggagctttgtaaatggcgcataaaaatttcagggagaattgaaatacctaaattagctgaaataaatccgagaatactttgtgcaaattcaatttcattggcaatggaaatttttaagttatgacgcttgtatgctttctctactagtgtccgaacatcgcaccctggggggagaactacaatgggttcttctttgaaatcttcaaatgatacgctttctttttcggctaacgggtgctgatcattcacaaataaataaaagtcttctttgaacaatagttttgaccagtaagtatgttgaacctctcgatcatcaaataaagccccgtcaatttgattgctttctaactgctctaacaaatcataatagtgatgcgaggtttttatatcaatatggcgattgtggtctttagcagaagccagttgataaggtaagtaaaaagcagccatactctgccacgttccgatagttaaatcacaagcttcttgcgtagacactaattttttttgaagagcatgaacgcttgatagtatggattccccttcttgtaaaagaatttcacctgctgaggttaattctactcctgtagcggagcgaataaataatgttactcctaaatcttcttctagttttctcatttgcttactgagcgcgggctgcgtcatatgcagctgttcacttgctttgcttaagctttttgttttggctgtttcaataaaagactcaagccattctgttttcatatttatcacctataaccttttgttatacccatagtatagaagggaagttctcataaatcaatgaagatgctagtgtatatagtgtagttaacacagcacaaagaaattcacacaactaggaggatgaatgatgtatccaaacaaactatatattaacggtgaatggacaacgacagaagagaaaattgatgtgattaatccagcaacaaaagaagttataggacaaattccaaaggcaggcgcaaaggaagcagcttctgcagccgatgcagcggctgcagcttttaaaacatggtcgaaaagaaccgctcaagagcgcagtgctattttaatgagatggcatcaactaattgaaaatcataaagatgaactagcagaaattatgacaacggaacaaggcaaaccatttgcagaagcaaaaggtgaagtgcagtatggcaatgattatattgcttggtttgctgaagaaggaaagcgtgtatacggtgaaacgattccagctcatcatacccataaacgtattacggttaaaaaacagcctgtcggcgttgtagcagctattacaccatggaacttccctgcagcaatgattacgcgcaaagtggccccagctcttgcagcaggatgtacaattgttctaaaaccatctgaagaaacaccatttacagcatttcgtttagtagagctcgcagaagaagcgggagttccaaaaggtgtgatcaatgttgttactggagatgcagcagctattggcgacacatggcaaaaagacggacgcatccgaaaactaacatttactggttcaacagcggttggtaaacatttaatgcgcggtgctgcggatactgtgaaaaaattatcgctggaattaggcggtcatgcaccgtttatcgtaacagaaaatgcagatttagacgctgctgtaaacggcgtaattgcttctaagtttgtcaacgcaggtcaaacgtgcatctgcacaaaccgcgtatatgtacaagaatccattgcagatgcttttgttgaaaaatttgcagcaaaagcggcggaattaacagtaggaaatggattagaagaaggtacacaagttggaccgttaattaacgacaaagcggttgagaaagtaaaagcacaaattgcggatgcaaaaaataaaggagctaaagttgtggttggcggacaagctataacaactaaaaacggtttctttatggagccgacaattattacaaatgtaactgatgacatgaattgcatgtttgaagaaacgtttggaccattggcacctgtagcaacattcaaaacagtagaagaagctgtagaacgagcaaacaatagcccttatggtttagccgcttacgtatttacagaaaacattaaagaagcaacatttgtatctgaagagttagaatacggcatcgtgggagtaaatgacggctctccatctgcagctcaagctccattcggtggctttaaagaaagtggtcttggacgtgaaggaagtcattacggcattgaagattatttagaagtaaaatatatctcaatgggactttaataaaaagtagaggctgggacaacaatattttattcgaagcgaaatacgaactagcaaccaataatcaaaattattggttgctagttcgtatttttttgttgtgaaggtggacgtagctttcatatgtttcgttgtgttccagcctttttttatgcacttttgtaaagaaaatttggaataatagttctttaacgcaattaattgcatttctaggatgtctgtgcaagaataaatatttcaaaaatggtttagctttgtttaaagcgtgggtaatacaacaaatgcacatgattgcttgttagatgaaatgaaaagcagaactttaccactgataaattacgcaagctagaaccaaaatagtagtactgaatagtgaaaaatataggagttgatatagatgattacagcagagaaaaacatagtgaaatttaaagcaaaagacggacgtgaagtcactattcgtcctgcacaggcaagcgatgcagagcatattacaacagcggtaagagaaattatttgggcgggggaatttattcaaaaagatgagccgcgcacagtccaagaagagcaagattttattgcatcagtagaaaagaacaatcacatgtacgttgtagctgaagtcgaaggtgaagtgcttggaattgcacgtgttcttagaggcgaaattaaaatgaagcgccacacggggctcttccgtacatggcttatttcaaaagcacagggaatgggaataggaaaacaatttatgaattatacgctaaactggtgcaaagaaaataatcttcacaaactttctttaactgtgtttgcttcgaataaagtggcatacgaattgtataaaaaggtaggatttgagcaagaaggcgtcatgaaagaacaagcttatttcaacaatgaatatgtagatgaaatctatatgtccattttcttttcataaaaaataagcacttattttcgtcaatccataaattgtatctgtacattcagattatttgcgctataataaaagtgcacaacaaacatacacttcttcaaaacgtagactttcctgagttacaggaaagtttttttatgttttgcctccattccactaaaaaagaattgaataaatccccagctattacaaatgttaaatgtaacgcaatcaaagaggtgaagtgtatgccaaagattatctcagttggatttggagttcccccttatgaattaactcagcaagacacgctgctatttgcaaaagaacttttttctgaatcgtttaaagatattaatcgtctgctaaccgtttttcaaaatggtcaaattgagaaacgtaattttgccaaagacttatcttggtttcaagaagaccatacatttgaagaaaaaaatgatgcttttatagaatctgctgttgaattaggtacaaaagcaattgaagactgcttaacaaataagaactatgtaagtacccctttgccgtgtggagaaattgaggctattttttatgtttcaacaagcggtttagctacgcctagcattgaagcgcgaattatgaataagcttgcgttctcagaccatacaaaaagaattcctatttggggattagggtgtgctggaggagcgtctgggctttcaagagcgtatgagtattgcaaagcctttccgcgtgccaaagtccttgttttatccattgagctttgcagtttaacttttcagcgaaatgatcgttcaaaaagcaacttaattggtacatctttatttgcagatggagtagcggctgctttagttgcaggtgacgaagctgataccacttttgcccttgcaaaaagctatccttacattttacatacacaatcgacgctcatgcccaattcagaagatgtaatggggtgggagattaaaaatgatggactatttgttgtcttttcaaaagatattcccacgattatcgattcgtggttaggcggggaagttgagtcatttttacaaacacagcatttgaccagtcgcgatttgaagcattttgttgctcaccctggagggaaaaaagtgcttgaagcatatgtatcaacgctgtcgctaaacgaaaatatgattgctgattccctagatgtacttaaaaaccatggaaacatgtcttcggcaaccgttttgtatgtgctagaccgctttatgaagaaagaaatttcgagtaaagaatacggtttattaacagctcttggccctggatttagttctgaaatgcttctattagagtggaggtaaagcgattgtttttttatagcttttttgtatttattatcttacagcgtctgtgtgaattggttattgccaaaagaaatgaagcttggatgaagaagcagggagcacacgaagctggtcaaagtcactacaaatggatggtaagcatgcatgccgctttttttgctgctctttttacggaagtatatgtattaaacgatggaatgtatcacttttcttttttgttgtttagcttttttgtgcttgtgcaacttgcaagaatatgggctatttcttcgttaggaaagtattggaatacaaaaattatcgttttgcctaatgcgaaggttgtgctaagaggtccttatcgttttatgaagcaccctaactatacagtagtagcggcagaattggtgttagttccgcttatgtttcaggcatactggacgttagctattttttctgttttcaatttgtgtatattagccgtcagaattcccttagaagagcaagcgttaacgaatgaaacaaattacggcgaagtgatgcaaaacaggggacgtttctttcctgtaaaaaaatcttaaaactaattgaaaatgattatctttcatgataagataaaacaaatgataaagattatcaatttcatcaagtagaaacggtggtggacgtaatggttagtctttttgtgatcggagcacttgctacatatgttggcgtcacaacgtatgtaatgaaaaatattgaaaaagcccaaaaggcgtaacatacatgcgatgaataaaaagtacgatgcaaagctgtcaaattattgacagctttttttattgtttttgtaactaaaaattcagttttttatgggaaaacgcatgcgaatcaagtaaaatagagaaagaataagcagaaatgaagctggatagagaacatttaaatacagtcttgaatgaggcaaaaggggtagagtaataatgggtaaagtgagtgtgaaacatcaagaaaatctccgattggaagcatctctttttcatttacataagcaatttcaagcagctggagatgaacagcaggcagcaaaagcaatacagctgttaaaaaagtgggtgaacggcgaatttgttgtagcattttgcggacatttttcggctggaaaatcgagcatgattaacgaattaatggggcaagcaattttgcctgcaagtcctattccaacaagcgcaaacttagtatcagtaaaagctggggatgagcatgcaaccgtttattaccgtaaacagccgccggtgcgttatgaagcaccttatgagtatgtgcaaattaagcagtttgctgtggatggagatgaagtagagtccattcatttatcgatagatacagatgctattcctaaaaatgttgtggtgatggacacaccaggaattgattcaacagatgatgcgcatcgtgtatcgaccgagtcagctcttcacttagcggacgttattttctacgtgatggattataatcatgtgcaggcagaattaaatcttcaatttgcaaaacagctgcaagaagctaataaaacgctttatttaattgtaaatcaaatcgataaacaccaagaagatcagctaacatttcaagcatttaaagaatctgtagaaacgtcatttttaaagtggaatgtgagaccagaaggaatcttctatacgtcgttaaaagagccaaccaaccgtcataatgacctttcgtatgtaaaatctctattacttgctatgatgatggaaaaagaaaaccgacatcagcatattcaacatgcgatgcaaatgttaattgacgatcaccttgcctttattgaagaccaagaagaagaaaagttaacgattcatgacgagctgcgccataagctgacgcttgagaaccatgaaatgaataagcagcaaaaagagcagcttctcgaaaaagaagcggaaataaggcgtgctgaaaagcagctagcagaaacgtaccaacaagaaacaggtaagatactaagcaacgccaatttaacaccatatgaaatgagagaaaaagctaggctgtttttagaaacgacaaagcctgattttaaagtaggacttttatttgctaagaaaaagaccgaggaagtaaaaaaagagcggctgacgttattttttgatgatatgaaagaacgagcagcttctcagctgcagtggcacttgcagcaatatgtgcaagagctggtgaaaaatcaaaatcttaccgacccggatcttatacgccaggttcagcagtttgaaatcccgttagagccgcatgatttaattgaaacggtaaaggcaggagctacgattaatggtgattatgttttaacgtacgcaaaagatgtagccgatcatattaagaaaaaagcgacgcgattattatacgagctttatgcgcaaatcgaacagagcaaaatcgagcaagatgaagtaaagcgtgaaaaaatttatcaacacttgcaggaatgtgaagcatttgaagaagcgtatacgtctcttcaggaaatgaaagcaaaattggcacgtgcaaaagctttgcttcaatctttacagcaaactgatgacgacctaacggcagaagatacaaacgagttgtcatatatgttacaagaagaatatgaaacgggcatcatgaaagctgaagaaaagcaagaagctgtgagtgagcagcagttagtttcacagcctgaggaagctgtacatgaaacaggaacagaaaaggttcttcaagatgtatcagctgttctcgaacagctccgttcatttggaaagctagaccgctttattaacaggcttcaagaaaagcgtaaaaagctatcaaatcaaacgtttaccgtagctttattcggagcattcagtgccggtaagtcatcttttgctaatgcgttgattggagaaagattacttccagtatctccgaacccaacaacagcaaccatcaataaaattatgcctccaacagaaaaacggccgcataaaacggctgttgtgcaaatgaaaacaaacgagcagatgatccaagatttaaatggtgcacttaagctgtttcatcatgaagtagaatcaattgacgaagcgctaacaattattccaaccctgcaggcaacagaagagctgcagctgcatttgtcgtttttacaggcagtagaaaaaggctacggcgaagtcaagcagcatatcggttcagaagtagtagtggatacagaaggatttcatgattatgtagccaaagaagaaaaagcgtgttttgttcaatttattaacctgtattatgactgtgaatttactcgcttaggcattacgctcgttgatacacctggagctgattcaatcaatgcgagacacacgggagtagcgtttgagtatatcaaaaatgcagatgccattttatttgtaacgtattataatcatgcgttttcaaaagctgaccgcgaatttcttattcagcttggccgtgtaaaagatgtatttgcgcttgataaaatgtttttcttagtaaatgcagcggacctagccagttcggatacagagctgcagttagttcagacgtacgtaaaagagcagcttgaacagtatggtatacgctttccgcgcttatacccggtatcaagcttacaggctttgcaaaacgacgaggataaaatgtttctgccattcaaaaatgcgttttaccgcttcataaattatgaattaccagagctggctatccaaagtgtttatgcagatttcgaacaaattttagcagttgccaatgaaatgaaacaggtgcaaacaaaatcagaagtggataaaaagcgatacattcaatctcttcacataaaaaatgagcaggtagcagcaaaactgcatgaaattcattttgaatatgaacaacagcagtttgaccgagaattagaagagcttttattttatgtaaaaaaacgtctgtttgtgaggtacgatgacttctttaaagaagccttcagtccggcaaacttaagggatgatcgaggtgaaaagcaaaagcagctgcgcctgtgtttgcaggagttgttaacgtctatttccttcgacgcaacgcaagaagtgcgtgcgaccactttgcgaatcgaaaaatacatcgtaaaattaatcgaagactggcatcgaatgatcattacaaagctacagcgctatgaaccgacgtttactcccacgttgaactcgttagagcctccaaatggcagtgaagttgtgacaagtcatcaatttgatgagaatgaatcgtatcaaaaagagctttcactgtataaaaacaataaaagcttttttgaaaaaaatgagaaagcaaagcttcacgctgctttactagaacgtattaagccggatgttaatcactacattgtgaaagaagaagccgttcttcattcacactatacccatttagtgaatcagtacgttttagcgcataaacagtctgtatctgaagaatggtatgattattacaaacagctgcaagcggccgtgtctgaagaatttccaattcaagaattggtaagtacaatgacggtgctagaacatgtattggagaaaagaaagggtcattaatttttatgtctacacacataaataaacgtttacaggaaattgaaaaagaatataatgtggaaattttgtttgcatgtgaatcaggcagccgtgcttacggactcgacacgtcagcaagtgattttgacgtccgctttatatacaaatataaagcagcacgctatcttcatctcaatagacctccagaggtcattgatgtagcagaaggcaattatgatatgcaaggatgggatttgtacaaaaccatttatttgtttacaaaatcaaacccttcgctttatgagtggctatggtcgccttttgtttattatcagaagccatcgtttgctgagccacttcggcaaatgatggctcaaacatattccttaaaagcactggggtatcattattttaaaattttaacgataaatagtaaaagaaatctgacatcttctgttacaatagaggatataaaagtgatgctccaactgattcgtgcatttttatcactgaaagtagtagtaaagcagcgcagtttccctgtcattttatttgccgatttatgtaagcaggcaaaccttgaaaataggcagcaatccaccattgagcagtttgtacagtgcaagataagcgggaaagttgcttttaatgaaaagatgaaaaactttttggacagcattaagaaagaagctgcagcgatagaaaaaagcttaaaagaattaccggaaaagcacatcagttatgaggacattaacttatttttactaactcagcataatataatggaggaacgaacatgagtgtacataaagaaatttcagcccattctaaaaaacagcacgaattagtacgtacttttgccagcttagaagctcgacgcgagcaagctattgaagcagctgtgcttttgtgtaaagaagggaagcccttttctgtagacggtattaacgctgtaacagcagaaattaatgagctgtctcaaaaatataccatcattccaggccgtaaagtagtgacagaagaaatggttaaagagtacgtagcaagaatataaacgtgccaagctctggtgtttttaccttaatttgaacaggatatgacgtgccgcttgatccatactaatagtgtaccaacgaggtacaaataggaggagatagcgatgggtcgtcaaaaattaggtaataaaaatgcgcaagcgaataacaatgcaaagcataattataaccaagagttctcttctgagtttaaagcaaatcaggctcaaaaagcaaagcgtgcaaaaagtgcaaatgacacttatgctggggagtttgcttctgagttcaacgtgcaacaaaaccaaaacaattctgttaacaagaagttagaagctaataaaagtgcaaataatcaatatggccaagaattcggctcttatgctgaagttgaatctgccaaaatgaataatgctgcacaaaaaaagcgtaaaaaataacagaactgtttccaaaagcgccgggattagtctgctctgtcagcagattagcccggcgttttttgttgggcaatatttgcttgggtacgagatgtcaatccatcgcaaactatagatgaggtgaagcaatatgaataaaggaattgtcattgctctttcatcaatcgttttagcccaagccttaaaaatcccaattaaaaagtatcaaacaggaaaatgggatatgcggatgattgctgcgtccggtggaatgccaagctctcattcagccggcgtatcttctttagcgacctatgtagcgttaaaaagaggtgtttctacgattgactttgcgttagcatctgtttttggaattattgtgatgtacgatgcacaaggaattcgaaggcagactggcgaaattactattaaagtgaatacgttagatgaagaaattgaaaagcttgcgggtcttccagacggaggctttcacgatttgacggaacagcgcttgaaagaaatgcttgggcatcagcccgaagaagtgattggcggagccattttaggagtagcacttggagcaattggctattttttagaagggaaatcatagtcaaatagccaaaagtgagctaagataaagaagaacctttgcaaaaggatgggacgaaaaagtgacaaaaacagctcaaaccgttgaagagtatcttctttatcttgaagaaaaaggctttcatttagcagaagatgcacgtggatttatttcatttggtcagcagtatacgcgtgcagctgacgagatggtcatatttacaattgaatggacactaaaggtacaaaaagaatttgacggcagtttttttgtatcgctcctcgagaatttgacatcaaatcgtattagcaatcaaaaacaagccattcaatatttaaagtcatcaggtatgatttaagcaggattacattcctgcttctttttgattaatggcttgtctggccagctgatcagcacctgcattttgagagctagggatccactttataaaaaataactcaaattgactggacaatttgagggcttcttccagtaaaggagcaaacgctttatttttaacgtattcttggttcattgcgcggtctactagctgagagtctgttcgaaaggatacgctcgtatactttttttctaaacaaatttttaatgcatgaagaagtgcatggtactctgcttcatgattcgtcattgtcccaagagcaatagcgtaacgatgatgttcaccatttcctttaattaaaataccagctccagaaggaccagggttgccagcagtggctccgtctatataaacttcaatcatcatacagcctccttgttaaaacaatataagcttaaaccatgttttttcatcaatagtattgtatcataagtacttcagctattttatattagcacgtataaacgctaaaatccgcttattaggtaagaaaactgtcatgaaaagacataatagaagataaaatacaaaaaagcagaaaaagtgttgaattcaaaattgctgatgaaaggaatgctcgttatgaatttccaaattgaatggcattataaatcctcgaaacataaacagttaatttttacatccgatttcacagatgcgaatgaggcgctaatgattgtgggtgatttagaaaaaacaggtcgaacgaaggaaatttttctacttgatgagcagcagcaaaaatggactgtaaaagaagcgaaaaagctcttacaggaagtacagacagagcctcacgatattgtggcatattttgacggaggctatgagcatgatacgctcttagcggggcttggggttgtgatttattttaaacagaacaacaactcttaccgaatacgacgcaattcaaggctgcaggagattgaatcaaataatgaggcagagtatgctgctttttattatttaatacaagagcttgaggaacttggtgttcatcatataccggtaacgtttagaggtgactctcaggttgtattaaatcagctggctggggagtggccctgtttcgaagaagagtttaatcggtacttagatcgaatagaagataaaatgcaggaacttggtatccgaccgatatatgagcctatttcaaggaaggaaaatgaagaggctgaccaacttgctactcaagcacttcaagggataccaattgctagcaggaagcaagtgtaacacacagaacgaaatggagatgaacgagagtggaacgtaaacaattattagaagaagtaacggagttattggattactactgtagtgattgttttgtaaaaaaaacgtttaataaagaaaaaggcaaaacatacgcccagacgttttgtattaaagagtgtaccgtaggagaaaaaattaagcagtatggagatttgctgactaaaaagtaagcgtgtataatttgccggcagcagcttcattctatccatatggaggtgttctttcaatggataagttttcaaacgaagaagtaacaacaggatataatgatttaaagcaagtagaagtgtctattcaatctgctcaaaagatgattgggacagctacgatgagtatgagtcctcagcagcttgaagaggcaacgaatgcgcttaatgatgcaaaagcacagcttcaatctgccaaagctcatggcacaggagtagacgagcaatttcttcagcagtgcatgcagtctattcaaacatgtgaacagcagcttattgaggccaaacgctaggtataacaaaaaagagactcggaaaagagtctcttttactataaaataaaaagatctatttatgatagcttagtgacattagcggcttgcgggcctctattgccttctacaatttcaaaagatacctcttgtccttcttccaaggatttataaccttcgctttggatggcagaaaaatgtacaaatacgtcgctgccgccttcaacttcaataaagccatagcctttttcattgttgaaccattttactttaccattttgcataacttgaatccccctagtactgtgcagcctcatgctgctgaaactcgaattatcatttccaatagaggtaaatgattgtttatattatataataaggagaaataaaatttcaacattaaaatttaacttttctgaaaattaaatttttatttaacgtgaacgtagtacaattataactaaaaaaatttcttatgagatgaaaaataactgaaaatttagtttataataaaagtatagtcagcataattttaaagcggtgataaggagtggatcgtgtatgtatcgtacacaagtaaatggaaaagaaatcattttgttattttcaacgatcgaagcagcaaagagccgcagcaacctagagaaagagcaaatttataagcgagtattgcatttaaatgagcagctgctaatgtttcaaaatggaacaagcttcaccattggcgatccgttaggattaatcgtagctcaagtgaaaaaaagtgatttgacaaccatatatatcgaacatatcattgataaacagtttatgtatgatggagatggtcatcgaggtgaagtagtgtaacaagatgacacctctatatgaagaagcgtacggagatactcgtacgcttcttcatatagagaattaaaaatatgttattttacaaatattaacaggaataaataacaaagttcaataaattaaagaagaacagtgaaaccatgaatagcaatcacctttttagctaaaaaatatagatacacatcatcttatgtaatgagatagttaagctttaaaatcaatgaacacaagaggttttataaagcttaaattgaaaaacgtgtgattgtgacgttaattagaagtaaggtttggaggacgctatggaaagcagaaaaaaattggatttacttgctcttgcttctgtgccacttatcatgaccctcggaaattcaatgttaattccggtattgccggtaattgaaaaacgtctacagataagctcgctgcaagtatccatgattatcacggtctactcaattttcgctatttttttaatcccgattgccggttatttatcagatcgatttggccgtaagaaaattattattcccagtttgctgcttgctgcagtaggaggggctttaacaggctgggcttcatggcaaatggctaatcctttctgggttattttaattggccgcgcgattcaaggaataggttcagcaggagctatgcctgttgtgatgccttgtgtaggagatatgttcaaagacgagcaagaaattacaaaagggctaggtttaattgaaacagctaatacgtttgggaaagtactaagcccaatactaggagcttttttagcggctatgatttggtttcttcctttttggttcattcctattctttgccttatttcaattcttttggttatctttttagtaaaagttcctaaaaatgatagttcttctgaatctgaacaaaaaaagaaaaatattacgcagtttttgaaggatttgaagaagacgctcaaagaaaatatgggatggctcatggctatttttattttaggcgccattattatgcttgtattattcggtgttttattttacctatccaccatattagaggagcgttatcatattgtgaatacgaaaaaaggtttagttatggctattcctttgctagcgttatctatttcgtcttttgtggcagggaaaaaagtaggaaacaataaaatcgttatgaaatgggctgctttttttggctttttattgttaacatgttctttcatcattttattttttaatacgtctctttttagtattttactcactttagtgcttggtggaattggaatcggagcagctcttcccagtcttgatgcgcttattacagaaggaattgaaaaggaagagaggggaactgttacgtctctttacagttcgatgcgctttgtcggagtagcagctggacctcctctttatacattgcttatgaagtggtcggacatggctgtgtttcaaacgtctctaggggttagtgcggtaggtgccattttagttttaaaagctatcaaaccaaaacctgaaggcggcgtaaaactgaagaaagctgaagtatgattttacggagctgtcttatgataaaagacagctctttgctatttaaagacccgtcaatatgcttaaatttatattgtgtctagaaaaaatccttaaaatttcttatacttcaatttatagacagcagatgcaatagttcttattttattgaataaggtggttttgaattgagtataaattatcagaaattaaaaagcatggtggatcattatcaaatatttgatcttgtagcatatataacagaagaagtacaaagccttcaaccaaagagccttgccgggattgtgaaagaatggttaacaaacttacaaacggaagaagagctgtacgagcttatccgcttttgtgatgaagctttattaaatcgtttaagccgaatgttaacgacatatggctatcgtcgatttggctcgattcgaatggtgactctttattgcgatgatctcctgcgcgaaggcaagatactcgacgctgatgatagactttctttattaatttctcagctggatacggaatcagttaaagaggaacagcttgagaaaatctattttttaaaggtaagaattcttttagaaatgaaacaagtggatgaagcttctaagtggatgaaacaagtaacgtcacataatcaaaagggtatggctgacagatggggatatttttatttgcagctcaacgacagaatgaaagctgaagcctgcttaaaagaaggaacggcatacaaggagaatggagatttttgctatgcaatgctcgcagacttatatgcgtatgaagggaagcataaacaatcgcttgaaacaattaacgaggctattgtccgctatccacagcttccgtctttatatatggataaagtgatgcgattaaaagatttaaaagagtattctctcttgcttgaaacgattgaatttatcgactcaaagttaccctatcacgattatcaagatttttttacgctgctgcgcgcggacatttattttgaacagcagcagcaatctcagcttacgcatctgctctcgactaagcgatgtttaaaagattcaccttatcaaaaattaatcggaaagtatacagacgataaattgagtacaatcaagcttcctattgtaccaattgttcaaaaagataattattgcgtgccagccagtatgagtatgatgttaaggcttttacataccgaaaaaacacaggatgagattggaacgcgtatttacggaggcttaggatccaaattatcaactgcggtgagctactttgaatctcttggctttgcagcgatgttttttacaggcacagttgaacagtttaaagaactattagacaaagggctgcctattttggtcagtctggaatttgaacaagcttcccacgttcaagttgtatttggctatgatgatgaacttgaactttttcatgtacaggatgctaattttctaagtccaacgtatgtagaatataaaaattttgatcagcattacgctaattcggggtttttatcaattgttgcttctaaagcggtagcggatctcgcttcactttctaaagagcaagatgtgtttattcgtcagctgtatgacttaatcgaactagttgaagcggatgaagggtcacacattaatgatctcgtttctttactaaaagcaaatgagcatgttccatttgccgctatttacagtatgaagcatttgtacagaaaagagcatgaagcctatattcgtacgtgtattaatcatgtgttagagaaatatagcaatcatgattatcttaagcttcacgccgcatatgccttttttaaacttgacgacagtaagggagcaacttccttgttacaccacatagataacaaaaaacatagctctttttatcactatcttaaagggagaattgcgctggatgaagagaaatatgatgaggctgttgaagcactgcgcagctcgctgcaattagacgtagagcagcatttgaactggagctatttagcacttgcatatatgtacaaaggaaacctcgaaaaggcttttgaatgctcgactatttccttaaatatgtatggcgatgaatcttatacacaaatcaatcacggacttattttaatggagaaagaaagatacgcagaagccagaaatcttttcgacgcgctattaaaagaaaacccaaaagatgcgcacagctggtttgaaagagcccgttgtgatgaacatttaaaaaagtttcgtaaagcttaccggggatttcaagtagctaaccagcttttaccgactgttccttatccatatctttcgatagctgatttgctacaataccaactagaaaaaacagacgaagctgaaagctatctcaaagaaggcatgaagcatctcccaagcgacatgacaattcgaggaagactcggcgatttatacgtcgcgaatcaaaggtacgaagaagctattgctctgtataaagaaggcttaaaaatagaagaagatgcccttatgtatttgggcttatcttatgcgtatctagaaacaggtgaacatttaacggccgttgatacgctcacgcttattgcgcagaagttttcatcgaacagcgacgtcatgttggatgcaggcagcatgcttttagatgcagcaaaacaaaaagagctagacaaccaaacgatagagtttggatttgctctttatgaagaaggaattcattttgctcaaacagcgctagatgaagtgttagaagcatatacgagttatttagaagacacggctttactgactcgcggaattaaatttttaactgcagaacatcaagagcaccctaatgagattttgtatatgtgctatttaggcatattatacgaacaagccaagcagttaacaaaaagtgagaaactttatcatcaagcgcttcgtatcaagcaagatgctttgccatattatcggttaggtgaaatatatcaatcaatgaatcgcatcactgaagcaaaagaggccttccaaaaatgtttaactcttgataaaacatttgaagctgcttgtatgaagcttgccgagattgcttgtgaagaacaaaatcgaacggctgaaaggaattgcctgcttcaatggatacagctgaatcctatggaagtaaatgttgagcacgctgcttcactttgtgaaacagagaaagagtatgaagagctgttagaggtattaaagagcatagaggaaattgtgctgcctcaatggctcgctgacagccaggctcatgtgtatcgcctaaaaggagatatttcacaggctgaaacgtatctagagagggcccttgaactagatccacagaatcctgctattcgccatcatcaggcaaaatggctcatcatggagcagaggtatgaagaagctagaaaaattcttacagagttacttagtgaggatccggaagattacgctttatttcaaacgttcatatccagctttccaaatggaaaaaaactgtctgggcttacgatagatttaaaaaagataaaaatggaaaaacacagcaaaagcatgctgtttaaaaacgcagccgaggctttaaatgagtatgccgattcgatcgtagaagagcagcaaggatctttcttcaaacgaagcttagcaaagttcaaagcaaaagcaaaaacggttacgctgcttggcttaacgattgaactgtatgaacttgctataaaaacggatagggataataaagaggctgtgcacgcatttgccgctttttacgaagagaaaggattgattgaagatagcatcaccgtactgaaaaaatcgctgcatcacagttgggattttgatattgcctatcatttagccaatatacttgtgaatatccatgaaaatgagcaggttgcacatgaagcattaaacttagttcaaaaacttcttgaacagcagccatatcatatagatttgcagatataccgagcatttattttgagtaaccttgaagaggtagaaaaatcggaggcagcttttcaagaattacttcagcaggaaatttatcagcctgacatatatgcaggactagcaaaactgtataataaaacggaacgttatcatgaaactgttccgcttcttcaaaaagcgattgaacagcgtcaagagtatgaagggatgtataccgatttaggtattgcgtatcatttagaaggtgaaacggaagcagcagcttcgcttatgataaccagagtagaaagtggagacgaagatctttttattcgctataacttggcatgctatctagctattcttggaaaaactgcttctgctcaggaagagttggattatgttttagcgcacgatgaaacgggagaattttatgaaatggctatggaagacgatgaactaaaaggattaacggtaagaagataaaaaaagaagctgagtttcagcttcttttttttatccctcttttgcaccttgtcttttcaaagaaatggattcggaaatttccagtacaagaatgataatggtgccaagaactaatccgttgcttaaaaacgtagtaactaaaggaggcagcgttgaaaaagcttgagaaggcaaaaacataacccctatccccgacagcaacgcaataccggcttttttcatcgctttttcgggctgtttggcatgcttgaattctccaattccaagagccatcatacctgtaaaaacaggaaagattgccgcgtatccgacggcaggaggaagagcggacataatggacgttaaaggagtaaagatactcagaaaaagcaaaagacacgatgctacaataaaaggaactcgactataaagatttgtagctgaaataaatccaccggaacctgaaataggcacggcaccgacacctgaaaacaatcctccaagcagctgacttatacccgaaaccatccccgaacgcttaatattgtctttttcaattttttctcctttgtgtttataaacagactcaacaacacgaatagaagcgagcatgttcgtaattaaaatgagcgtcacaaaaaaagcagtaacaaccatattccattcaacgcgaggagctccaaatacaaacactttaggtatgtaaaataactgcgcctgaaattcgataggtttagctaaccctagcattgcaaatactccccagcctacaccaatactaataataatgctgagcttatttaatgtccggtgcgataataaataaaaagtcagcagcaaaatcgcagctgaagccagcgcaattggaagtttaatagctgaattcgtttctgtaatgccaaacattccttttaaaaaggaaccgctgagctgcgtcactaataaaattaaatatgtaccggtaactgtcggggtaaagtattttgctagtttatcaatgagaccaagcaggctcatcaaaatagcaattatcccgcttataaggagggtgaactgcagcacgcggagcgtttcagagtgagaaccaaacagaacggttccaagactcgcatacagagaaaagacgccccaccaaacaccagctggcccttccatgatggggtatttatgccctataaacacctgcaagagcccggataaagccaaaataaataacgttcgctgtaaaaattgaatagaatccgctgcgtttaaatgaaactgagaagcaattacaataggaacaatcatactattagaaatcataaataaaaaccattgtagtgaagcaatggaaactcgaaacattcttaacacctcaattaatgccgacgagcggctgaatgaaccaacaggctgctctactattttaccatgggatttccaatttgtaagcgatatcttgttaaaaggaggaggaggagtaaagtgtcaaaaaattcaatatattgttgtaaaaagaagaaagataatttataattttcttacaattataaattataaacataagaataatttataatgaactgactaacagtcaaggaaggaggagaaataagacaaatgaaactatatctgtcggttgatatggaaggaattacgggactcgtcgatcacacaaatgttctgcgacagaaagaaaattatgagagaagccgcaaaataatgacggatgaagcaaatgcagtaatttatgcaggatttagagaacagtgctcagaagttgtggtaaatgacagtcattcgagtatgaataatctccttgttgaacggcttcatccagaaactcagcttatttccggaagcgtaaaaccatattcaatggtacagggattagatcagacttttgatggtgctatgtttctagggtatcatgctaaagcatccatgtctggtgtcatgtctcattcgatgatatttggtgctcgcaatatgtacatagacgatacgaatattggagagttaggattcaacgcatacgtcgcaggctattacggcgttccagttttaatggtagccggtgatgaccaaacggcgctggaagcacagcagcttattccaaacgtgacgactgctatcgtcaaacaggccatttcacgttctgcagccaaaacattaacccctaagaaagcagaacaattacttcaagaaaaaacagccgcagctattcaacacaaacaccttgttaaacctttaattccacctaaacatccaaccttacgaatagaatttgcaaattacggtcaagcagagtgggcgcatttaatgccgggcacagaaattgagcctggaacgacgaccgttcggtttcaagcaaaagatattttagaagcttatcaggccatgcttgttatgactgaattagctacgcgcacaacattctgttagaaggtgggataaaggtgaaaagttatattttgaaacgatttttatccatgcttgttacactgtgggtaattgtgaccttaaccttctttttaatgcattcgattcctggatctccatttaatgaagaacgagcgacaagcgatgcaattcaaaaaaacctggaatcattttatcacttagatgagccactagctgtgcaatatattctttatttaaaatccattgttacctttgactttggtccttccattaaacagccgtctcaaacggttaacgaccttttaggaagagggtttccagtgtcatttgaacttggaatggtgacgttaattcttgcggtgatttccggtcttacactaggcattatcgctgctcttagaaggaatggaataattgattacatggcgatgagcatagcagttatcggattgtcggttccaaattttgttatggccacgttgttaattcaacagctttctgttaatttgaaaattttacctgccgctacgtggacgagccctttacatatgattcttccgactctagctcttgccacaggtcctatggctattattgcacgtttgactcgctcaagcatgatagaagtattaactcaagattatattcgaacagcgcgtgcaaaagggctttcgccagtaaaaattgtatttaagcatgcgcttagaaatgctttaatgcccgttataacagttcttggaacgattgcagccagcgtattaacaggcacatttgttattgaacaaatctttgctattcctggcatgggaaaatattttgtggacagtattaatacgagagactacccggtaattatgggcacgacggtcttttacagttcgattctcatcattatgctttttttagtagacattgcttacggaatacttgatccacgaatcaaactgtataagaaggagggataacgtgctggaaaaacaggagtataagcaaattcctgatgagtggtttgtgccaaagaaaaaaaagaaatctgaagctgaagcagttgtaaggccgagtctttcttattggcatgatgcttggcgcaggcttgtaaaaaacaagttggccatgctgggtctcttttttttagtcattctcgtggtgatggctatattcggtcctatgttttcaccctacagtgtaacgaaagcttcttttacagagcaaaaccttcctccttcagctagtcattggtttggaacggatgacttaggcagagatatgtacactcggacatggtatggagctagaatctctttatttgtaggactgatggcagcgcttattgattttatcatcggtgtcatttacgggggattctcaggctacaaaggcggaaaaacagataatgtcatgatgcgcgtaattgaaattttatacggtcttccttatttattagtggtgattttactaatggtagtcatgggccccgggctttctacgattattgtggcactttccgttacaggttggatcgggatggcgagaattgtacgggggcaagtattgcaaataaaaaactatgaatacgtgcttgcatccaaaacgtttggaacaaaaactagtcgtatcattaagcgaaacctccttccaaatacgatgggaccgattatcgttcaaatgacactaaccgtaccaactgccatttttgctgaagcttttttaagctttttagggctgggtgtacaggctccttatgccagctggggagtaatggcaaacgatggtttatcaacgattctatcaggctattggtggcgtttgttttttcccgctttttttatttctcttaccatgtttgcttttaatgtccttggagacggactgcaagatgcactcgatccgaaattaaggaggtaagcaaatggaaaaaatgatccaaatcaaaaacttacacgtacagttttcaacttacggagggcgagttcaagctgtaagaggcgttagttttgatttacataaaggagaaacactagcgattgtgggagagtcagggtgcggaaaaagcgtaacatctcaaagtattatgaggttaattccgacacctccgggcaggatcacaagcggatctattttatttaaaggccaggatttaacgaaactatcagaaaagaaaatgcgagacattcgaggcgctgatatttcgatggtttttcaggatcctatgactgcgcttaatccaactcttcgcgtaggtgagcaaattgcagaaaatattatgcaacatgaaaacatttcaaaagaaaaagccaaagaaaaagcatttgaaatgctggagctagtcggaattccaaatcctaaagaacgcctaaagcaatatcctcatgaatttagcgggggaatgagacagcgtattgtcattgcaatggctcttgtatgcaatcccgaagtgctaattgctgatgaacctaccacagctcttgacgtcacgatacaagcgcagattttagaattgtttaaggatattcagcagaaaacggatgtctctattgttttaattacccatgatttaggtgtagttgctcaggtagctgaccgtgttgccgtaatgtatgcaggaaagattgtagaaattggaacaagaagagacatcttttatacgccgcagcatccgtatacaaaaggattgctgcgttcagttcctcggttagatttatacgaaaatgaacttgtgcctattgcaggatcacctcccgatttatttgcacctccatccggatgttcgttcgcacctcgctgtccttacgtaatggaagtgtgtgaccgcatgtatcctgcgtcgacaaagctgaaagaaagtcaccaagtgcactgctggcttcaagatgagagagcccaaaaatttgtaacaactataagctagatttatagatgaatagagaacttatgaaagagggggaaatgatgaaaaaaatagggtctttactaatgatgtgtgtacttatatttgcacttgctgcctgtacggccacaaaagattcaggcgcggagccagaaaagaaaagcagtacagcaaaagaagacggtaaggtcctttatatgaataatggcgcagaacctacgtcttttgatccacctattggatttgattcatattcatggaatatgcttaataacttaatggaagggctgactcgtttaggaaaaagcgatgagcctgaaggagcgatggccgagaaatgggatatctctgaggacaaaaaggtctatacgtttcatttacgaaaagatgctaaatggtcaaatggagatgacgtgaaagcaagtgattttgtatttgcttggaagaggctgttagatcctaagacgggttctccagcggcatttttaggttatttcatccaaggtggagaagaatttaatacgggtaaaggtagtgctgatcaagtaggggtaaaagcgctagatgacaaaacctttgaagttacgcttaaaagccctcaagcctatttcttaagcgtagtttccaatccagcgttcttcccaattaatgaaaaagtaacaacaaaaaatccgaaatggtttgcagaagcagattcgtttgttgctaatggtcccttcaaattaactcaatggaagcataacagtaatctagtcatggaaagaaacgatcagtattgggatgctgaaaatgtaaagctcgacaaggtaaaatgggcaattgttgaaaatacaaacacagaatatcaaatgtatcaaaatggagaactagatgtttctgaaattccatcggatttaagtgaaaagctgctgaaagatggagatgttcatatcgaagaccaagcaggaacttacttctatcgctttaacttagataaagagccctttcaaaacaaaaatatccgtaaagcatttgcaatggctgtagatcaagatcaaattgttaattttgttacaaagaataaagaaaaaccagctcgtgggttcgtatcttacggatttaaagctgcagatggaaaggatttccgtaaaacgggcggcgatttattaaaaacagatggcaaagaagcaaaagcactactgaaaaaaggaatgaaagaagaaggatataaaaagctgccagctattacgctaacatacagtacagacgatacgcataaaaaaatagcagaagcactgcagcaaatgttcaaagaaaatctaggcgtagatgtgaagcttgccaatatggaatggaatgttttccaagaagaacaaaaagcgttaaagtttcagctgtcacgaagttcatttttagctgattatgcagatccaattaactttttagagagcttccagacgggtcattcaatgaaccgtacagcttggagtaataaagaatatgatgagttaattaaacaagctatgaacgaaacggataataaaaaacgttttgagcttatgtataaagcagaaggtattttatttgatgaaatgccgatcattcctatccatttctacaactatgtgtttttaatcaaagataacgtatctggaattgttcgtcatcctgttggctatttagatttgaagtgggcagataaacagtaaagtggaacttttcgtcagaggggatttcaattcccttctgacccaagtttcactttcttcatttctttacacaaaaggagtgtaacaaatgataaaaccaaaaccattacaaaaaggtgatacagtagctgttattgcacctgctagtccgcctaatcagcacaatctaaaaaaaggaatagaatatttaaaagaaataggattaaacgtagtaacaggcgcgcatttatataaaaaaaacgggtacttggcagggactgatgaacagcgagcagccgatatacatgcgatgtttgccaataaggaagtaaaggcaattatctgtgcatgcggagggtacgggactgctaggcttgcctcacaattaaactacgatttaattaagcgaaacccaaaggttttttgggggtatagcgatattacgtttttacatacggctattcatcagcgcacaggtttggttacctttcacgggccaatgctttcgtcggatctcggaaaagaagatgttcatatagagacgaagcaagctttttatcaattattttctcaccgttctttgtgctatacggatcaaattagtccgctcgacactatttgtgaaggagaagcaactggtcagctgataggaggaaatcttactttgctggtaagcacgcttggcacaccatttgaactagatacaaaaaatcgaattttatttattgaagatattgatgaagagccttatgaaattgaccgcatgatgacacagctgtatatggccaataaactgcaggatgcagcgggaattattatcggagattttcataactgctatcctaaaaaacgtacggagtcgctttcattagaagaggcattaacaagttacctgacttctttaaaaaagcctgttatgagagggtttcgcatcgggcattgctctcctcaaacagctgtggcgattggaagctatgccacgatctcgacttatgaacgaatggtggaatttgaatccggtattacattaccaaaagataaagtcgaacgctgaaggttaaacctggggggaggatagataagtgatggataaaaaagcgtattacgtttgtgtagctgtggcgactgtttggacttcctatgactctagcagagaaatagatgacaatgcaataagtttcccagtaaaactggataaatggctagaacaattaacgtatacacgccggttggagctttgtgagaaaaatttagttcaaacgcagctgttactaggagaagaagtatatgtaacggaaatgaaaggtaaatgggcaaaaatcgttattccttctcagttttcttctaaagatgaaagaggatatcccgggtgggttcctttccaccaactgatttctcaagctgaatattttccattgaataaaccaacggcagtggtatcagcaacgattgcgaccctgcacctagcggaagaagccttgcaaattagttatcaaacgcagctgcctcttttaaaagaagatagagaatggctagaagttcaaacaccggttggcagtgggagaataaaacgtcaagatgctgttgtaatagaggatagaaaccgtaaagtaaaaggaactggggatatgattattgcagcaggagaacagtttttgaatcttccatatttatggggtggcatgagtgcctggggatatgattgttccgggtttgcctatgctactcataaagcaaacggatatcttattccaagagatgcaaccgatcaagcaaggcaaggaaaagaagtagggttagcctctattcaacctggagatttgctgtttttcgctcatgaaaaaggtgaagggtctatccaccatgttggtatttattatggtaaaggaaaaatgcttcattcacctaaaacaggtaaaaccgttgaactgattgaattaaaaggaacgctttatgaagaagagctgtgcgcagcccggcgctattattaggaggtggcagttatgacaacgaagcatttgttggaagtaaagcagctgagcaaatattttccgattacgaataagcaggttttgaaagcagtagacggcatgtcttttcacatttcaaaaggagaaacctttggacttgttggtgaatccggctgcggaaaatcaactgccgggcgaacaatcattgggttgtataaccgtacatcaggagaggtgctttataaagggaaaaacgtgcatgagctatcagagaaagaaaaatttgcttttcatcgtaatatgcaaatgatttttcaagatccatatgcttcactaaaccctcgttctaccgtgaaggagattatctcagaaccaatggaggttcacggactttattcgaataaaaaagagatgctgaaccgcgtgtatgagttgctagaagatgtcgggctaaatcgtgatcatgccaatcgctatcctcatgaattcagcggcgggcagcgccagcgtatagggattgcgagagctttagcactaaatccagaatgcattattgcagacgaacctatttctgctttagatgtgtctgtacaggctcaagtagttaatttattaaaaaaactccaaaaagaaaaagggttaacttatttatttattgcacatgacttgtcgatggtaaagcatataagcaatcgtattggagttatgtatttaggacatctagtagaattaacaacaagttcggagctgtatcaaaaaccgcttcacccatacactcaagctctactgtcagctattcctatccctgatcctgacgttgaggataatcggaagcgaattgttcttaaaggagaattgccgagtccaattaacccgccctctggctgcgtgtttaatacgcgctgtcctcttacagtagcagcctgtaagactcaaaagccagagtggcaggaagttgaagaaaatcatttcgtggcctgtcacttatacaaccaaaagataataagtaacaactatattgaaacagctgcaacaaaataatggaaaaagcaaggatgaaaatagaagatgcagttactacatggaagcggagtaataatggacttatacgtattcatattgaaggaaaagaatccatacagattaattcttttatccaacaacgagcagcaagtacaatcaagctgctgcttgcaatagaagcgtttcgtcaaattgatgagggtatcttggctttaacatctgtcattcaaagaacagaaaaaaacacggttggcggagcaggcgtacttagagctcttccgcggttaacacatattaaagtggaagagctgcttacccttatgataattgtttctgacaacacagctacaaatgagctcatttctttagtaggatttgaaaaaattaacgaatgtgctaaagatctaggattaaagaaaaccgttttaaaccgctatatgatggacgaaatcgctgttggaaaagggattgataattatacgtgtgcctctgacgtagtaaagtgtctaagggaactacatgaaggaaactttttgcgaaaatctagtcgcgaaaaaataatgagaatgttagaaatacagcagtttcagcataagcttccagcacgtataggatcagcgtttcaagctgcgaataagactggagaactacagggagcagaacatgatagtgctattctcatgcgaggtaacgaaacgtattatgccgttgttttgatagatggactaagtgacaatgaacagggaaggagattaattgctgatattggataccttctgtcatctaacatctaaaaatcttttgaccatatacttcaataagcgggattggtttggtcccttttatttaatgtcttctatcaaagaaaaactcacatttaccactaataaatgcttgtcttctcagattttggcgagaccgttgtttgctgtgctggatttgtgctagtaatagataaacatgttctttttcataaaattttatgaaaaaataatgataaatcattcatcctataccaacttattcatattttttatataatagaataatagtatatattttaaacgaatagtgaatgtctatgcaaagcagcaaggagcatgaaattattcgattcataaatggtggtgtatgtatggcaaacgaacatgtaatgatagatattataaaagcatttaaacgcaattcaactgaatccattgccatggatttaattaaagaagtgcgagggacatttagtccattacctaaatatatagcggatttaattgatgagctgagaaaattaaatttaaaagacgaagtgatcagtgtaatcttgtatcaatccgtatatgtggcagatcatcaatttaatattaaagataccattaccaatcgtcaatttgtaaaagatacgattgaaatgggcagaagatgggtgcatcagtacggccgaattgaaacagtagaagaagcaattcatattgcagagcaagtatctacaaaagaggacttgcctcatcatttgcaaacagcaacaattgacgaaaaaattacgcttgaggtgcagctcgatcatcaaacgtatgaaatgttaaaaaatatagcggtttattatgatcatcattcctatgaacagtcaatgactgtagcaattaatcgtttatatacgcagctgcgcgatgcacaatcaaaaaatagttaaatgtcaaatctcacatgttccgtgcaccatgtgagattttttaagaggtgaaagaggcgcagatgaaaatgtcttgctccatcattcatcaaaaggagggagaacatggatgagggtatatttatctcctcttcaaaaaaaagatgcttctaaagtttttgaatattggtcggatgaagaggttactagatatatgaatattgagccctttacgacgctttatcaggcggaaagcatgattgcacttctccaaagtttgacgaaagaagggaaagcaacacgctatgctattcgattaaagacttccgatgagatcattggaacctgcggtctaaaccgtattgattatgttaaaaagcaagcagagatagggtatgatttaggcagacctttttggaaaaaaggcctcatgatagaagcgctctgccttttgctagaaaaagcttttgaagagtttcatatacaagaaattgaagcaaaagtcgatcctaataataaagattcaattactcttttaaaaaaattctcgtttcaactagaagaggcgtatgagtcagatgattgtacttgtttatacaccgtcaacaaggaaaaagtgagcgcgatattgtcaggacgttcaaaaggtaagaagtaaatcaagcataagttcttttgaaatagtaaatatttttaggccttaaccgataacaaagaaaagaacgaattgaaggaaggtcatgaatgaatcatcatacacatttactagaagggacgtacaatgagttactcgttacactctctttccttatcgctattactgcggcgtacgcttcttttgggttagctaatcgtgtgaaaatttcccgggcaaaatttattcagttttggttaatcagcggggcatttacattgggaataggcatttggtcaatgcattttatcgccatgcttgcttttcacttgcccatagatgtttcatataatttatggtttgttcttctctcaatcttgggagcgataacgggatgttatataggcctctacctcattcacaaacaaaagaaaagtataaaagcacttatcattgcagggagctttatgggagctggaattgtttttatgcactatttgggcatgatggctatggagccaattatgatttcatatgatccatttatcgtttttctctctattcttattgctgttgctgcttgtaatacagctttgtggcttggtttttactcaaagctaaatgaagggaagcttaccgtttttactaaggttatttgttctactattatgggcattgctattgcaggtatgcactatacgggcatggaggcagcttctttttcaggaatgtcaatgtctgaacactcaaacggttttgccttaaatccaatatatttatccgtcgttattgttttttttattgtctgcctatttacggctgtgtttttaaccgtttttatggatcgacgcgtacaaaaacaagaagttttaaaatgggctttttttgaatccgccctggatgctattttggtgatcgatgaaaaaagacatgttttatcgctcaattatgcagcggaaacgcttttctctcttaaagcatcagatgtaatcgggagtaatgttgttaagctgctgcccttctatgaattttcttctctacaagatggacgaactgagcactcccttttgataagtaatagagaagtgacggttgagataacggtgatggcggtaggaattgaagagacggttgagtatatgctgtatatccgcaatatgacgcaagagcgcgaagcggaaaaaacgttgattgaagcaaaaaatcgctatgaaaacttgttttactcctctccattggcaattatggtccatcgagaagaagaggtcgtgtctgtgaatgatgctatgattcagcttttaggagtaacggaagaccagctcgttggtaaatcgttatatgatttcttttcatatgaacaagttcctgatattaaaaaaggattgaaggcagtaaaggatagaaaagatgagccaagacctccattagctcagttgaaaatgtttaatgcgttaggtaaggaactctttttagaagtaaaatctacgctcattcaaattaatggagagacgctttttcagacagtaactagagatgtaacggagcagaaaaaagctcaagaatcgcttcaatatatggcttttcacgatatgctaacagatttacccaatcgaagtatgttttcaaacattgtagagaaatccattgattcagcagcagcttcaggaaaaaagcttcatttcttatttttagacttagatcgtttcaaacaggtaaatgacacgcttggtcatcatgccggagatcagcttatgcttcaggttgttgatcgaatgaagagctgcctaagaaaccaagatgtgctttcgcgttttggaggagatgagtttttagttttactgcatgataggacggatgaagaagtgaaaaaaatctgtcaatcattaaatgactgcttatccactccttttgtagtgctatcgagagatgtttatttaggggtaagcatcggagttagtttatttcctaaagatggaaagtcgcttgaagtgctagttcgccatgctgatttagcgatgtacgaagtcaaaaaacaagggcgtaatcattatctgttttatcaaaaagaaatgcaggttcatactacgcgacgaatgagaattgaagatggtttacgcaaggcttttgagctgggcgaaatggagcttcactatcagccgaaagtcaatattcaaagtggccatattgttggagtggaggctttaatccggtggactcatgccgagatgggcgtcatttctcccacagaatttattccgattgctgaagaaacaggcgttattgttacattgacgaaatgggtattaaaaaaagcgtgctatcaaaataagtattggcagcttcaaggacttcctcccttaaaaatgagtgtgaacatttcaagcgtggattttggtacaactgattttgttgattatgtgttagatgtcttgtgtgaagtagagttagaatcacgatatttagaacttgaaattacagaaagtgtaacgatgaagcacgttgagcaaacaatcgaaaagctacaagtcttaaaagatgcaggagtatttatttcaattgatgattttggctcaggatattcctcgttcagctatattcaaaagttgcctattcatacgctgaaaattgaccggtcttttattaaagatttagatcctaatacaacggaagtatcgattgtcagagccattattacactagccaaaagtttgcagctatccgtcgtagcagaaggtgtagaagaagttgaacaagtagagcttcttcataaagaaaaatgtgatgaagtgcagggatactatttctccaaaccgatttcagcggaggaattttatgagaaatttcataaaatcgaagaaaaaatggaatttgttcattagtgtaaaaagccgttcttatttaaaagaacggctttttattattggttatttcgatatacataagggttatttggagcctgttcacgcttcacttttgttactttcaaaacaggaatggtttttttgaacggctgataatacattgtactgacttcacccgtaacagttgcccagtcatacaaaaggaagggcttcgatgagaatactaataaatatagtattcatttgtaatagagacgaattcactatcttcactccaatattaagattatttaaaggtgcattagtgcaataaagtagaatgtgggcaaattaaagatagtgtatcgtaaaaaaggaagggaataaagctttttcaagaaagggattaaaaggatttttctgttatttattcaaaaaatgtcccatattacgagaaaactattgacgcacctttaattaacagataacattggtgataatgattatcagcgtcaaaaagagtatatacataggaggaagcgttaaaatgaagcaaattaaaaaggttagacttgtcactatagctgctattgtttctgttttatttgttctagcaggatgcgggtcaacccaaaattcatcaaaagaaaattcagataatagtcaaaaggtatctgttcagcatgagcttgggaaaacaaaagttcctaaaaatccaaaaaaagtagtggttcttgaactatcctttgtagatgctttgcaaggcttaggaatgaagccagtaggaattgcagacgacaacaaaaaagatatgattgaaaaactcgtaggtgggaagatcaattatacttcagtaggaacacgtcaacagccaaatttagaagtaattagttccctgcagccggacttaattattgccgatgtgcagcgtcataaagcaatctataaagaattaaacaaaattgcacctacaattgaattgaaaagccgtgaatctacatatgaagaaaatatagactcatttaaaacaattgcgaaagcagtaggaaaagaaaaaaaagcacaacagcgcttaaatgagcatgaagaaacaattttaaaattaaaaaatgaattaaaagaagaaagtggtcagacagtcttaccagcagttgtcagagatacttctttccaagcgcatacgtcttcttcttatgatggagagttccttgaaaagctagggttgaagaacgctgtgcaaaacaaagaagcatatgctgagatgaatttagaacagttgtcagacattaatccagatattttaatcctagcaaataacgaaggtaaacttgtaacggatgaatggagaacaaatcctctttggaaaaatttaaaagctgttaaaaatgataaagtttttgtagtggaccgtgatttatggacaagattccgaggagtgatttcagctgaggcaattggaaaagatacggttaagttactaaacaataagcagcagtaacataacagagtctgacaaagaggcgagaatagttattctattcttgcttctatttgtttagaaaagaaaactgtagaaagtgtgttggaaatgacaaatcttgtcaaaaagcaaaaaatgaataaatacattgtgttggtagctagcgtttgtttgttaatcatcggaatgattttgcatgtggctgtgggatcttctgctgtcaactttacagaagtaattaaggcaatttttgcgcctgatgactctaagcagacaacaatcgtacagacgcttagactgccaagagctgtgctcgcagctcttattggagccagcttggcagctgctggagcattaatgcaagccattacacgaaattcacttgcttcaccccaagtgtttggggtaaatgctggtgcttcattagcgattgtaatagcttttattttatttcctgatcttacctctcaattaactgtgtatattgcttttttaggagcagctttaggaggaattactgtttatttgttcgcatcgggcggaaagacaactcatgtgaaactagcacttgccggaatggccgtacatttatttttatcgtcacttactcaaggagtaattgtgttaaatgaacaagctacggacgttttgtattggcttgtaggttctattaacgggaaagactggactcatgtaaaaattcttttaccttggtcgtttctaggtcttctcctagcttttggatcatctcgttctatatcgatcctagtgttaggagaaaatatggcaacagggttaggagaaaaggtaaaatggattcgcttttttgcaggtatactagttattatgcttgccggtgcatctgttgccgttgcggggccaattggatttgtaggtctcattgtacctcacatagctagaaaattagtagggggagactaccagcggattctgccattttcagctctattaggagccatcttgcttgtttatgccgatgtactgtctcgtttcattgcctatccttttgaatcgccagtagggattgtaacagctcttattggagcgcctttctttttataccttgctagaaaagggaggaacattaagcaatgaaaagaaaacgtccttaccaaatcttaagtatcttattattatgtttaataatcacggttgtaattagcttaggggtaggagccgtttatatttccccagcagcaatctttcaacaaataaccgggagttctcaagaaagttcatttattttaacaaattatcgtattccacgcaccctcattgctattgttgtaggtgcggctttagcggtagcaggagctattttgcaaggaatattaaaaaacccactggcatctcccgatgttatcggtgtaacaaaaggagcagggctattcgcagtttttatcttaattgtatttccaactgcttctatgcttctgttgccactttcagcttttttaggagcagcagccatagccgttatacttatggtgttttcctactctcaaggagctaaacctcatacgctggctttagttggcgtagcgttaggagctatttgtcaggctggaattcagtattttatgattaagtttccagatgacgtgaatacaactcttctttggctcacaggaagtttatggggaagaggctggagtgagctttggatgttaattccttgtgttgtactcgtgccttttattattatatttgcatctaagctcgacattttaaacttaggagatgagattgcagttggcttaggagagcgaacgaaatacgttcgttatacactattgagtatggctgtgatattgacagggttatctgtagctgtggttgggtcaattggttttattggtttaattgctcctcatattggtaggaggttagtaggaagtcgttcgaagttcttgttaccagtttcagcagcagcaggtgctttattcttgctaattgctgacagtttagggagaggggttatgccgcccgttgagattccagctggaatcgtaacagctattattggagccccttattttctatatttactgcgccgtgaacagaaaaaatagaggaaaggagaaacagtaatgacaaaattaactgctgaaaaactttcactatcatatgattcaacttcagttattcgtaatattgaccttcacattccagaaggaaaggtaagcataatcattggatcaaatggctgcggaaagtcaacaatccttcgttcattggcccgtttattaaagcctacagaaggaagtatatatttaaatggaaaagatattcatcgtcattcatcaaaagaagtagcaaaaaaactggctattttgcctcaagctcctgaagctccggaagatttaacagtaaaagagctgtgctattacggtcgtcaccctcataagggcttatttgctcgctattctgctgaagatcatcaaattgtagaggaggctttacaggcaaccaaactgtctaatttaagtgatcgtacactggatgctctctctggaggacagcgtcagagagcctggattgcaatggcattggcacagggtaccgagcttctgctgttggatgagcctactacatatttagatttagctcatcagattgaagtgcttgaacttcttcgttccttaaaccaaaagagaaagtgtacaattgtgatggtcttacacgatttaaaccaagcagctcgctatgcagaccatttaatcagtatttcaaacggtcagatttacaaagaaggttcttctgctcaagtatttacagaagaaatgataagagatgtgtttaatttatcttcaactattattcaaaatccggttgatggttcaccattatgcatcccaactggaatcataaaataaactgcattttaaaacagcgtactatttttacatagtacgctgttttacatttaaggtcagagctaacagtctatacaatatatagattccaaggtatgcagcggttaataaaaaagctgaatttaaaaagattgcatgaatgctcgtcataaaaacagtatggttttttaagatacgatagatagaagcagcagctatatttccaaatactagcgctgaaagaagggctagcgtattaaaaactagctctgctcctttccatttgagtgagaaaaagagcatgataataggaacaataatacttccagaaaccaacagaaaaatcaatggaccatctccaatacgttatcttattacagttacataagataatgtttttgcttatttttagatagtcttccctttttatagtctgttaagcttttttcttccatttttcacttatgcaaaaaagtaaaatgatggataaaatcattaaaatgattttgccttgcatagatccttgtgaaatatgataaaccgaataaacttcaataaaaagcgctggaattttcccaagtgcgctagcagaaatgaataccgctgtacgcgcagcagctttagccacttggagtgagaaggtgtttttgtatgaacaagcgtatggaaaccttttcgatacagccaaaaagagagagctgcatctaaaacttctccaataaaagaaagtaaaaatccgttccaaaaaccaaataattttacgtttacgaacgtaaggggtgcgcttggaaatacgcccgtaatgctaataaggatgttcaagagaatgctgataaacccagctgcttctaaatgttcaagcagaaatgtttgaagatagtcagtcatggttatactcccatttatgttttacttgtagggctattttagatgactttctactattatataatttttggcatgaaataagtaggcaagcagtttataaaaaacgaaacagggtaactacttactaatgaaagatgatttactgatttgaaaggatggacaactcatgttgaaatttttgcttgttattgtagttgtattattaattattatgatttttaaacgctttatccgaaaataaaaatgctaactaagcagctcgtgagatctttctcacgagctcttttgcggagctattcagtagctcaacaatacactttttacctgtgatgaatatcactgcagctagagaaatgaaggggtaagatagaaatgggagggaggtatatggaattattattctatctcagcacttatttatcagggggagctatcgcattatggctaattaatgcagcatttaatggattattaaaataacagagggagagaaaatgaacgattctaaaggtatatttaacgataaagaaagaaagattgctcgctatttggagacgtacacaactgagcagattttaactgaagcaggcatgtcttcgtctgctgcgctatatgagttgaaaaaaataagattaccgagggcagttgctaatacgattgtttattacgtactggcaacaaataatcaaaagctggttatgtacaaactgctcatgttagctggcgtttgtaaaaagcttggcattcaagatgcacaggcagccctcacttttatcaaaaaatattacgtttgtcatcagcatttacactaaaaagtacatctgtctgagggggaaaagagatgaatattgtcccgtttaagcagcgttcatctgcaaaaaatgatcaaggcagagaacagccgtttcaatgtttcattgagggagatcgatttcagttagatttgtatatgacatatttatttcatcgctgccattctagcaggtataaatatagccgtgctaacagaaagggtaggatgtaatgataagataccagtggtaagcggcttcatttttcctgatggaataatgaagccgtttgttgtgttagaaagaatggtttactatgatgtagttaatgctaaaagaaaaaggaagggaaggaacgtaatggatctacataagtgggaatattggatttcaaagcttgagcttcagcctcatccagaaggagggttttataaacaaacctattgctccaatgatgaaatttctgatgaagaagtgtcatcgcagtttgatgataaacgatttttatacacgagtatttactttttattaaggtctcaagatgtatcgcatttccaccggctgcaatcagatgaactatggtactatcatgggggaagccctttaaccattcatattatttaccgcgacggaacctatcaagaagtaaaactaggtacaaacttagaaaatggagaagttcctcaatttttagttccaagagatacgatttttggttcctctgtgacaaatgagaatacgttttctctcgttggatgcatggtcgcaccaggttttgatttccgtgactttgaattattcacaaaacagcagctgcttgatgaattccccgagcatgttgtgatcatcgacaaattagggtacgataaattgccaaatgattaaaaagcatgcatctcggtttgatgcatgcttttttcatttgaaccagcctttttccttaaagcgagtaatggcttcaatgcggttctttacttcgagtttgtccagaatggtagaaatataattgcgcaccgttccagtcttaatagatagttcgtcagcaatttcttttgtgttttttccatcagctactagagctaatacttctttctctctagctgtaagaggactggtagattcactatataagtcatccactaattctggagcatagaggcgtctgcctgccatcacgcttcgaatggaatttgcgagttcttcacttggactatcttttagcaagtatccgcttacgcctgctttcaaagctctttgaaaatagccggagcgagcgaacgttgtcaaaatgatgactttgcagtttaaatctttcagttcctctgcagcttcaagcccagttttaagaggcatctcgatatccattacgcatatatctggctggtgctgcttagcaagtgataccgcttgttccccatttgaagcttttccgacaacttccatgtcatcttctaaatttaacaaagagcctaaagcccctaacatcatttgctgatcttcggcaatgacaattcgaatcataattgttcctccttaatatgtttaacgatgtttggaactgtaatatgaataatcgtccccccttgactggagatatcaagatgaccgtttacaaactccagccgttctttcattcctaaaagaccgtttcctttccagcaggtttttttcgtattaataccaactccattgtcttctaccgttatgcctacttcttttgcagactgatgtaaagtaatcgtgcaaacggtggcttgactatgtttgaccacattggttactgcttcttttaagcacatgctaagaatattttcaatgagcaaagacacattctctaatgaaatggcctcttctcctacaaacttaatttcggcagcttctaaaagctcttgaacgcgttttagttcttcactgaggcggattccacgcatttgagaaaccatgtttctcacttcattaagagccgtgcgcgctgtttgctggacatcttttaattctgattttgctttttcaggatcttttgtaataagttttcttgctaaatcactttttagaccgataagagacagcttttgtcctaacgtatcgtgcagatcgcgagctatccgctggcgttcttcttgttttacaagctcagaaatacgtttatttgcatcttcaagctgttcttccagccggtctcgcttcttccgattataaatgctaaatggcagtacaatcacactgatggaaattacaaaaatgaaaggcagctgttttaaaaagatctcttcttgcataacaacgttaaagtttaccgaaataacggtgctaattaaatgaacagcatacaaagtaaagaaagcgagccgtttttggatatttccaataaaataagcgataaagaaagcaaagtaaaaggcgaagtaaatataattaaaaatagttgttagagctaaggaaataacgattaacaaagccgtccatacgtaaacggacttgtctgttgaaacaaatgcaaaacgatagaaaataaaaaataagatggtaagtaacgaaccaacaataatgtgattcatggatgaagactgtaagataaaataaaatggtaaaatggcaaataccgtccatatgtaaggagatagcccagtgattttttggaaaaacgtatattttttcataaagaacctcgtttacttgttaaaatacactattagtttaccacaaagtagaatgaaataagtttagatggatagataaaacagtcaagcttttgaaagcttgactgttttgttttattaaagttctgcttttgtttgagatgaaattctgcttgcttttggtgcagttgagcgtgtttttatttctttaaagctcacaaacattttgttttcttcatcccatagacggaatcgaagagagcgaagacttgttgcgagtgtaatggttggtacattctgaagaggctgtgtgtgttgatgaacagcttcaagcttatagttgggcactcttgggcttaaatgatgtacatggtgaaacccaatattgcctgttagccattgcaatagttttggaagcttgtaaaatgaacttccttcaacggctgcttttacataatcccagtgctcatcttcttcaaaataagaatcttcaaactgatgctgtacataaaacagccaaattccaattgaacctgaaatgaagaaaatcggtccttgaattaataggaacgcctgccaacctaccaaccagcaggtcgctgctgctaatgcaacgatcaatacgtttgtaaggtacgtattcattctttcttttttcttcgcatttttttgattgaatcggtttgtaatcaaaaatacatatataggtcccacgccgaacataatgaacgggttgcgatagatacggtaagcgatttttttccaaatagaagcttctttatattctgttacggttaacacccaaatgtcacccgtacctcttttatctaagttgctgcttgttgcatggtgaattgcatggctatgtccccattggctgtaagggaacatcgttaagacaccggtaattgttccgagaattttattgtgttgtctactcttaaagaaagagtagtgacaacagtcatgaaaaataatgaatattcttactaaaaatcctgctgcgataacagttagcggaaatgctaaaaaataagaaattgaaaggctctcataagcgagaaaccacagtgtgaaaaaaggtaaaaaagtattgatcaattgtcttatactgtctttcattactgctttttcaaaaggtgcaacttgttttcgtaaattcttttgtttttgtatagtcatatgaaattcctttcatcaccgtatattaccctcagtataaagggatttttctgactatttaagacatacgtgtcatatagaaactatgacagttgtcatatatacgtagggggaagctgtaaaaaatgaaaaaaagcggtatttaacagtctgcggttctgataaaattatacagtgaaggcttattgttacggagcatttaagaagaaaaaaggagtttgaaatgaataaaagaaatagatggggatatctgcttctagctattgttatcatgggagcaggccttttatcaagaaaacttaccgcgtatcttcctcacatcgtaaatatatatgcgggagattcgttatgggccttaatgatttttgtcagtgcgggttttttgtttcctgcatggaagacaaaaatgattggtatgtttgctatagtgttttgctacttcattgaatttacacagctgtatcacgctcggtggattgatgacataagaaagactgcgctaggagggctcattctggggtatggcttcttatggagcgatatactagcttattcgattggagtcggggcaggaatgagctgggagtattatagatatcgatttaaaagatccgcctagaaaatgcggttcaatgaatcttagaactcagctgaggatggaataagccgtaaggttatgaagcaggatgtatgtacataaaaataaacttgcgcataaaattttttatttaaaacctattgtctattcgttagacgagaggaagagaggggattatttgaatttaatagcctggatgattattgcatgtgaaatcactttttggatagtcatcattttaggattagcaacaaggtatatgtttaaaaaacaaaagctcagtttttttattttagctctaacacctgttgttgattttgttcttctgattgtgacgaacgtagacctttacggaggtgctacagcgacctatgctcacgctattgcagccgtgtatattggaatttcgatcgcttttggaaaaagtatgattcaatgggcagacgaacgctttcaatattatgtgatgaaaagcggagaaaaacctcgtaggcgctatggaaaagaatatgcaaagcattattttaagtcatggatacagcatcttgttgcttacgctattggggcaactcttttagcggcgatgatgtatatagtaccaaatggaaaaaccaacatgctgcaaaatgtagtggaattttggacagttattgtaggaattgatttcttattatctctttctaatttcgtttggcctaaaaaagaaaaagagtcgggttataccaactcgtaaaaaagcatcgtcatgcgtgaaaaaccagtgaaaaaacctccccgtaaggaggttttttgttttaccatccagggtataggtatatgaacgatgcttgtctgaggtagttcagtttagttgcttaagcggctaaactgctttttgtgcaaatataggtacattttatgtagcatgcatgataagaattctgtgtattccatatactacctcatatgaaagatagacaagtgatacaatacagtttgtttttaggagagcttttatgaaaaaacgccggttggactttatttttttatttattattttactttccatttatgctttcttttttacctctattgatgttcattggaagtatgccttagttggattgtatggtgtcatcattttcatttgtatgtattcacttatgcttgaaaatcgaacgcctgaaagtacgttggtttggatgtatgtcctctttttctttcctgttgcaggctttttcttttatttgtattcaggacagctctatttaaaggggcatatgttcaaaaaaaagcgtatgcataaccgagagatgcttagaaagatggcagataaagaaacgacgcctgatctatcgccgcttcaatcgcatcagcgttactttgctcagtatcttcaatgtgtatctttgacgaagatgaatgttcatacaaaaacctacgtccttaagaacgggcaagaaacgtttaatgaaatcaaaaagcatttgcaatcagcaaaacattttattcatatggaatactatatgtttcactcagattctctaggaaaagaaatcattgatattttaataaaaaaagcaagcgaaggtatagaagtgcgctttacattcgatacaatgggaagttttacactatcgggttcagatattaaacgaatgaaaaaagcgaatattaaagtgcatcctttcttacctattaagtatggatttttcaatcaaaaattcaactttcgaaaccaccgtaaaatagtcgtaattgacggggaagtaggttttgtagggggattaaatgttggggatgagtatctagggaaaaacaaaaaaattggtttttggagagatactcatctgatgctaaaaggagaatctgttcaaaccttgcattcgatctttatgttcgattgggaatacgtttctggagaatgcttaattaacgatgaagcatatacaaagcctcatcctatcaaaggagaagggtttgtgcaagtggtggcgacagggccggatacgcaggaaaatatgagtgattattactatactatgattacaagcgcgacgaaatcaatctggatttcaactccttattttgttccaaatgaagccataagaaccgcccttcgtattgcggctagaaaaggtgtagaggtacgaattatggtaccagaaattaatgatggctttctgactcaatatggaacgagatcatattttgctgaacttcttcgatgtggaattgaagtatattcgtacagaaaagggtttttgcatcaaaaaattgtgattatagacggagatatggcttcggtcggtactgcaaatatggatatgagaagttttcatctaaactttgaagttaatgcatttttaattgagggagagacgattcaaacgctcatcaaaaattacgaagaagatatggaagacagtcatttgatcaaaccagtagcattttacaagcgaagcttagtagaacgttcgaaagagtcatttgcacgcttattttcaggtgttttataaaataaagtttgttttcaaaaagcaggaggaaacgtatgggtgaatctccatttgttaaaaaagatacgtttggtcgaaagttacatcgcttaaaagaacgtactaagccatttgtcgtgcgtttttcacggtttggtcatgtggctcaaggtgtggtctattttatcatcggtatattagcgattcaggcagctttcggattaaaaggcgatttagttacttctcaaggagccctacacacaattgcaaagcagccgtttggatttttaattttaattgttttggcagtaggtttaagtggatatgcgttttggcaaatcatttctgctatttttgatcctcaccacgttgggcatgggataaaaggcgtttttactcgtttaggctatttagttgtagccacgttttatattagcctttgtgtgaactcggtaaaaattttgcttcatgctcacgttcatacgtcaggtaagcattatcaaacggtatcagccaagttgttatcttatccctttggacaaaccatcattgcgcttacaggtatcggtgttattatctttgggattggacaagtatattgggctctttcaggacgcttcctgaaaaaactaaagaaaaacgaaatgtcaaaagaagagtggcgatggagcgggcatattggaaaagcaggtattattgctcgaagtatcgtctttggcattattggtttctttcttattcgcacggctcttcaagcggatccagacgaaacgaaagggttagatggagcccttgctgaagtagcacagcgtccttttgggtctgtactgctggctatcgtatcaatcgggtttatggcatacggagtatatatgtttgcagaatcaaggtataaacgaattgatccttaataaaattaaaaagatgaaaaagctactttttggccttctgctcatatcatatagcagacagataatgaacaggaggagaggcagatgccatcggtagtaggagccgtaaatatctcgaatgtattggtttcatcttcagtggagtttggtgattgtctggctattaagccaaaaagtacagcttttaccacagtcggttctggcagcgggaacacagggaattttatgaatattacaagcagtgccagtaccgctaatacaattgatatggatattaaggatcaaaatgtagtgggaaatgcataagaaacgaaagcttatcgtcatcggacggtaagcttttttatttgagttttacgtatacccagacgtttctttaccacaatgtacctctaggattctatcttataggagtagtaaactagacaggtgatgtcaaaaagtggggaggcgagattataaaatgaagaaaatatatatgagcctgattattctctgtcttttcagtggaggattggccccgatgagtaaaggagccgctgcttcttcagtgggcactgtcaaaggtgataacgtaaacgtatatcgttctccttccttacattcttctgttatgcagacagtgaaaaaaggagaagaatttcctgtgatttcatctgaagctggagatgcagctcaagttactactcatacggtagtgccgggaaatacactatggctactagctaagcaatacggtgtaacagtcagtgatctaataaaacaaaatcagctaaaaaagacggagctgattccagggcaaacgctgaaaataccaccaaaaggcttgttacataaagtagtatcaggagatacgctttggaaaatctccgtaaagtacggtgtaaaagcgaatgaattaacaaagttaaatcagctatcctcaacaaatattaagcctggacaaatgcttattattcctgattactatgtacaagtacagcttttggaagggaaaaagggctggatcaaaaaatctgatttagcgcaaaagaagcatcagcctgtagttatgggttggagctttaatgaaaaaacagcaggctacacagaatcgatgaagcaaaagaatttagacgttgtttcacctcgttggtttacgctaacgtcgaatgacaaagttgtttcatcttctataaatgaatcatatgttcaaacggctcataaaaacggcaaaaaagtctggccgcttattggtaacaattttgatgatgtgcttacaagtgatgtgctaagtaacaaagcaaagcggcaaaagcttgtatcgtcaatagaaagttcgctagtaaaaacaaacagcgatgggatcaatgttgactttgaaaatattaatatcaaaaacaaacaagattttgttttatttattaaagaattaaaagcagcgttaaaacctcatggtatgacaatttcagtagacgtaacaagagaaaataaggatccgttttggtcgggaagctttgataggaaacagattggtcaagtggcagactatgtcattatgatgggatatgaagaacactggggaggaagtcaagttccaggatctgttgcttcactgccttgggtgaaagaaggcacacaacttcttatgaaagatgtacctgcacacaaaatcctgctgggagttcctttttatacgcgagaatggaaaacggatctatcgaccaaaaaagttgtcacaaaagacttaacgatgaaagaagccgaagcggttatctcttctaaaaagttaactaaaaaatgggatagccaagtctcacagtactatgtagaatacacggaaaatggtacgaagcatcaaatatggctcgaagacaaagcatctatgcagcgccgggttaaattaattaatgactatcatttaggtggggcggcagcctggtatattggttcagaaacctcagatatatgggagttatacaacttttaaatcaaaaacacacctcttgcttgattttagcgaggtgtgtttttgatttgtatcataatgaagcgcatacatctatttacaaacgagataaattttacagtatttgtttttcttgagttaatttataactatatgccaaaatgagcctatttaacctttttttagttgaaaa

SEQ ID NO: 10 - DNA, 143718 bp, Priestia aryabhattai
  source 1..143718: mol_type = genomic DNA
tagctagaattacttacatatatgaaacctacgttcaccatcaccataaaaaaatccgaacgattaatcgttcggatcttccctcaactaaaatactactgtcacagcctctttaagtatatttattcaagatgtttggcatcattgatcgtttcaagacgccatttcccactttcataagcaaaagttgtaatcgatgtattttgtaaaacagtagtccctgttccttgttctccgcttgttacatgatgaatgaatgtattaattgccgccccgtgactaacaactgctactttctttccgatagacttctccataatttccgttaaccgccgaatcatccgttcttgagcggcttcaagtgtttcgatattatataaaggttcttctccccaatttattgcatagtttggcacaagctcatgcaaaacttctacgttctttgattctagttctccaaaagagcgctcacgcagctgctcacaaacttcgattttctctactttagcagctgctgcaatttccctagccgtctcctgcgcacgaagcaaatcgcttgtatagattacatcaatatggatatctcgaaaacgttccgctatgcgtttagcttgttgctttccctcttcgttgagcggaatatcagcatgcccttgaataagtttatttttattccaatctgtttggccgtgtctaattaagtaaagcatcgtaatccccctttaatcccgttttaaaaattgatagacagctttatcaacctctgagctttcatgtaaatctgaatgtgcttcatgaaacgtttggagatgaatgtgttcggtgaactcttgcagtccgtacgcactttctactgttaccactccatctgtcttatctcccacatctcctgctcctgaaaaaacgtcgatttcttttgagaaatcttgacgactttcgtacagcttgttcagcgctgcagagtgaaaagctaaatcacgcgcacccatagattcaatatgattgcgtgcatgagggtacatctccattaattcctgataatctaatccttgaattggcgatcctaacgtaactaacttttgaatatattgagggttagacaaactaacagctgctgctgttactcctcccatactatgtccaactaaatcaacagaaggtgctttatatgtatcacgtacatcttgcataatagcttcaatccatttttgctgctgggcaatactggcatctggctttttaaagacgatatgaataagcggaagttttccctcttttgctttcataatatgcttccactgaatagctccatctttttgaacaacgcagtaacctactttagttccccatccgttttgttcaaatcgtttaatcattttccctaagcttttttgactgcctaaatagccatgaataaataaaaccggcacatttttcgattgggcacctcgttttatttgtggggcaaaaatataaaaacaaagcgaaataaatagtatgatactgatcaataaaattaacagccgcaagttctcaccctccgatcgtctcgtccattacactcattaataaaaaaatttggagtaaattttattctgatacgtcctgtaagatgcagaacttgtcatctttttcttgtcaacgagctgctcaaagcgcaaacgcttttccgtaagcatctctgttagcctttgttcttcattagcatccgtgcatatagaaatcaattcttctattgtagccatatctcgtttcagctcttgttcatccgttatcatgtttgcattttttaatatcctatacgcttggcgcagttcttcaggtatatgtgataaatcttctaaatttaatggttttccttccccaggtagcttatcaaagtcaccgtcttttattgcttgtctgattctttcttcagcaattatatacgcaatatccaaggaaagacctcctttaagaaaatataaaattcaatcttaccttctatataaaagatgtataacaaacacagcttttataaccgtattttttattatactatgattataaaaattgaactaccttcacttcttggatagactatcctccctttgtgaaataatctccagagcttcacgcctttcactatcaaactttcttgagcagtttcttaactagctgaaattcaatgaacgattctgcatcaggttttgtcatcttatcttactatatttatacaaaaaagcctccttacgcatgtaaggaggtggaaaaaggtaattctaaggtcatcatgttatgcctactttctataaaaccacattttgatagcgttttcaacattttttatattactttactaattttcttttcatttaatgagactccgtaaatataacgaagcctcaccaaatttctactcttctttatctgatggaatcataatttctccttcatgctcttgttttttcaagagcagctggagaatcgttttggataatttactaggctgatagggtttaatcagaaactcacacactccaagctctaaccctttgcttctttcgtctaaagcagatgagattaaaataggaattttttctgtctctgtattttctttgagatgtcttaaaacatcccacccgtctaacttattttctcctaacataatatctagaacaaccacttcaggcttttgctgatgaatagagtttaatgcgtcttctccgttgttaaaataccgaacgtgaaaaccgctttcttttaattctacctgtaaaagcgtcgctaaacttttatcatcttctacaattactacgcttttacgattatcattcgtatttatcatctcttcatcgtactgaacttcatatagaagcgggagaacaaccgtgaatgttgttccttttttccattccgattgtacagtaatgtctccaccatgagcttttacaatttcttttacaattgctaatcctagacccgttccgccaattttgcgcatatcagagttatctactctgtagaatttggtgaacaattgacctagcgcttcacttggtataccaattccttcatcttgaatatcaatataaacagcgtgttccttttgatacactttaactgtaacgttccctccatcaggcgaatatttcactgcattgctaattacattattaaacaattgcagcagcttatctttatctcccattactgtaaaatgctcttgatcagaaatcatatcaaattcatgcttacttgtttgtattttctggacctcaatcacctgcttaataagtggcagaatgtcttgatactttttatcgtaggtttgtttccccgcttccattctttggacgtccagaaaatcgttgattaaagacgttaaccgctgtgcttcctgataaatagtagttaaatacttcttctgtctttcttcttttaatgttttgtttagcataagctcagtgaaccctaacacacttgctaaaggtgtgcgcagctcgtgactcacagtgcttacaaattctgacttcatctgatcaacttcaaattctttcgtaatatcacgatgaacgaacaatacgccaaacatctgacggtttcgatacacatattcgctataaacttttataacttttcgcttaccttccgtgtgcaggtaataaacaaaagacttttctacttgttctcccttgcaaatggcttcaacgtattgtctcagctgctgtatattttcgactttttgagagagagcatctagccattgatcgcgagagagctgaagaagcccgctttgacgctcatattgaaacaattcgctaatcttcgtattcacttgtagaatcgtaccgcttgtatctacaagctgcattccttcttgaatcgaatttaaaatatcttgagatagcaatcggtcatgctcagactcttcgtaaatataaattttttcaagagcaatcgtgatttgtttggccagtatttcaaatgtctgtaattcatgttttgtgtattcatccgcgtagcggctgtaaaacatataggctagcatatctccctgtgaagacagcaccggtacgataacatcatacaaataaaacgtttgctgatgatataggcgctcatgttctatacactctctttttactaccatacattttttcgtcttttgcacatgatcaacgtaattattatgaagatttgccaccatctgttgaacacttgatgaagatagaccaaatgaagcatgtgtcttttcatcggctagcataataaacccgtgatcagctttcatcacccggctcatgtttgtgacagcactcgtgagaacttcttgcttgtgaagagaatttgttagtccatgcacaaataaattgcgcaattctaactccccttctcgttcctttgtcaattctaatgcgtgctgaagttcatcttgctgactgtgcaattcatcttgctgtgcaatcagctcctcattttgagccgttaactcctgttcattattttgcaaagtcgataccattttataaaaggcttgagatagcataccaatttcatctcttctatgttcatcaaatgtcataggcatttcttttcccgcagcaatttcgcttgccgtatatgctagctgactcagtggctttacaaaattatttagcagtacccgtgtaagcaataataaaatgaccactgtaaacgctaaaaataaaataaagaacgtttgacttttctgcatgtcactcgacgtatcatcgtactgtgtatttaagtctttagttaattcattttggtagtcatcaagttctttttgcatttgttctattgatttagaagcagccttccgctcaggactagagcggactccttcaataccttttttgtcgtaaatatctttaaaataaggaagcgtttgattaaaatacgtgtttagcatcaccgtcgcttcatttacaaacgtacgctcacgtctatctgcggctagacctgaaagtcggtcaagattttcttcgataattttttgctgacttgcagcctcgttatacatatcctctgaatcaaacgcaataaacccacgagcctgcaaaaaagccttgttcattgatttatcaattgtagatagcagctgtgccttttcccgcacttgtgccctgtactgggcataatcagctgtaatttctttttgccgtacaacaagtacagttgaacccgccgcaaaagcaagtaaaaggatacttgctaagaggatgaactgggttgagatactttttcgttttagtttattgttcatctaaaatttcctcgacacgttcggctagtaataggggactaaacggcttagacataaaatacgcagcccctgcttctaacactcggctttgatcaacagcttgactcttagctgaaagcatcaatacttttgtatggcgcttatctttcatttctttcagctgctgaatgacttcaagcccggtgaacacaggcatcatataatccaaaataattaagtcaaaatcacgttctttaataaattccaaagcttcttcgccattttctgcttccgtcacatcatgtccttcatcttcaagcgtatctaccactaacatacgaagcacttcttcatcttccgctaataaaacttttgccattgttattcctccgcttgtagtcgtccatacgttttttgcaatatgaagtaggacggctttattcgttcgtgaaaagttggatactcccaatttttccacttgtataagtaaaaatcttttaataaaagttctccttttttctgagtcggaaacgtatcttccacgtcattgctcttcttattaacagctacgactcccacttgaattccttttattttctcgctggattctaatccttttttggaccaaatatctcccattatttctttttgactcgggtcttttacgtttaaaagcgcccaaggaatgcgaagttcagcaattccatttaattcattcactttaaaatcagcaagcgaatcaaatgaagaagagttaggatcgctgtttccttcttggagtttccctgtttcataggcgtcaaaaggaatggttctcttgtttttatcctctccaatcgctaactctttgttaagggcgagcctgattggattaaacatgccgttgtcttttgtatcggttccttttaccgccggaatcatttgaagctgatgagcatatgaaaaataatacgtatcgtaatagctgtctatccataaatgactgtcttctttcccgtttaattctgctacaaaatcaattccttttgtttttaaggaagggatttgaggaatcttcgactgtccctgattgttaatcgtattaaacaagaaataaagcttttgatcttccagttcttttgcactcacgtgtagatatagataaccttcatcacttgtaatgttcaatgcttttaacttcttagacggcttatataccgacttgctgttcagctttttccaatcatctgatttaccgtctactttgacttttagcttcgctcctggatcaaaactcagcagtccaaaatgctgctcccccgtttgcaaattcgtccaaaatggcctgcggttcggattgtcgtactccatcgtattccacgttcgcttgaaccattcatcttgccatgtaaagaccataccgccagccattttttcttcaacaatgtcttcgtataagcgtgacagaatctttccttgttcttgttccgtatgaaagccttgatcccacccgtatacgtttctatgggtcaatcctcgtgaagcagggataccgaattctgcaacaagaacgggcatatgatgaacttctttcatattttgcaaataacctgcatagttatttttctctcctcgatgatcttgataagtgagataacgaggttcataatttaagaaatcaggatagtacggataaatatgataagaggcaaataatcccggctcaaattttttagttgtgtgaattaaattaggattaacagacactttatcttcgtcttcagaaggctcatatggatgagtcagcaaatccgtcgtcacccagttcgtaaagctcataggccgctgccaatcatatttatcctgctcataggaaattgttttttccataagctgagcaagccaaatttcaaaggggttgcctttttcggtatagatatactgccctttaaaatctttcattcctttatgtttttcatttgtcgaaagagctaccgtgggatcccattcaactcctataatccagcccaaaacataaggagaaacgtctgctgtatacgttccgctagcatgtcccgtccgttttggcagtgttgcatttccgtgaataacgtttacaatccttttcatttcagcttcaaattcttttgtattttcctttgcaaaagcatcttgtgaatcatagaaaatttcttcattcacccataccccatgaaaaagataaatgggttctttggctttttgattatactcagcaagtgcttcataaaaggcgggaggatgaatggtgtatacgcgaattgagtttgcattcatctttccaatttctttaaaccagcgcaaatattcttctttcgaaatagcagtctcaccagggaaatgtcctggcttactaatgcccatatttactcctttaatcagcaaatcttgccacttgccattttgataaacttgcaaataatcttttcctactttccctgctactttacggtcagcatcttcatagatttccatattttcattaaaagtagcagcagcgggctgcaattcattattccgttgatccacaattttgttcatcagcggcaggtacacagtccagtaaaacgaagactcatcttcttttccaattttctctgtccatttcttccacactgggtaaaaagaggtttgataaatggaaggtacttctccttgatctgcaaaatctcctgcaaagtaataggtatcatatcgctctttattatgatgaacgactgctggtatggacaaaggaataccattttcctttagcttatttttcccttcagaatccaagtgaaagacaaactgagcctgcacatcacttttttgctgcggtgtaattacgtcaaaccaatattgataagcagattcatcctgtaaattcaatgttttctttccttgttttgtgtattgaaaccatactggattttcttttaattctttttctgttataataacgagcttattggattcattaacgaataataagccttttcctttaaggctccactctttgttgtactgctttttgtaagcacttttcacccaagcaggaacttcttcactgccgaattcctcaaaatagcgaccaatccagccggaccacgtaacattgtacaattcatatagttctttgcgaacgtctaaagaagtagggctcccaaatgtattaaactctccaatcagcgtttttgtacgtccatttagcgctttcttaacgtagctcacgtcttcagaagtcatgccgccatacaccaattgagagcgatctcctcttttagtttttacgcctaaatcttctttgtatacaccatacgtgtccgtgatataaatcatatctgcagagtttgttgttggcagagatttaatgctgtatgttttatctccttttgggcaaaaccctgcataatcttttgagattttataaggcttcccctctttgcgtactttcgcttgattcagcatccacattaaaccttgatgctctcgaaacgtttgatccggcactgttttatcaatgacaagcatattcaaatcagttggtttctttagctgccaaataagaaatggagaagccgttactgccataaccaaaataatgccgccaattaataaccattttttcattgcgaaactccttttcgctgcatatctccccagccttttttattacgaataacatccaacaatccatgacagcgccatataacggttaaaggtcgataccaaaaggattccgtaagggaaaatacaaacagcttagcgatatcagatacttttggatatttgcgaaggctccactcttctagcaaaacggccgccatcgaataaagagaaccatatacaaccattaatagaaaaagcaaataagcaaactctacataaatcccgcctactactagagaaataacaataaataaatatcctagcatttccatgaccggcccgattagttcaataaacacaaaataaggcatagaaatcattccgatacttccgtatttcggattaaacagcatctctttatgcttccaaagactatcaaataaaccgcggtgccagcgatttcgctgtcttcgcaaatatttgatttcatcaggagcctctgtccaacatacagggtctggaatatacacaatttgattgctggcttttttttgtttaatcagtcggtgcaggcggacaacaagctccatgtcttcaccgaccgtatgagagtaacctccagcttcaataacccagcgtttagaaaacacgccaaaggctccggacacgataagtaataaattatgacgactgagaccaattcgacccataagaaaagcacgtaaatattcaataatctgcattacaacaagcggctgcgtatcaagtccaatcgatacgaccgagccgttttcaattttacatccgtttgcaattcgaatacttcctcctgaagcaattacttctccatctgaatcaataatgggcttcataacttttaaaaaggcatctctttctaaaactgaatcaccatcaatagaacaaaaataaggatagtttgataaattaattcctgcatttaatgcatctgactttcctccattttgtttatcgactacatataaataatcgtataatttagaacgatagacagcttttacttctttcgtttccacttgctttctcacaactcgattcattttcacaagagaaaactctttgatgagcttttctaacgtatcatctgaagaaccgtcatttactacaatcacttcatattccggatattcaattccaagcagtgaacgtacgcttccaatgatcccgacagattcgttataagctggaactaatatagataacggtgttgtatagctaaccgcaagcaaatcttcgtaaggttcttcatcatttaattgatactgctttcgcagttgaaaagcagagataataaacatcataaaataaaaacaaagcacaaggatcatataagcaaatacagcccatccgcaaatggataataaaagctgccaaatactattccacaaccgtaattcctcctttttcaagccattccgctgccatatcttttgaaaacttgtcatccgtagtttgatatacatgagctaagtattctgtacctgttggaattctcatcatcgactgagcagcattcgagcgaacaagaaagtgagaatcttttagcgactgctcaagaagtgatagtcccttctcatctcttgttttgcctactagtttcgtagccatcattctttcttgccaaatagctgactgaaggtgttttatgagctcttctatttttaacggataagataaagcattaagtgatttcaacgaacgaattcgcagttcttctgatgaacttttcatgtgcatttttaagaaatctatatactctaacttatgattgataccgatcatatcgataagaggcagctgaatttcttcttgtagattttcaaatttattaataaattgctgaaactgctcactgttcatagttccaaacaaagagcggtacataaattcagacagcggtctagaagcgttcgtcatgtacacaacaaactcagggcggttcagcttaactaaaatttttaaaatttgatttttttcagccgctgtactattttttttctcatacatttctactaattggtctgttagcgtagttagaccaaagtcttcgatagcataaagggcattcattctgacactccatctagaatgatgcagctcttttttatatttgggtgtaaaaaccttctccgcatagagcgtgatgttatttagaatttcatcgccttgcacagctgcagaaaaaccgctcaatagttcctcaacacccgccagctctattttatttttaggctctacccgatgttcttcatcttttctatataaataaataaaaagagattctttcatactatctttataggattctacttttgctcgaaaagcgtttaaacgcgctttttgaataagtaaataactcagaaaacagactaaaagcaatagcaatccgccaaataagacatataccacttgaattgacatcgccatttatttcaccttcttcattaaatgacgcacgcgcgcttcaagctccattaacttaaatggctttgtcatgtaatcgtctgccccaagttctaatgctctttgaatatcttgttcgctgtttcttgatgtaagcataataaccgtatactgatcgtgacgtttatgctgtcttaatttttgtagcacttctaagccatccattttaggcatcattccgtctaaaataacaaagtactgatcactagaatgaatccattgggactcaaaaaattcgatgccatctttaaacacttctattttcacttcatagcgatctcctacatcaatcttacttaaaagctctttcagcatcgttcgaatgatagaatcatcatcaataatagccatacgaagcgttcgctttttaaccagcttgctttgagaagaagctacaattttttgacgtcctgattccttcgctatatataatgcttcatcagcttgatgaagagctttgtcgagcggccattcagtgttatgaacttctacaactccgccggaaaagctgcaataaaacgaattgctttgatgcgtgaacacttttttcacaaacaaatccaacagtctatttaatactgtttctgcctcttttatattggtttttggaagtaaaagaataaattcttcgcctccatatctaaagatgtaatctgttggacgaatttcatacttcatatactctacaaatgcttgcagcacgcggtctcccataaggtgcccatactgatcatttattcttttaaagaaatctaaatctaaaatcgctaaacaaaaaggctcttttaagcggtcgtagctggatagctgctgactgtagatttcttttaaatacgttcggttataggctcctgttaattcatcaaacattaaataggagttaaacatctgctttcgttcaatatggtgaccaattcgaagtagactttcttccatatcaaaaggtttaacaaaaaaatcatcggcccctaatttaaaagccttcaaacgcgtctctctttgattatcatcgctcatcatgacaatcgggacgaacatttgctttgttttatcacgcaaaaatgacagaatgtcaaagcctgtaccgtctttcatatgtacatcaacaacaaagcaatccggctttaattcgtaaaaagccgtaatggctttttctttagatgcagttgctaatacgtaccagccttgtttttcaaattgttcttttaaatacatcagcattgaaagatcgtcgtctacaagtaaaatattagctgtttgttcactgatttctatcggtttatttatatcttctgcagattgaatttcatcttgataagaaattttaataatatctaataaaaaagtattcaactccgcataattccagttttttttctgttttttttcaacagcttccattaattcgcgcgaacgatctcctaaataatgcagcccaatggtcgcagacgttccagaaattgaatgcaaaaagcgatagacctcttcatgaggtatttcttcattttgatcggtccactcttgcagctgcttgcggacattagctaacaatgcaatttgatatttattcattttatacaccctttgttcgatatagttaacacttaccctatattactccatccatttttctacaatattttgtaagtaaatgaaatattttctcactttattttaagtatgttttttccaaatgaaaagtaattactctttaaccatatttttcctccaatgattttactttaaaacgattcttttttcacccattattttttctcctcaataagtaaaatgacctgttattttctttataaatagacccacaaactcattgacaaaattaatgagtctttgttacccttatacacgttgtgaaaaatttaaaagtgaatgttaaggaaagcagccgttttgatgaataatcaatcaaatcaggttctttcctttttatatttttactaaggtagatactttgctaaataaagtttcgctttatacaccgtgtcctctttgtcataggcgcacttagaccgaaaacagacggaaaggagtataaaatgtttactcagcttacagaaaaaaaacagaatgcagaagagctaaaagaaacacttgatgatcttgagtttcagctatttcgcatgcaggataatttaaaagaaattgctaaaaagtatgaagttattggtgttgaccagcctgaagataatcagttagttattgtatcggcacaaaatgacggaagcgcatgtaaaattatgctaaacgaatgcacaaaagcttatagaggggcttgggattttgctatcgacggcgtatatgaagataatcacacgatttttatcggtgacattaaagggcctgctaacaaaggatatggctctgtatgtatgaattatttaaaagaagtagcggttgatcaaaatgtttatgtcattaaaggggatatcgctgagcgcgactgggatcatctcgaaagattgattcatttttatgaaaaacataactttgaggtaaatattgattatacgaataagtgcggagaaattgaatggactccagcttatcaataaaaaacgaacagacagcatctgttcgttttttttatttgatatatgctaagcttttttttatgctgctaagaggattttctttgcattggtcttgttcaacaatccaccattttactcctgctctatgtccttcttgcattacagcctttacatctactcctccggtaccaagaggagcaaaaaattgctcgccgtctgttgtcatatctttcaaatggataaaaggcgtacgatttcgatagtgcttcatccactcaactggatcttcgcctgctttagtgagccaataaatgtccagctctacgttcatcccggtttcttctaggatggtttggagagctgactttccagttgacaatttttccagttcaaaatcatgatgatgatagctaaacgacatgccttcttttttacaataagtatcaatgtaatttaaagaatcaataagttcgaaatatcctttttcagtttgtcgttcaggcattaaataaggacaaacaatatgtgaatttccaacttgctgttcaaagtgaagcacttgctctaaattagattctaattgttcaagcggtacatggctagaagctggcttcagctgcaaatccgttaaccatactcttacttcttgcgctgtatatccttcataccctgcaaactctaccccttgatatcctaatgcagctactttttgaagagttcctttgaagtcttttttcatttcttcgcgcagcgtataaagctgaactcctacaggtatttctcccatcttctctcctcctgttcattgagaaagctcctatagtaggagcttctgcttttattttactgcacttccaagcattcctgaaataaaatgacgctgaagtgccaggaagaagacaatgattggaatggttgcaatcgttactcccatcattacttgaccgtaatcaataatcgacaagccaattaagcttgaaagagcaactggcaatgtagccatttcgttagatgtagttgcaactagaggccacataaagttattccactgggtcataaataagaaaatagctgctgcagccatagcaggcttcatagaaggaagcacaatagttaaaaagattctcatctctccagctccgtccaaacgagctgcttcaataagttccgttggaaaagctaaaaagttctgacgtaataaaaagatagcaaacggaaagcacagctgcggaacaataagtgcaaaatacgtatcaagcaaattaaaattcgacatcagctgaaaaagcggaatgagcgttgcttgatatggaatcatcatagacaataaaagcgtagtgaaaattgcgtttcggcctttgaattcaaatttagatagcgcgtatgcagctgtggagcagaccattaaagctacaatcacatacacgactgaaacaaatactgagttaaaaaagacgcgccctaaatcaattgaagcatttaaattttgtagatttgtcataaattgatcgccaggcttcagcgttggagggcttgtaaacatttttcctgattcattcgtagcgccgataatcatccagtaaaaaggaaaaatagaaataatcgtgaacaacccaagcatgctgtataatcctattttgcgcatgatgttacttttctttttaaccttaggcacggtagctactgcggttgcttctactctctctaatacactcatgatttatcacccgtaaatttaaattggaagaacgttaaaataccaactaataatacaacaacgtacgcaatggctgaagcatatccaaaatcaaagtatttaaagccattttgataaatatataagcctagcgtcatcgtggaatcagcagggccgccttttgttaagttaaaaggttcgtcaaacaattgaagcgtgccaattgtcgataaaatagtagcgaacaagataacgggttttaattgtggaaccgttacgtggaaaaacttttgaatacgatttgctccgtctaaatcagctgcttcgtaaacttcatgagataaactttgaagagctgctagaaaaataaccatgttataacctgtccatctccaagtcatcgcaacgatgattgagactttagcccaaaatggatctcccaaccactgaatggcatcaataccgaaaaatcctaaaatagtattcataattccttcatcttgaagaatgattgaaaacaaaatagagtaggcaactagtgacgttaccgccggcaagaaaaacgaaactcggaaaaaaccttttagtcttaaaagctgactgtttaaagcgttagctagtacaagcgctaataaaatcataacgggtacttgaacgattaaaataatacccgtatttccaagcgctttccagaaaatatcatctccgagcaaacgtgtatagtttgataacccggtaaatacatactttccgccttccatactctgaaagcttagaacaaacgatgaaaaaatagggtagattgtaaacagcgcgaacagcaaaagtgctggagcaataaataagtaaggcaacgatttatttgtcttcatgatgacctcctagtaccgcaagaagaagagatagaaggcaattttctagaaatcaccttctatgcttcttgattatttttgaattcggttttctaagcgtttttgagctgcttcaagcgagtctgtaacgcccttaccatttgttacttctgacacagctttgactgcttcactgtttgcaactgagtaattgcccgtaaaattaaccggtttaatatctttcatttcatctgcgaatgttttccaaatcgtctgattgttaaagtactcatcttgtgcagtgaataattttgaagagtatacggtatttaatgatgggaataatccgcccttcatcgcttcttcttgaactttatccgttgttgagaaatactccataaatttgtacgcttcatctgctttttgactagttgctgaaatcacatagttgcttccgcctaagttagaagcacggttgcctccttcttcaaacgaaggtaataaaaacactccccattttccttttaaatccggagcctgctgcgtaatagaaccggatagccaagcaccagatggtgaacttgctactttaccttctgctaaagcactgattgaagcatcccagcccactgtatttttaacaatgcctgcttcttttaacttcttatttaactccattgcttttttcgcttctttagaagttaaattcaactttcctttgttattaaaatagaacgtaccttgctgcgtcagcgccattcggaataagccatcgtcattattaaaatctaaacctagtaaatcaacgccaactttttctttaattttcttaccagctgcaatataatcatcccatgttttgatactgtttggatctacgcctgctttttcaaagtaatctgtgcgatagaatacccctgttggacctgcatcaaacgggaagccgtacatatctccatcctttgataaaagagttttcttaaactctggaaatttatcttcttgcttatcaaatccttttttagataggtttaaaaatgcttttggaaatgcatctaaatatccttggaaacgatcgtcttctactaatacaatatcaggaaggccttttccgccagcttgcaatcctgttgttaattttgaataaacgtcttcacgtcccatatccactacctttaatttaaaccctggattctctttttggtattctgctgctgctttctttaataccggtacgttaatattccaagcccatgcaacaacttcttttccaccgctaccgcttgtttcattagcggactttcctccgcatcctgcaagtactagggttaaaatgagtgcaaaactgattaaactaaaccaacgtttcaatgaatacccctcctataatctcgtctcctagtgtggcaagtttttttgtaaacgctcatgattctttctcgagagaattattgaaaaataattccgtatattgaaagcgcatacaatttacttaatctaaattatatgaatgaatacccttttcctcaatggtaaatataaaaggcaaaaaccttacatttttgcctttttctaaattgattttgttattatggtttctattagctttttcgttcatgaaaaaaagcgaatgtactgtggttgttgaaacagaacacaatcgcttatttaaaaaaatccaatgtatactatttttttgctacataagtaacactttcttgcttatttgggacgttctaaggaaaataattgccccaatttactatagttagaacccgcaagtcggctgactggcttcacacgttctgcagaaacgcgatcgttttctatcactttttcactaatatgaaacatcacaacttcaccgataaacaaatctgagctgtatgcctcatccgttcctaatggaacaatttggtgaagcttacactccatccgaatgctggcttcttgaattccaggaacctgcacttttttgctgggtgctagtgttaaccctgtttcttcgacttcactgacggaagaaggataagaagatgccgcttgattcacctgttccactaagttttcgtctacaagatgaactacaaattctgtagatgcactaatatttttagccgtatctttcgtcatttgaccttcacttctcgaaaccgaaacagcaatcagcggaggctctgccgcaactacattaaagaaactaaacggcgcggcattcactacaccgtcatcgttttgacttgtaacaaacgcaatcggccggggaatgacgacacctgttaacaaatgataattgtcttttgcactttgtaccgctggatcgactatcttcattttacccactccttttcttccatttactttattgtatggtaacgaaaagagtatagattagctagcaacttgctcaccaaacatgcaaaaaagtgattgagacataactacatccacctaatccgaagacaaacaaatggaagtaatgagctggtatagatcacttgtgacaccactgttgatttccatgcaaggcttcgctttccgcgggcgaccgatgagcatcctcgtcgcgtacactcctgcggggtctcatcacttcctcttttccctcaggagtcttcaccttcccctccaatcaacagctagaagcaactaactagatgaaacctacgttcactacaacaatgaaaaaatccgaacgattcatcgttcggattttcctgcaactaaaatatttttgttccagtctatttctttaatttaacaccgtaattttcactgtacgacgtccaaatgcttttgcagctgactcggaaggtactaatacgtcaattcgatatcctttaatcgcaccgcccgtatcacctgctgttgccactccgtatccttctacgtatacttttgaacctaatggaataacggatggatctaccgcaataattttatgagtgcctgaactcacattttgtccagtggctgttacgccgctacaccctgcacaattagctgtataagctgttgcttctacatacatttcttttccagaatgcttttgtgtgctttcttcttttttcgtttcttttgcttctgaagaaacggctgctttcttctctgtagctgtttttacttcttgttttggctctgtttttacttcttttttagctgttgctagttcagcttgacgctttgcttctgcatcagcctcagccttttcagctgcctgctgttttgccacttgctcagcttgcttttgagctgcttctttttcttttgcaatcttatcttgaatgcctgttaattcagactgaaggtttgctttttctgaagaagctgcatcaatttcatttacaaccgtgctgtacttttcttgcatagttgttaacgttgctgtttgtttggcaacgtttttatctaattcagcttgtttagccgctaagctaccttttgctgcttctaatactttttcttgcttatcaatttcttttttatctttttcaatttgatctaaatcattttgatgctgctttaaaatatcattatctgctgacaataaagttgtgacagcacccatacgtgcaacaaaatctccaaaattatcagcattcattaatgtatcaataacaacgcttgttttatcgtcttgctgtaaagcaactaatcgattttcaataatatctttacgacttaacactttttcctgaagcaaaacgatttcttttttctttttctcaatcattttgttcgcttctgaaatctgcttttcagtcgatgctaactcttttttattgctagagattactgtatgtaatgaatttaattgtgattgaatgttttgaacatctgaattgatagactgtttctctttctctttttgttgaacagccttttctgtttctttaattttattttcagtactctggagcgcttcttcattcgattgggcgtgagtctctgtgatgccggtcatgaagaaaattcctgtgactgctgcaagagtcatacgcttaaaaattttcataaagtaatagtcccctttcctcatagacatagttataccataaaaaactatctgtttatgttacaatacagttaaaagtttcccataatctgtataaccaagaatctctttctgggaattcatcaccaaaatcccttgatagagaggtttactgtttattaaaaaagatatatttttgtcataaacagggcaaaattgctcttttaaaatagaaataaacgcttattattacaggtatattacaaatttttcacagaaaattatgtgtttcaccttcttttttcggtgttttttactttttattacataaattccacctacataattcctacactatttataaagttgtgactttttcacttcttttttacactttatatacataaaaagacgcccataaatcaaatgagcgtcttttttctacacacgtataaaaccattatttgtcagatgttactagttttaaaggcactggaatttgcttatctacctttttgccttgaagaacatttttagcagactttacggcaagtttaccaattaaaacaggctgctgggctacagttgctcctagcttcccttcttttaccgctttaattgcatcgtcgtttccatcaaaccctactactagcacatcttttcctgagctgttaatcgcttgaatagctcctaatgccatttcatcattatgagcaaatacggctttgataccaggatttccttgaagaacattctccataacgtttaagccttttgtacggtcaaaatcagccgactgtttagccgtaatatctagcttttgatccgcaacgttgtggaacccttttcctcgttcacgagttgctgaagctcccggcacgccttcaagttctgctacttgagctttttcccctacttttttcacaatgtaatcagcagccatttgaccaccttttacattatctgaagctaccagggtttctacttttcctttttctgctgaacgatctagcgtaataactggaatacctacattattagccgattgtacagctgttgaaatagcagctgaatccgttgggttaataagcagaatgttaacaccttgctgcattaaatcttctacatcgttaatttgttttgctgaatcattttgagcatctactacaactacttccatgcccagtttttttgcttctttttgtaccccttcttttagcgaaacaaagaatggattgtttaatgtagaaacggataaaccaattttaatatcttttaaatttttactttcagatggtttcgcccactcaggaggctgaagtgaacaagcccctaacagtaataatgaaaatgataatagaacgagccaaattttcttcatgtttttccctcctaagctgactttttgcgatcaattaataccgcgattaaaataacaattccttttacgaccatttggtaaaatgacgaaacgccgagtaagttcaaaccgttgtttaacgttccgataatcagggcaccaattaacgttccaacaatgcgtccacgtcctccagaaaggcttgttccacccagtactactgcagcgatagcatctaactcgtaagacgtacctgccgttggctgagcagagttcaaacgagaagtcaaaattgctcctgatagcgctgccaataatcctgctagtgagtagatcataaccttaacttttggtactttaattcctgaaataaatgctgctttttcatttcctccgattgcatatgtcctacggccaaacggcgttttatgcaaaatcacccataggacagcaaacgctagtaccatcgtaattgccggaacaggaatacctagaaaatagccgcggccaaataactggaagtaatagttttcgcctaagcccgtaatcggatttccatctgtataaacaagcgttaatcctctaaaaattgtcatcgtcgctagcgttgcaataaacggcgccatttttccttttgtaataagcaagccgttaatcatacccattacagctcctaacacacatcctattaaaatagctaaaataggatctacacctgacacaatcatacctgccattaacgcacttgataaagcaagtatagagccaaccgataaatcaattccgcctgttaaaatgacaaatgtcataccgaatgcaattaaggcattaatggctacttgacgcagcaagtttaaaatatttaaaggttctaaaaagcttggatttaaaatcgatacaatgacaataagaataaatagacctagtaacggacctagcttttgcatcacgttatcaacgcgattttcttttatcgctgtgtttgctttcattttactgacctcctgttgcaaatgtcataattttttcttgagttgcttcttcacttgtcagttcgcctgttattttcccttcatgcacaaccaaaatgcgatcgctcatgccgagtacttccggaagctctgaagacaccatgataatggccacgcctctgtctgtcagttcattcataagctgataaatttcacgctttgccccgacgtcaactcctcgagttggttcatccaaaatcagcacttttggtccaatgccaatccacttggcaataactactttttgctgatttcctcccgataagttactcgcactcgtctcagacgactcggttttgatcgttaaacgtttaataagtaaatctacgaattgctgctcgcttttttgttcaataaagccttttggcgaaaagctgaatagacttggaagcgcaatattttctcgaatagaaaaatccaggacgagcccttctgttttacgatcttctgtaatgaacccgagacctaatttaatggcttggtcgggctttgtgatactgacccctttgccatttaatataatttcgcctttttctaacggatcaagcccaaagatagcgcgcataatttcggttcggccagctcccattagccccgcaacaccgacaatttctcctgatcgcactgaaaaatgaacgttttgaaatacaccttttctctccaagccttttgcttcaaatacaacgtctcccttaggagatgtcctagcaggaaatcgatccgttagctctcttcctaccattttgcgaacaacatcatcgaagctggtttctggaatcggctttttgtctaccgtctgtccgtcacgcatgaccgtaatggaatcacaaatagcgaaaatctcttccatacgatgtgaaatatagacaatcgatacaccttgttttcgcagcgcattaattacgtcaaataacttttgaatttctctttcagtaagcgctgcagttggctcatccatgataatgacttttgcattcgtcatcagcgctttggctatctcaatcatttgctgctgtccgacagaacaaagtcccgcttcttgatcaagaggaatggtcacagctaatttttcaaactgcttctttgctaacgctttcatttcttttgtttttaaaaaacctaaaggcgtttttaattctttgccgataaataagttttcaagcaccgtcatttcaggccaaacgttcagctcttgatgaataaaggtaattccgttttgttctgcttcttttgggttttgaaaatacgtctctttaccatcattcagaatctgcccttcatcttttttatgaaggccggttaaaatattcatcagcgtagatttacccgctccattttcccccattagtgcgtgaacttcaccttcatgtaattcaaaatccacgcctcttagtacacggtttgctccaaaggctttatgaatccctctcattgcaatatgcatgctgttcacctcttttaaaaaataactcccgcttgtaaaatgcagtttgcataaggagttgcttctcctgtacgaatcacaactttcgctttgcttgtcagcatttttaattgttcatgcgatacttcttctactaagatgttttgcttctccatcaactcgtaagccttttgatttctttctttcatttcagaagcaatcactattttttctgtagccatatcttctaacacagctactactacatcttcaaagctaggcactcctagctttaaagataaatcaattttaggcacgtcactaggaacaggtaaccctgcatctgcaatgacaatagtgtctgtatgacctagatctgttagtattttcgtaatatgactgttaatcattccgtgacgtttcatttacagactctcctccacttcttttcgagtcggcataccgccttgcgcaccaaatttagtgacggatagcgaagctgcgcgattagcaaactgaattcctttttcaaaacccattccttcggcaagtgccacggcaagtgctgcgttaaatgtatctcctgctcctgttgtatcaatcgtttctacttgataagaaggaaccaatacttctttctcgccgttaaaatagcgtacaccttgttttccttctgtaataaacaatttatttggatattgttttaatacttcttctttttcttttccttcaaataaaagctctgcttcatgttcatttggagtgatgtaagaaacttgttcaatcacttctgcttttaatggtcttgcaggcgctggatttaacaaaagcggtactttaagttcctgacaaagctgagcaacatattcaaccgtttcttctggaatctcttgctgaataagtacgatatccgcttctttaattttttcttttgctttttctacgtagtctggagtaatataatcgtttgctcctttgacaactacaatgctgttgtctccttcagccagtataatgtgagctgttccactatctgaacctgtaaccggtttcatattttccacagatacaccgtttgatttgaaattctccaaaattgcttttccgtaatgatcttcgcccacacacccaatcatactcacatcagctccaagacgggctgctgcaacagcttggttcgctccttttcctcccggaacggttttgaatgattctcctaacactgtttctccagctccaggacgaatatttgatgttactactaaatccattgatgaacttccaatcacagttactttagccatgttcctcaacctttcgtgtcgtatttcgttcaataaacgtaacgggtagttgtacttgcttttgaattaaaggttctttcttaatgcatttcattaacagacatgctgcttgcttgcccatttcataagcaggctgacgaattgtagacagcgctggaaacgaaaagcggctttgcggaatatcatcaaaaccaattacttgtagatcatcaggcacgcttttttctaatcgaaacgcctcgtgtaaaacggctgtggctacaatgtcattacttgcaataatcccgtccgtttccgggtacttttgaaagatttcctttgcccatttctgcgcatcgtcaaacgctagagaatttgtatttaatacgtaaaagtctgcatcagactgactcaaaacagacagagaaccttgaaaacgttcctgggcaggctttacatttactggacctttgataagtgtaattcttttacttcctcttttgattatttcttctgcagcaagttttccaccttcaaacccatcagcataaacggatggatactgatcagaacttctatctaaaaacacgacgggaaatgtaagaccttcatatagtttctgagctagacttgttgttgccgtgatcatccctactacatggttttgcgtaaacgtttggagataggttaattctttctctaactgttcatcactattgccaagaattaaacgaaatccatgactatgtacttcatcttctattcctcgtgcaagctgagggaaaaaagggtttgtaatgtctggaagcaagagaccaatcaaacgcgattcacgtgtataaagtgaacgggctacctcgttagggctgtagtttaattttttaattgtattcattactcgcacacgcgtgtcttcttttacatatcctgtactgtttaaaacgcgcgaaacggtcgcaacggatacgcctgcttcttttgctacatcgcgaattgttaccactttatttccctcccttcatatatgtaaccgtttacacaaatgataacatggaaaagtgaagttgacaatctttttatgaaagaaaaatcacttcattaagaagtgatttttctttcattagatattagcgtctagttttttaaataatttcaaaaattgctcttgatctttcggttcatagcaagaaaagaaatgagcaatcatcttttgtacaatgtcatttgcttcttcaatcacttgttcacctttagctgttaactcaatgtttaccttacgacgatcctctttagagtgatagcgtgaaactaactctaagtctattaaacgattaataacaggagtaatcgcactaggcttgacgcgcatctcttctgccagcttggttaccccaatgtgactgcacttaccgataattaataagatatgatattgaaaaggtgtaatcccttgtgaaagtaacctttcttttatctctgtcattacctttttgttaagggatatcgaaattctctggacctcttcaataaatgtgagctgttccatgttttgacgtcccctttcttataatcagggagtcgatgttaacatgtcagccccctgctgcactccaagcgaaacctaacctggggagagcggctggtttcgcggaatgcttataccctattttctatctactttattccgtactattataatagaagaaactcattcactatcgtttttcttaaacgatcttaaagctttacgaaaagcgtcatcattcataacgtcacgttcttcttttgtaaaaaccgtgtcgtctttttcgccttctctaaacttttgcagcacttgacgatacatatcatcgttcatgacatctttttctctcttatgtctagatgttcttgtttccgtcttcgcctgcggctgcggctcttttggctcttcttttggtgctgcaggtttttcttctgctacttttttctcttctacttttggctctttaggagcatttgaagcagccgcttcttttttaggtggaactggacgctggcgcttagaagatgatgctttggcattcattgtaataattagtataaccagaatcacagctacaacgatcagtaaaatacctaacataccgtcacctactgtccttgtgtcattcgtttagtcacttgaacaacacgttctcctaatgctttacctagcgcttggtcgttctctgttaataattcgtcaccttcgattggacaagtaattccaacaccgtaataagtaccgtaaagcgcattttctgggatgttacctggtaatccagcgataatcataccttgatgaagcataggtgtaattaaatttaaaagcgtcgcttctaagccaccgtgcgttgtagctgttgtacagaacaccgcacctactttattaattaatttaccttctgcccacagataacctaatttatcgatccacgtttttaaccctgaactaattgttccaaaatgccctgggcagccccaaataatagcatccatttcaggcagttcatgtacatctgcatcttcgacatgctttacatatacggttgcttctccagacagctcggcgccagaagcaatcgcttttgctaatgcctctgtatgtccgccttcactatcatatacgatacaaattttcatcctttatccctccgttgcttatgagttcatatcttttggtgccggtaacatacgaatatcgtctgttgcttctttttctgtttcttctacttctactactgcatctttacgaacatcacgtaggaagaaacttaaaatcaatccaataatggcaataataactgtccagtaaaatgcgtcgttaattccttgtacagttgcttgcgcttgaacttttccagctaaagttgttaaagcttgtttttgcgcctcagtttgagaaaggtgaagcgtttgagcaatcttttgaacgaatacttggaagttattcataaagaatggatcagaagtattcattgaactgctcatttcatttacatgatatgttgtgcgatttgtaaagattgtagtcattaaactgataccgattgaaccactaacctgacgaagcgtgttcgccattgatgtaccgtggctgcttaattttgccggcagctgatttaaaccagctgtcataattggcatcattaataatgacataccgaatgcacggatcatataaataataacaatatggctaaacggtgtttctagcgttaattttgtaaattcaaatgttgtcacaaccgtaatcaacatcccgacaattcctagtgggcgcggtcctaatttatcaaacagcgtaccagaaattggtgacataactaacataacaagtgcaccaggcaagattaataaacctgaatcaaatgctgaatagccacgaatattttgcaagtaaattggcaataagaacataccagcatacatgctaattgtgatggcaatactaatgatattagataatgagaaaatactgtatttaaatactctcacatcaagtaatggacttttaagtcgaagctgctgcacgacaaagatgattaataagacaataccgccaatcatcgttgacaatacaactgaatccgtccagccatcgtttccagcttcactgaatccgtatagaagtaaagccatacctgcaagagatgtaaacacagaaattagatctacttttacattttgaggtggtttaatatcttttaatttaaaagctgcaataataagtacgatcgcacctagtggcaccattcccgtaaataaaatgtgccagtcatagttctgaataacccatcctgaaagcgtcggtccaattgccggagcgaacatcatggctaaaccaaagatacccattccttttccgcgcatatgaggagggaaaataaatacgataatggtcataactagaggtgctagcactccgcctccgactgcttgaaccagacgtccgattagcataatcgagaaagtaggcgcaattccgcagacaagtgcccctattgtaaagcaggccattgcaaataagaataagcgacgaaccccaaaacgttcaattaaataggctgacaatggaataagtgcaccatttacaagcatatatcctgtaagcaaccactgtgcggtattagccgtaacgccaaactctgtaatcagatgcggaatcgcaacatttagcagcgtttggtttaaaattgctaagaacaatccaagcataagtacgactagcagcggaatatgctttttaactgtgctttcctctggttgtatcgtgtttgctgacatcagttccttcctcctttcttctcttcttaatcatgtacgttcttagtttttagagattttaacttctgcgttcatacctggtagtacgttttcagagtagttagaaatagagattttaacaggaactgtttgtgatactttcgtatagttgccgtctgaattagagcttggcattaatgagaaaattgagtttgttgcataaccgatttcttctacttttccatcgattgttgttttagtatctccgtcaactgttacatcaacgtcatcgccagcttcaatatcttttaatttgtcttctttaatgtttgcaatgatgaataagttattcatatctacttcgctagcaatttgttgaccagcttgaaccatttgattttcttttacctgtgttttgatgattttaccgtcttctggtactgtaactgttttttctccatcttctgattggattttagctacctcatcatcttttgaaacatctttaccttcttcaatgttccagcttgctactttacctgccgctggcgctactactgtataaaggtcgccggacacttttgcattgtctgtggatacataattagatttttgaatataatagtatcccccaccaataattaaagctaatactacaataattccgataaagttcattaaaattaaacgccctcttgacatttattttacctccttaatatttcattcagttaagtattacgctagataactttatcacaaagatatttagttgtaaataactttgattttaatttatttttaaaactaaacatttatgtttcataaagttttcccgactgaatactttactacatctttaactgaaatacaacttaaaagttttggtttctttacaagtactttactttactttaaagttagatatataagcatagggttatacacaaaaacagctccttttttcggaacaaactccctatatacataaaccacaataggtaactagcagcaattgtttaacacctataatgataaagaaaaggtgattataatggatcagcagttaatagataaactagaaaaacttgaccaagttaaaacctcattatttgaactcaagcgaaagctcttggaagataaaatcagtgagcagccctataatttgaccattacgaaatttttaattctaaaattcattggagtcagctctaaacgtatggtagccgaaatttcttcaaatctaaagctaacctccggggctactaccattttattaaatcaattagaagatgatgcactcattaagcgcgtacgtgaccaaaaagaccgccgaattgtatggatatccttaacagaggctggcgaaacattagtgaactatgtaattgagcagcgaaatttattttggcaagacatgctttttgctctaactcctgaagaacaggatgagtacctccgcatgcttgaaaaaatggaaaaacgaattagacaaactgtggatcgttaatgctaaaaagcgtgtgttcatttattttatggacacacgctttttatgacccgctactactgacgagtttaggaagcttttggtttgctgcctttaaaattcaggattatttttcaaaaatccattccaagcctgtgctgtagctttctcaatttcttctttggaagcttgaagcctcttagcgctatctccatagccaatttcgattttaccttttttcaattcttcaaatatcgaatcagcaaagtcatcaagcggcgctccaaatgtatgaagtcccggtcctcctaaatccgtgttcacggctggaggaagaatttctatcacttcagtatttgtttcttctaattgatgccttaaactaatcgtaaacgaccttaacgccgcttttgttgcgctgtagattggcacccatgctccaggtgttaaagacagcccggacgttacgttaataaccgcagcacgttcttgttgaacgaaatgaggaaccaataacgacgttaaatgaataggagcacttacattactcattagttctttttcgtaatactgccactcttcgtgcatgtgtaaaaggtttacgcgctgctgaatacctgcattatttacaataacatttaattttgggaacgtttcagtcgcccattttactaactctactctgctttcttctattgatacgtcgcacacttttgtatgtaacgaagggaatctttcttttgcttcttgcagctttgattcccttcttccacaaataatgacttcatttccttcatttaaaaaacgttctgcaagcgccagcccaattccggacgctccgcccgtaattaaaatagtgtttcctgacattttcattacttttcctcctcgttcaaccatcacatttactttttaataaacaaagcgctactgcatgaatgacaatagcgctttgtttattatttatcttacaagacgttttagtcttgctttaaaagtcaaagttatccggatctggacctacgcgatgattttgatttaatgcgttaattttttcaacttcttctgcatttaattcaaaatcaaatacgtctgcattttggataatacgatgttcttttgttgacttaggaatagttactacttcgttttgtaagtcccaacgtaagataacttgagctgttgattttccgtgcttttcagcaatttgagttaacacttcgttatcaagcagctcaccttgtgcaagcggtgaccatgcttctacttggattccttgttttttgcaatattcacgcacttctgtttgtgttaaaagtggatgaaattcgatttggtttaccatcggcttaacttctgcctctgcaattaagtcttctaaatgatgaacttggaaattcgatacgccgattgcacgaattttcccgtctttataaagcttttcaagtgctttccacgtatctttatacttaccttcaactggccagtgaattaagtataaatctaaatattcaagacctagcttgtttaagcttgtttcaaacgcttgaagagttgtgtcatatccttgatctgcattccacacttttgatgtaacaaatagttcttcgcgagaaacacctgattctttgatcgcttgtccaacgccttcttcattttcataaattttagccgtatcaatgcttttatatccagctttgattgcatatttaactgaatctacaacttcttgaccatcttctactttataaacacctaaacctaaccaaggcattttaacgccgtttgctaaggtcgtcgttgactgtaagttttccatgttgctgttcatccccttttttactgttgaattattcgtaaagagtaattgcttgtgaaatttgttctgcgcactgtttaacaagtgcagcatgttcttcgtctttctcttgtgaaatacgaacggatggacctgataaagcaatagccgccattattttaccttttctgaaaataggggctgcaatacagcgaacgccgggctcccgttcttcatcatcgacagcatatcctctttccttacttaaagccaaatcagcttcaagctcgtccagctcggtgatcgttcgatctgtataagcttcaagcgaaagttcatgaagaatagatttttgtacgctgtcctcttgataagcaagaatacactttccaatagcatttgcatgaagcggctttttatttcctacttcggaatgcgtacgagtgctatattgcccgttgaccacctgagttgtaaccatttgtttatgatggagaattcccgcgtaaatggtctcattggtctcttcactcagcttctgcatagcaggaacagagagccaattcatttcatagttcgtatgcatcgtattttgcacgagtgccagcaccagttgtggtgaaaccgtatagcggttagacgggtttcttacaataaatccgttttgttcaagcgtgctcacaagacgatacatcgtactcttattaaaaccgagcgcttccatcatttctggaatagtcatattcggacggtttaaaagcaaagagaagatatctaatcctttttttaaagttccaacctcggacatgcccttcttcctccttttatccgaacaacaattttattataaaacaaagctctttatcgtatcaaataaggatactaatctaagttattttccctatataagagaatacatgacgtaattgttcttcttaatctattccactgttttttctatttaaacataaaaaaagccttaacaatagaatttttttacagtttttaaattagttttgcttttcactcgttaacttcttcaaatcgcttcagctgctccagctgattttcctttttcataatttctttctgacgctcgcctagtaaatcgaaatgaggatagccagatcgattatcaatatacttagcgggaataccatacttttttccccacttaatcagcttatttaagtcactacaacctacttttgttacggtagttgcatgtggaaaacgctcatcaagccagtaatgagttaaaaatgcgatctctcctcgcttaacagctgttttccatgcgtttagttccgggcgtttaattccaaatgccattctttcaccttttctcttttatataagtagtcacatgatttgtttgctataaagaaaaaatatcattcttatagaaatctttcataatatcttgtctatttataaccatctctaaataatagcgtactttctcaacctgtttcctatctaagcattattgtgtgcctatgattttatcatcatcttcttttctttttcaaaagatcaaccaaaaaaataacgtttaaataataaagaaaagccttatatgtaaaagaaactaaggattaatttcaatatttctttttcgaatgattcttcctttgtattgaatgttgttctttttttattatggcagtatgcatttattgtgaaccttccgtatattaaaaaacttacacagttaccattctcacaaaaagacagaatttactttttattccgaaaataatataattcaagtgatatgaagcttttcgcttcatctatttattatcaaagggggaattccgcttggcgatgaatgaaaattctttaaagaaggtaaacaatgcttcttcctctcctgattacacagaaattgcacagtctgcttcatttcaaaagcttttgaaacaaaaacgcaattttattttaccgctctctctgttttttcttgctttttattttaccttgcctatcttaacggcttacacaaccgtcctaaacaaaccagcttttgcttctatgacctgggcgtgggtatttgcttttgcacagtttgtgatgacctggaccctatgcattctatacacaaaaagagcctcgaaatttgatgaacttgttgacacgattaaaaaagaagctgcaaattcaatagggggttaaatgaatgaacatactagctttttcactttttttagccattgtaggtcttacgctaatcattacgtatgcggcatccaagcggacaaaaacgaccagtgacttttatacagcagatggaagtttaaccggctggcaaaacggtatggcgattgccggagattatatgtctgctgcatcatttttaggcatagctggaatggtagcgctttctgggtttgacggttttttttacagcatcggctttttagttgcctacctcgttgtgttatacattgtagctgaaccacttcgcaatttaggaaagtacacgatggcagatatgatagcagctcgttttaacgaaaagaaagtgcggggagttgctgcgttaaacacgatcaccatttccattttttatatgattgcgcagcttgttggagcaggagcattaattcatttattacttggtctagattacgtctactctgtcttgattgtcggcgtcttgatgacggtttacgtggtatttggaggaatgacagcgactagctgggtgcagattgtcaaagccttgcttttgatgattggtacgttcattatttccattatcgtattttcaaaatttgattttagcttagctaaaatgttttccgagatgaaaactgcaacccctcttggtgacggctttttaaatccaggaaataaattcaaaaatccgctggacatgatttcgttgaatttagctcttgttcttggtacagcaggcctgcctcatatccttattcgtttcttcacagtaaaagatgccataaccgcaagaaagtctgttatttatgcaacatggatcattggcgttttttacattatgacaatctttttaggattcggtgctgctgcatttgtaggatacgatgatattataaaagcaaatgcagcaggaaatatggcagctcccctgctcgctcaagttcttggtggagactttctttttgcgttcgtctcagctgtagcttttgctacaattttagctgttgtagctggactggtgctatcagcagcttcagcattcgcgcacgacttctatagtcatattctgcgtaaaggagctgctactgaaaaagaacaggtagtagctgcacgatgggcttctattggggtatctattctatctattattcttgcattatttgctcaaaacatgaacgtggcatttttagtggcgcttgcctttgccgtagcagcgagcgctaacttgccaattattcttctcactatcttttggaaacgtttcaatacagcaggagcagtcactggcatgctggttggactattcagctcactgtttttagttgccattagtccaaacgtgtgggcacctgagccgggagctgctatctttgtaggtgaaccactcatcacgctaacaaaccctggtattatctctattcctctaggcttcttagctgcttttataggaacacttctttcgtctaaaaaagcagacgaaaagaaatttgatgagattttagtaaaagcaaatacaggtatgggaatcgaagagcctgtcaaacattaatgccaaaaagccttgaagcactttgcttcaaggcttttcactagaataaatcttcttgtaaaccaatagcggaaatttgttcatttctaaactttacagctaacatatgctcttcttcccacgtacattcaaaaaacaaaccaagttctcttgtatcatgaggtgcttcaggaacaaagatttgaatacactcaactaaaaaaccgatgtcttttcgcttttttacattcggaactaataagtctaccacgtctttttcaacttgagttctgtattcatctcgcacctgttgataataatcaaaaagagctttttccgtcctctttaacaataattcaccttgaagccaaaatgcttgaaaggcctcttcttgtcgtttttgaaatggcttctctttatctccatcaattgtcagcaacacgtgttgtttttgtccaaagaaagtgacctgtttttctccaacccaggccgagtcatataacaaagatccaaaaagcggatgatgtactcgtaatgtttgattcattgcatacctgaccctctcaaaaagtggatttctgcttgcattggcgtataataaatggtgcttgaaacaaactgctaaacttattctatgttaccatattttttacagaaaggagtgccacaatgtgtgaatacaattaaatctttgtacccttacttaaaaccttacaaatggctcgcgctgtttgccccgctattgatggtaattgaagtgttagctgaccttcttcagcctactattatgcagcatatcattgattatggcattgcaaacaacaatcaaacatatgttatcactcgaagtatccttatgctcatgttagcactcattggcttagctgccggtatcgtctgcgccatccttagcacaaaagcggcagtaaatttttctaccgatattcggaaatcgctttttgaaaaaattgaaaacctctcaaacagcaacagagacaaactagggactggtcacttaattaccgtcatgacaaatgatgtaacgagtgttcaaaacgcattgaatatgacgttaaaagtattagttagaggtcctttactttttgcaggaagtattgtgatcgtgttattaaccgctcgttctttgtttcctattatcgtcgtggtcgtccctattttatttttatgcatttggtttgtgatcacgaaagctggaaaactttttaaaaaagttcagcaaagcgttgatcgtgtaaacacaaaagtccaagaaaatttatcagggatgcgggtagtaaaagcgtatgtaagagaatcgtatgaaatcaatcagtttaaagaagcaaacagttccttgacgcgagctaatatgggtgctgttcagcttatttcgcttttaatgcccgttattttatttgtcgtaaatatcggaatggtagctactctatggctgggaggacttcaagtcgaagcaggaaaaattgaagcaggtgtgattttagcttttattaattacttaacgattattttaaacggacttatgtcaagcagcatggtgcttatgcaaattacacgcgcattcccttcagctgaacgaatcgattctgttttaaaaacaaaaatagacatccctccagcaaactctgctgctcaaatcaacagacttaaaggtgatctatcgtttcaaaacgttacatacagctatagtaaaaatggcgaaaacgtattaaaagatatttcgtttactgctaaacacggggaaaccattggcattatcggctctactggaagcgggaagtcgacgcttgcaaaacttatttcccgcttatacgatcctgatgacggcgaaatcttcgtagatggaaaaaatcttacggactatgacgtaaaagtgcttcgctcatccattgggtttattcctcaaaaagctacgctgtttaccggcacgattgatatgaatattcgaatgggaaaagatcatgcttcttcctcagaaattgaagatgctgcggattttgcatgcgcaacggagtttattgaaaaactcccagaaagatatgagtaccctttaacgcgaggagcaaccaatttatcaggagggcaaaagcagcgtctttcaatcgcgcgtgcatttgttagaaagcccgctatcctggtcatcgatgatgcaacttcggcattagacgctgtctcagaagcgcaggtactaaaacatttaaaagaagagtttgctgatgcgaccgttatcattattgcttctaaaatttcgtctcttctccacgctgatcatattatcgtcatggatgaaggcaaaattgctgaacaagggactcatgaagaattgcttcgttatcgctctctttattacgacatttatcttgcacaaggcggaaaagaggtgttgcctagtgaataaccaaggtaaaaatcaaatgagctctattcgcggccctagaggaatgatgaaaggccctgtagttaagccaaaaaatgcgaaaaaaacactgtacagaatctggtcatatatggggaaacgaaaacctccgcttgcggctgcgataatcttagttattttgacttccctgcttaatttattaggcccttatttaattggggttattattgatgagcatattattcccaaagataccagcggaacgatacgaatgtcccttattcttgcaggaatttatattacgacatctttgttaacatggctgcaaacctatttaatggtgaacgtttcgtttacgactatcggcatgcttcgacaagatttatttgcaaagcttcagactctctcccttcgcttttttgacaaacgagctcacggagagttaatgagcagagtcacaaatgatattgataatctaaacagcgctctgagtcaaagcgttattcaagctctgtcctctattttgtctttaatcggcattaccattgcgatgttctcgctcaactggattcttgccattatcacgctgattgttattcccttgatggttataatcgttcgacaaatattaaaacgaagcagtgaaaattttgtcaaacgccaaaaagacttaggtgagctaaacggctttgtagaagaagcaatctctggaggagaagttgttacgctttttagtaaggaaaaagactttttaactgtttttaatgaacgaaatgaacagctgagaagttcagcaacaaaagcggaaacattttcaggctttttaggtcctgttacaaactttattaacaacttaggcttagcactagtgattggagcgggagcatttatggctgttcaaggtagcgttacagttgggatgatcgcttcatttgttaactactcacgtcagttctctcgcccaatcagtcaaatggcaaacttagtaaacaccattctttcggctattgccggcgcagagcgagtgtttgccattatggatgagcagccggacgtcacaaacaagccaaacgctctttctgttacaaaatttgcaggagacgttgcttttgagaacgtatcatttggctataacgatgaaaaaatgattttaaaaaatgttacactgacagcaaaaaaaggtgaaatggttgctttggtcggtccgacaggttctggtaaaacaacaatcattaacttgctcacacgattttatgacatctcatacggagacattaaaattgacggacgttccatcagtgactataacatccatgatttacgaaaccgaatcggcattgttcttcaagatacctatttattttccggtacgattgcggataacattcgatttggccggttagatgccagcaacgaagaagtgaaaaatgccgcaaagatggcaaatgctcattcgtttatcaagcatctgccgcagcaatacaataccgtgatttcagctggcggaggaaatttaagtgaaggtcaaaagcagcttttatcgattgctcgagccatgctttctgactgtgatattttaattttagacgaagctacttccaatattgatacaaaaacagaaattgatattcaacgaggaatgagtaatctattaaaaggaaaaacaagctttgtgattgcccaccgccttaaaacgattgaaaatgcagatcaaatccttgtcttaaaagacggacaaattattgaagaaggaaatcatcgcgagctgttagaaaaacaagggttttatcacaagctctatacgcagcagtttacgatttaaaagaggtaaaataaaaagtatgttagtttaaggaaggtccgaacaagtaatcgttcggaccttttcattgtgctggtaaacgtagggttcatccagttagttgcttctagctgttgattggagagccaggcgaagactcctgcgggaacagcggaacagatgagaccccgcaggggcgcaagcaacgaggaggctcatcggccgcccgcggaaagcgaagccttgcactgaaatcaacagcggtgtaataaatgatcgatacgagctcctttattccatttgtttgtctttagattgaattgatgtagttatgtcgcaatctctttttcgttttatcatttatctattacagctacaattttcccttttactcgacgagtcgccagttcatctaatgctgctgaatcaagtctaatacgtggggatatgtccaactaggattaccgccgtttcctgttttataatctacagggttcaggacagtagctttatttttaactaaaatttcacctttagctggatgcggcttttggatatttccgactttcatctcacttactttccctttgccttctagcagtaaagctttcatcaagatctccccttttacatttcttccttcaattaaaagttctttttcagtataataaatacatgttgtttacaaaagacggcactttcatgaaaccaggtaccttcccggtaacctaggcctatggatattaagttattatatccatatttcatatctgtttatgaatggaggattaacggtgaaagcaccccactataatgtacctgttgaagcaacccttgaagtaatcggcgggaaatggaaagtcgttattttatgcctattaaaagaaggcgaaaaacgttttagtgaactccagcgagctatgcctgctattaccaaaaaaatgctgtctcaacagctaaaagaattagaaaaagacggtgtggttaatagaaaagtatacaatgaagttcctcctaaagtagagtactcactcagtgaagaaggcgaaaccttacgagaaattttaaatatgatgtgcgcatggggagatagaagaataggaaacaccccaaattgcagctaagttctcctagcggctctgttaaaacaaacgaatagctattgccaggagctattcgtttttgttttatctattctcctactctttcttgcaattcgcccctgtgtaagaacatctgacaacactatagaattctttcgcattttcagctatgatgatgtcgaacgatgcagccagaattgtcgaaataaaactcaagaatgataggtgattcaatgatgcaattaggtttagatttatcccaaaaacaactattaaaattggctatgacacctgaattacgtcagtctatcaacattttaaattattctacggccgatttagttcattatcttcatcagcaagtcaatgaaaatcctgtaattaaactgtctgctggcgactctcagcaaaaagattcatttgatactcgagaacagcgttcatattcaaaaggttataccgatgacgagtataatccgtttaattatatatctgatcaaactgtgacattagagagtcatttattagagcagctgtctatgctaaatcatttacactcacaccaaaaacacatcgttcaatttctaattggaaacttaaataaagacggctttttagcaattgagcaaaaattggtagccgaactgctgaatgtttcaattaacgaagtcaacgatatgattcacgttttacaaagctttgatccgattggcgtgggcgctcaaaattttgtcgattcactgcttattcaaattacggccaaaaagtcaaagcctactcttttatacgacgtggtaaaacacgatattgaagatattgccaacaaaaagtatcggaacatttcaaaaaaatactctatttcgatgcgtgaagtacaagaaattgttgactgcttgcggacattaaatcctcgtccagcaggagatttccacgtcccgcttacgaagtacatctcgcctgatgtaacggtacaaaaagttgacggccgctatcatgttattcttcatagcgagctgcttccgtccatcgaaattaacagtacctaccaaaagctggttcatcgctctgcgtgcgtaacaaccgatcgatacgtacaggaaaaaattcatgaagctacttggctaatcaatagtattgagcagcgtaatgcgacgatttacaacgtgtccaaagccattgtggaacatcagcaagatttttttgaaatgggtatttcggggctaaagccgcttaccttaaaagatattgcacaaaaagtagactgtcacgaatcaacggtaagccgtgcgaccaacggaaaatatattcaaacgccacgcgggctgtttgagttaaaatactttttcaccaattctttagagcgaactgatggcgaacaaagcaattctaccgcctttataaaagaaaaaatcaaaacattaattgccgaagaaaataaattaaaacctctttcagatcaaaagctcatgtctcttctttccagcgaaggaattcaaatttcaagaagaacagtagctaaataccgtgaagaagcaggaattgaaagttcttctaagcggcgacgattttaatattgcttactctaaattacagctttatcactactaaaaagaacccgttgattttactcaacgggttctttttatcggtttccaataaataaaagccatatgatattgatacgtatattcatatgtgctatttattttctttacatgctgtaaaataatcttttcagtttctagcttgtcaatatctttagaaagcacctttgtcgagttcttcttgatgagatcttcgtacgtctcataggttaccgttttggttataggaacaagcttacaatccgcgtaaatacccagttcatataaaatatttaataagtcaatatattccttacggcgccatttaatctcatacccaagttttctatgtaactctatgtaatgaggcttttctggacccgttgacatgccgataaccgccaaacgattagccgaatcattcatatttaagagaccatcgacaatattatgcatacggtaaaaacagtttattcctactacggcatcataagtatccgttaaattctcatgctcccattttccttctacaaacgttagattagagcgatcacccgattgtttttgcaagtagcgaatgatgcttggcgaacaatccatacacgtaagttctcttacatagtcagcaatcaaaaacgtataatttccccacccagggccaatttccataacagagtcactaggatttaaaaaagcaagaagttcttgttgaagctggtttactgcgggatcattttctgaatcaaaagacattttttctaaatactgctgccaaaattcatcttcagctcggtcgtttatcattcgctccgatattgaaccgtcccattctttcaggccttcctgccactttttcacacgatcactttcatataccaaattttttgtaagctgctgcatgcattcacgttcccctcttttatacgtaaacctatactatcataaagaaaaagagagttccttttcaaactggaactctcttttatattaactaaattatgctgctgcctctttctctgtgtgatgcttctcttttccggcattgatataaaacattatcaatgaaagagcgatgaagattgctgcaaagattccaagtacgccagcctgatgccatacatagccgaaatcatcaccaattgaaatgatttcacggaaaccgcgaattgcataggtcataggcaagtatgggttgatcacttggaagaattccggcacaagtgctttagggaatgtacctgcactgccgccaatttgaagcagcagaataataaaggctaaatactgccctacttttcctaaccctgttgttaagaacaagatgagtgtaaagaacgtcacacctgtaatcatggtaaagatatagaagtgccaaatgcttgttacgtttaaatgcaagccccatagaagagctgtaacagcaatcgctgcctgcagcatacctacaatagtgatgacactaaacttacttaagaaccacgaaatgcctgatgtcggtcgaattgatggctctttcattggatatactgctgaaaacattagcgttcccgcaaacaagccaatacataagatgtatggagctaatccgacaccgtacttatctacgttgttttgtttatctgattttaaatccgttggatttgaaaacatgctatatgttttatcatcggctttaacatcttttgcatcttttgcaccgtctgctaaagaagaatgaagttcgctggttccatctgatagtttagatgagccatcatataacttggatgaaccattcgttaactctttagaaccatttgctagtttagttgccccgttttcaagctgtgttaaaccattagctagcgctgcgcttccttgttcagactttttaagtccatccacaatttgctgctgcccgtcagcaagctttccagctcctgtatgagcgttagcaataccgctgtttaattctgcaaatttgctgttgaactgcttttctccgtctgctagtttaacagcaccgttgtataattgagtttgggcattatataattttgtttggccattgtacagctgactttgtccatcagcaattttattaatagcgctttgaatatcttctccgcctttagacagcttttgaagagccgcagataactcttgcactttatctacttttgcttttaactgctctgctttttgctgctgttcatccataaactgctgagacgtgagttttttaattcctgcaatcagcgtttgtttttgctcatcaggaatggactcgttgctgttaatgctgtcaatgagggcttgctgctgctgttcaaactctgctttttttgaatcgacctgctgtttaatctgcgtaatttcctgttccgcttgattaatttgctgcgtaacgctgctcacttcagcgtccacttgatttaagccgcttgtaaactgcggtaatttcccttgaagtgtctttgttccttcattgagctgttgtgtcgcaccttgcagttttgcagttccgtcttgtagttgtcctaacccattgctaagctttcctgcacctgtttcaagttctttagaagccgcataaagctgtccgctcccactttctaactttcctaaaccgctgtttaggttgcctaaattttcattaattgtgtccgcaccgtttaggagcttagctgcacctgcatttaaatctgttgctccttttcgtgcatccgttaatccgtttgccaatttagctgtaccgtcttcgaatgtaaccgtgctgtctgctaatttcttcatgttatctcgcagcgtttttgagccgttttcgagctctcctgcaccgtcacttgctttttgaagaccgtccgctacttgcttaaagctgtcaaatacagtttcagcatactgctttgtgactgcttctttaatctgatcattgattttagccactgcatttgagctaatttgagcgcctgaatagttctttccggcatttgtatgatagataaatttcatttttttaggatctttatccattaatgttgtggcatttttggagaaattctttggaatttctaaaactaaatagtagtcctcattttttaagccatctaacgctttttctttgttcgtaaatttccagtcaaatttatcgtttttctttaaatcatcaacaaaatcacgaccgacattcaatttctttccatctaacgtagcacctttatcttcatttaccactgcaactggaatttgatctgtttttccatatggatcccagtaagcagataaaaagatgacattataaagtaatggaacaaataacaatccgcaaatcacaacaatagtcattggtttggaaaagatttttttccattctccattaatcatattcatgttttttagcctccaataatccttacttccgtctgactgtttgaccgaaaaacactttcggtcattaagttctgattaatgttaccatattcacaagaataaggtcaatcgttattctgtaattaaaagctgattttagcagaaagtttaaaatcagcttttttaaggtaacgttcatgctataggcttaaatcattaacttcatccgcatcgtttttaacaaatgcccttcaaattcatcatcaaattcatccacgagctggaaaccttttgattgataaaaagcacggcctattccgttttccctttctacgttaatgtaaacgatttttaattccttcgagcgtttcattcctttttctaacaattgcgaaccgattccttttccttgataagcaggcagtatatagatagatcctagttctatttcccctctgctttgtagtcggaaaaagttagcgtaccctacgattttctcatcaatagttgctacataaatgaacgaattgcgcaagcgccacatcagccttttatgagagtatgctgctaaaagaaaccgattctgaacgcttcgaggaataattccttcatatgtatcataccagctcatctttgcgacatattgaacagaagcaatatcttcttttctcattttgcgaatgattacctccactcacgtcccccctgacaaattactgctaaaatctcacataatttcatctaaaaaatatagttataaatatatatttttaattgtaacgctctagaagcattgattgattttaaaaccttatgtataatcgagatagatacaaattgaaaatgattatcattaacaggagtgctgaatgatgaatttaactaccgtgagtattggcgacaaagtaaaagttaaaaacattgaatttttagataggtcattagaacgccgccttctttcttttggagtaaaaaaaggctgcgaactatgcatgaaacaaaaaaccatcttaggaggaccttgtatcattgaatgtcaaggtcaaatgattagcatccgaaaacgcgatgcggctaaaattgaggttgagacagcatgagtacaattgcacttttaggaaatccaaacacaggaaaaacttctttatttaatatattaacagattcttatgaatacgtaggaaactggagtggcgtaactgttgaaaagaaagttggatctattaaaaagcaaaacagccagctggttgatttgccgggtgtgtatgacttcactcctctttcttcagatgaagcagtggtcacgaactttttgttaaccggagaatttaacagtatgctgaatatcgtagacgcttctcagtttgaaagaagtatgcatctcactattcaagcattggaatacggcaagccattaataatcggcttaaatatgattgatgtagcggaaaaacgcggactgacttttaatttagagaagcttagcaaatcactacatattccggtttctgcaattattgcccgcaacggaaaaggaattaatgagcttctctccactttaaagcaagatttaaaagctccgttgtttcaattaaattacggagagcccgctgaacaagcaatcaatatcattcaaacaaaagcggatgtcagcagatggattgcgattcaattcttagctgaaaacagcgtaatcgaatcaacattaaaagaaaaaacgagttactcagagcttcttgagcttcggaaggcgactgcacaaaaattaaacaagccgcttagtgagcatttcttcgacgtgcgtacagcatttattgaacgcatttccagcgagtgtatgataaagggcagcgaaacacctttaacctttacggatcgactcgatcgaattgtgacgcataagtggctcggtctccctatttttcttggcttaatgtatttgatttttaatattacctttacttggatcggcgttccgctttctgataaactggacggtttttttggcgggacgcttagtaaaggcgctgattctcttctaaatgcagctggtgccgctccatttattcatgatttaattgtggacggcatcattgcaggcgtaggcggcgtattagtatttgtaccacaaatttttgtcctgttcttcttcatttcactgcttgaagattcaggctacatggctcgaatcgctgtagtaatggatcgtatcatggaatttttcggtttgaacggtaaagcctttattccgatgattattagctttggatgtaacgtaccggggattatggctgcgcgtacaattgaacagcaaaaagagcgccttatgaccattttagtgaatccatttatgagctgttcagcacgccttcctgtatacgctttgtttgtaggtgcgttttttgtgcacaacggagcagctgtagtattttctatgtacttgcttggcattattttagcgcttgttgtaacaaaaattttatcagtaacgcttcttaaagatgaacaatcaacttttattgtcgagcttccgccttaccgcgtacctcaagctaagaccctttggagaagcacatgggataaaggccgaaatttcgtccgaaaagcaggtacagtgattttagctggctctgtatttatctggctatcatcttatgccggccctggcggttttggggtagatatggaaaatagctttatggcgattattggaggtgctattgctcctctatttatccctctaggttttgcgacgtggcaagccgtagcatcactgatcacaggcttcctagcaaaagaagtggttgtttcgactatgagcatcatttataaagtacaagaaggacagcttggagatacaatgaagacattctttacaccgctaactgcctatacgtttatggtgtttgttcttctttatgtgccgtgtttagcaaccgtcgctgttattcgacgagaaaccggttcatttaaatggacggcatttgctgttgcctacccattagttgtcgcttatctcgtagctttgctcgtacacacgattggaaaagtacttggtttttcttaaaaggagtggataacattgattattaacattttaattggggttttaatatttggatatgccctttatcatatggcaaaattcttccgcaaaagcactcagggaaaatgcgcaagctgcgcacagcaatcttcttgtacaacggatgattgcggtattgattgggataaaacgattcaagaagctcaaaatcaatcatcttaatacattaaaaaagcatcctgatagatgggatgcttttttaatgttacgcaactagttttaaaatgagatgagaaaggacttccttttcctcttcactgctgactttccataattcatgaaggaccttttcttctcggtttcgaggctcctcgtttttagctaaatagctagccactttttttgtagcggccgctaattgttcctcatttaacccgagctttttaccaacatggactttttgacttaaataatcagtaaacgtatcaaaattctgcaaaattgcttcttttttctccgtccctaaattatctgccgtttcttcaattttattcatgtcttttgtagttccttcattcatttgactcacagttcacatctcctttttagtgaatagactggtatgttctttcacgctcagcttctggcttttcgtctggcgtcatcttgtccttacttatttcagaagttgcatctttcactttttcaccaatttgctgtaaatcacttttagcatcctctaccgtcgattttgcgtcatgcgtaacgctttttacatcttctgcttgcttaaagaaatcttcatttacacgctcgtacaaatgtttcgcatcattaattgcatctttcaaaagattcgatgcgtttttcatttgttgtatcattttttcttttgtttcttgagggttctcttttacttgattaatcatgtttgcagaagagtcctttaatgtaacggctcttcttttaacagatgagcgagttttattatcaagcagtgttatacatccacctacaactgccccgacaacaacaccttttaccagcttgctgctgcagctttttccattgctaacagcagtagtgctattagctgtctgtggattgttattgattcctacgtcgttgttaatgcctgcgctgttacttaaagcaggattttgtaaatcagatcggcttctttccatttttactgcctcctttagcattgttattgagtgatttcccatctttttttatatttaaacaattgaatttcttaaaaataaaaaacatgactaaaggccaccttttacgcctcactagtcaagaataactatctagtaagaaaagctgaacttttttaatggaaagatacaagccggatttttgtaaaaagattgtcagcaccggtataataagaagtactttaaaagaaattttatactattggtcataggggtgaagcaattgagccagcttaataaggaatttaactgtgaaaaagaattaacgcttgctattatcggtggaaaatggaagatgctgatactatggcacttagggcgtgaaggaacaaaacggttcggggaactaaaatcgcttattcctgatattacaccgcggatgctggttaaccaactgcgggaactggaagaagatctaattgttaaccgtaaagtttatcctgttgtaccacctaaagtcgaatactcacttacaaaagaaggagaaagtttaatgcccattttgacagccatgtatgattggggtaaaaattaccgtgatacagtgctgatcaatcaagaacaaaaagcggaaacgttaattaaatgacggaaacgactccttctattccatagtttttatttttttatgcggatgatgttactcactatcatccgcatttttaatgaaaattaagcggttacaagactgatatgtccattagtatacttctgtatactatcattccccacactatttgtgggaaaagtgcgtacttttaagaacctcaaactgcgggtacaataactacaccagctgctttttatgtaaaaaagcacaaaaggtatatatagatttctgtaaggagtggagtagaatggaattacaattagcattagatcttgttaatatctctcaagcaaaagaggtagtaaaagaagttgaagaacatattgatatcgtggaaatcggtacgcccgttgtaatcaatgaagggcttcgcgccgttaaagaaattaaagaagcatttcctaatttaaaagtactagctgacctaaaaattatggatgcagctggctatgaagtacagcaagcttctcaagctggagcagacatcattaccatcttaggtgttgctgaagatatgtcaatcaaaggtgcggttgaagaagccaaaaaacaaggtaaaaaaattctagtcgatatgattggtgtaaaagatattaaaggacgcgcaaaagagctagacgaatttggcgttgactatatctgtgtacacacaggatacgatcttcaagcagttggccaaaactcttttgaagatttagtaacaatcaaaagcgttgtaaaaaatgcaaaaacagccgttgctggcggcattaaattagaatctttacctgaagtagtaaaagcacagcctgatcttgttatcgttggcggaggaatcacgagccaagacgataaaaaatcagttgcttctcaaatgaaagagcttattacaaattaaggagctttctatgcagacgagcgaacatttaaaaacagttatgaatgagcttttacaaacaacggctctaatcgctgatgatgaagcggaacagcttgtaaatggcatcatcttatctaaaaaagtgtttgtcacaggagcaggccgttcaggccttatgggcaagtcgtttgccatgcgtatgatgcatatgggcattgatgcttatgtcattggagaaaccgtgacgtccactttcacgcaggatgatttattaatcatcggatcaggttctggcgagacgaagagcttgattcctatcgctcaaaaagcaaaagaacttggaggaaaagttggagtagtcacaatttctcccgattccacgcttggcaagctggctgactttatcgtgaagctgcccggtgctccgaaggatcaagaacaaagcagttatcaaacagtgcagcctatggcgtcactgtttgaacaaacgcttcttctcttttacgatgcgctgattcttcgcttcatggagaagaaagaacttgatacccatacaatgtacggaaagcatgcaaatttagaataaaaaaaggtcttgctctaggcaagacctttttcgttttgaaactttctatctcaccaaatatttatttatcgcataactaaatgtactttatcattaactttgttttttcaaaaaccctattcgaattttgttgcatctccataaaacggctgctctgcgactttaatggattctgttaggcatccttcatacgcttccatcatctcatcttgctgatgttcaggaacttcttttgatcattcgttgttatctaacgcggcataagcaagaccttctgaatcataatcataaagatctggtgcgctccctccacatgctccgcaagcaatacatgtttccttatctattatcgtaaaagccataaaaaaacctcctttaccttttcactttctcgttcagaaagttacgttcagtataagaaggttttttaaaatttgtcttaaattatttacttggattctccaatattctcaaacatttcatctacgtttggttttttcttaattaatcctgactcttttaaccagtccacatttgactgccatgattctttcgtttgactgccaaatccgtgttcagacttcattttcggaagtaaaatatttaaactttttgtttccacgtctttttcaagagggaagtttgatttatcttggttatctaatagaatttgaagtgattcttttggatgtttctctgtgtactcatacccttttgtcgcggcacgccaaaacgctttaatcgtatcagaatcttttgcccacgtttgatccccagtaacggccactagctcatagtaagatggtacgccgtaatccgaaggatcaatgtcaactgttttgtatccttttttgtgaagcaatggtacttcgtgattaatatatgcccctattacggcatctacttttttactaatcagcgatgaatttaactcaaatcctacgtctactagttttactttattcggatctcctccatcgctttttaccattttctttagaacagattcacttaatggtgttccgctgtagcctactacttttccttctaaatctttaggacgcttaataccgctatctttgagcgccacaactcggtttaacggagatcttacaatcgctcctaccgactttaccggcacatcttcatttgctcgtgccattgctacatcaggctgatagtaaaggccgagcgtaactttccccgcagctgctaaattaagcgagtctgttggattggcaggaaactgcacttttacattcagcccttcttttttaaaatatcctttttcttgtgcagcgtaaatgaagctgtgcactgcgtttggataccaatcaagcataattgtaacgtcttttaattttttactgtcaccagctttattttccttgccctgaccgcaagcagcgagcatcaaaacaagcagcaggcttaagccaattacaaaccattttttcattctgttttcctccactttaatgaacgtttttcgaaacctactacaataataaagaataaaataccaagcgcggataaaatcacaattggtgcaaatacaccagctgcatcaaactgtgtcatcatgcgacgactgaaatatcctaagcctgcttgtgcacctaaccattccccaatggcagcacctattatactaaaggtaaccgctactttgagccctgaataaaaatgaggcagtgcagaaggaatgttcaacttaaagaaaatatcttttttggttgctcccatcgttagcatgagttcttttaactctttgtttgtggaacgaagcccatcaaacgtgctaacggtaatgggaaaaaacgtaattaatacggtcacaatcactttgctccaaatggagtagccaaaccagagaacaaatacaggggcaatggcaatggtcggaatcatttgcgacgcaataataagcggatagaaagcacgctcaataagcggactccaattcatccatacggccagcagaacccctagcacaacggatataaccagcccaattacaacaatagatagcgtagctggtaaatgcttaaacaataaatccattcgcaaatcccaaagcttcgttaaaataccggtgggcgttggcaaaataaacggatagtttacaatacgtgctccaatttcccaagctgccagcaaaatgacgactaaaaccactgaagctccgtactttttcatgtgttcaccttcgatctcagctgttcaattaaataatctttcacatcaagcactcgctgttgatttaaatctttttgcgttcgaggtctgctaagcggcacttgaatttcttcaaggtgacttaccggcttgtctgaaaagataaaaatacgatctgataaaaaaagcgcttcgtttacgtcatgagtgataaataagatgctatgtttacgcttttgccattgttcaatcagccattcctgcatcgacaaacgcgtaatggcatcaagcgcactgaaaggctcatctaaaagcaacacgttagaaccgcttaataccgtccgcagaaaagaaacacgctgcttcattcctccggataaatcacttggaaaacggttttcatacccttttaacccaaactcttcgagcagctgagatacttgcctatgagcactcgcttttgacacattgtgaagctcaagcggcagcgctgcattgtctaaaatcgtgcgccacggaagaagcaagtcttgctgcggcatgtagcctacttttccaagacgtttttcgtaagactgtccgttaatcacgatatcgccttcactctgctgttcaagacctgtaatgagacgaaacaacgtactttttccagatccgctcgctccaacgatactgacaaactcgccttcttttacgtctaagcttaatgattttaaaatcgcttgatcaccgtttttgtatgtaaaactgacgttttgaaaagataacacagacttattcatgaattggccacatcgcttcgttataagccatatcccagaacatgtactcaaaacgtgttgtatttaagaaaatttcttcgagcttttctaactctgcttctgatttgtcttcagtaagtgagtcaaataaattgatacaccacgtcgctagttctccaaattcttctgagctgtacatttcaatccactcacgataaaactcattttcagctccaggcttttcactgagttcttttcctatttcccagtagctccacatacaaggcaaaagagccgccactaattcagctaatgttccgctttgaccaacgtgcagcatatagtgtgtatatgcaagcgttgtaggagatggctgcgctttttctaattctttttcgctgatttcaaatttcttggcatactcacggtgcagactcatttcttcgtttaatgtagaatccaaaagtgcagcaaatttccccatcgtttgaacatcggtagctttcacggctccaatcgcaaataatttggcataatcaattaggtaaaggtaatcttgaatcatgtaaaagcgaaacttctccttttcaagcgttccgtctcccattccctgtacaaagggatgattatgattttgacgccaaatgggctgcagcttttcgtataatcgttcactaaatttcatgatgatcactccttatgcgtatgcagccacgtataaatgaactgcaccatcacttttgtatattgaataagctgattcatatctaattgttcattcacagcatgtgcatttgctaaatttcccggaccgtaaatagctgccggaattcccgcatcagctagccaaccgccatctgttacgctagttgacacattgattggaggctttttcccttcaatttgctcatgagtatttgcaagcagctgtactccagcatgattttcatcaatttctaatgacgggaagatttctcctctgtcttcaatcattgatgtgcctccccattcaaaggttggcagattatcttttaaccatggatctgcttttgcaatagctaaaatgtattcttccacttcttttgatacttggtcgtacgattcattaggataatagtgaacggtgatccacagcctgcattcatctgcaataaacgcagcatgccttcccccttcgattactgctggattaatcgtatttgttcccggcaaaaatcctggatagctctttgtaacagcccagtggcgctccaattcttgcagccctccgataacttttgccatcttttcaatagcactcgcagctaacagccctcctccagcatgaatcatacttcggcgtgtaccgtcatgataggttttactgctttttatcgtaatccatcccgtgatcactccgccttgaccttgaatatgtaaatcactcgtatcggctacgagcgcaaagtcagctgtatatcctttctgacagcattgcagcgtacctgcctctcccacttcttctcctacaacggattcaaaaatcaagtctcccggcagttcgattcctgcttctgttagaagctgaactgcaaataatgctcctgccaagccgcctttcatatcagcaactccgcgtccgattatcatgttgtcttttaccacagcttcaaacggatttgtctcccacttttcattttcttgtacctcagctacatccatatgcccgttaataattaagctttgatagtcagctgatttttttccttttaacgtgcccactacaataggatcgttggaatataagtcccacatatcgatggaaaacccgcagtttttaagaaaatccgctacgtatagctgcgcttcatgagaatttcgtgcaggaggcgctggcgttttatatgaaacaagcgtttttaataactggattagctcccctttgcgctcctctacctgtttgacaagcaaatcaattgtttcttccatgtatgacaccttcctttacgcataaaaaaacacttctttcgcaggaaagaagtgtttttgtttatatacaaaaaattattataacgagttcgtaaggaaataccatacaaaacatccattacaatacctctttcctacgctagtattacctagttcaggttataagggttaagacttctcgtctctctcagcttagaaagcacccctagtggcgttgtatctctataaaattaaacgattatcatatgtttacctgtaatagttttatcatagtaaagcgttttattcaatagaaaggttcatgattcagcaatgaaaatagtttcctttttagtaaaataaaaagcacacaccttttttaagcagtgtgtgctctttacttttataagcttactagttagctatcggcttctttaaaaatacaccgtaactaatagcgccaattaaaagcaaccctgcgcctaataggaacaccgctgtaaaagttccggttgcatctaatataaatcccgttacaataggagccatcgctgctcctagaaaccctccaaagttttgaatagcgccgagtgaagcaacttgttcctttggtgcaacatccgccgctagagtccaaatgacacctgatggcagctgtgacgcgaagtagccaatggataataaggcaatactcaaggctgcattatcaataaaaggaacaggtgccaccgatgctgctgctaagatcgccccgcctacaattggaatttttcttgctgttactgcaggaactccttttcgaataaatcgatctgaaattgcaccgccgagcaaaactcctataatcccagctaaaaacggaatagcagcaatccaccccgtttgctttaggctaaaaccgcgctctgtttctaaatagctcggaagccaagttaaataaacccatatcgtaaacataattccgaaatttccgatgatcataaaccatgtgcttttatatttaaaaagctgtgaccattttgcttgtgcggtatgattgatttctatttcttctttagggatagctttcactttattggtaacgtaatctggatctcgatagatttttagccaaacaaacattacaataaagccggctgctcctataacaacaaacattcctctccaactcattgttaaaagcaataccgttagaagtggcggagcaatcgcattagcaatttgagatcctgtattaataatagacgtaggcaagccgcgctcttcttttttaaaccatctttctgtcactttgattcccgacgtaaaaaaaggagattctgatacacctagaagcattctcatggcataaagagcggaatacgtgttagtaaacgcacttgctaccgttgccacagaccataggccagatgcccatgcaaacattttttttggtccgtatttatcaaccaaccagccggcaggtaaatttgctaaagcatatggccatagaaaagctgaaagtaaaagacccatttgtgtagaagacagcccaagctctttggcaattgtggtattagcaatacttaaattggagcggtccaaatagttaacaactgctccgattaacaatacagtaatgagccaccagcgtatattcgtctttttcacatctttttttataggacctaaatctatgttaacgctttcatttattttagatgtaaccgccatagaatatccctccataactttaatagttagagtgaatgagctgcctgcttatcatcaaacagccctattcgctaactttcatgcgtttattcagaacatgaatcaattattaaacactgctctttggacgaatgctatttagcttatcatctaattctttgacttcttcttctgttaaatcgatttgaggagatctcatgccaccaacgtcaatgcctcttaattttaatgcttctttaaaataagacatgttgcttccgtttaaaagagcttcacaatattgaatagcgactttttgcatctttctcgccttttctaaatcattcgctttaaatgcattataagtctctacaaacggctcgggataaacgccggatacaccggacacaactccttcacaccccatggccagagccgctaaaaataaacggtccgttccgggaagaacagagaagtttccatcgttaatatttaaataatcatttacgcgtaaatagtcaggatagctatatttaataccaattacatttttacatgtctctgctactttttgagctacctctgccgttaaatcattgcttgaacactgaggtatattatataaatataaggggaaatcacttggaacactgtgggctacttttgtaaaatacgtttctagctcattatcgttggcaccaaaaaacataggcgtaactactccgataccgtcggctccaatttcagaggcatgttttgcaagctcaatggtatcttcttcgttcatagcccctacgtgtatgaatacggttacacgattagccgcttgtttcactactgtttctgccacttgctttctttctttgacagatagacgaagcatctctcctgttgtaccaagcggatacaagcagtgcactccttttgaaattaaaaactctgttaaatttactactttctctaaatctacttcacccgttttagtaaacggtgtaaccattgctgttgtaactccgtataaatgtttcatttccttctcccctttgttagtagtgaattactctatagttagtaaaacgttttagtacaacgttttactaataaaaaaataaaaagcttgctcttatattcttctaaatcggtctctttttaaagagaccttatgaatggcattgctttttatttgattctcgtcgtattacggtgaataatttccaaattaaatatctgttggtccacatccccatatggatcagaaattgttttaactaaaagctcccctgcacaataagccatcttctctaccggcaaattgacagtcgaaagttttgggttagtaaatttagagaactcttggttatcaaatcccatcacttcacaatcagctggcacagagatgccgtagtcattaagagcagaaagagctcctaatgcaacatggtcactcaaacaaatcacagcggttggaacttgtccttgttcaataagctgtttgatgctgtcatagccaccttgttctgtatatgaacagtaatggtgacaatacgtaacgtcagtctgttcaattctatctgtcacaccttttactcctgcttctaaagcctgtgaagacacgtctggaactaaaatactgatatgctgatgatgattgctaataaaatgatctgctactgcttgacctgcttcataatttttggattgtataacagaatatatagatgatgcacgattaaataaaacaatcggaacaccgggtttagatcggtgaatatacgcctcatcagctgccgttgtatttgcaataatagctccgttaaaatatgaagatgtttgaagaccttttacagaagaaataccttcttcattttgaaacgtttcgactaataatttaatagtaggaccgctttttaatgaagctatgtagctttgaatacctgtaagaatacgtcccactaacgagacgcgcgtatcaattggccaaataagagcaattgttagctgcgctgatttgtcttgtccacgtaagttacgcgcggacatattggggatatagcctaattttttcgaagctgcaattacacgcagtttagtagcttcagaaattctgcttgctcctggcttgttatttaaaatgagggaggcagtcgtaattgaaacatctgctgcttttgcaatatctttaattgtaaccagatgaccatctccatttttagtttaacgttttactaaactcagtataacgctttcattttagtttgacaatttttttattttcatcttacataaaagaggctgggacataacgcaagcaatccaggctaaagacgaacaaatgggattaatgagttggactgcttgttacaccgctgttgatttccgtgcaaagcttcgctttccgcgggcggtctatgagcctcctcgtcgcttgcgcttctgcggggtcttcgcctttctctccaatcaacagctagaaggaactaaacacatgaaacctatgtttaccataaaaaatacgaactaccaattaatagctcgcatttaacttcaactaaaatatttttatcctatattcatctatttagacaggaataagcttaagtttttgccccggtctcactaacgaaatcagctcatgatcttcctctatcacatacccaatcacgttaacgttagcattggcaggcaaattcgttttagctatttgaacctctcctctgtaacgtccgtagccatcattgtccattgtaattgctccgattctgcgttctactgtatgacatggcggcactggttttacagatcgagtatcaactaaacgcagaacgtctcttgatacatccggacgcacgctgtacgttccctctatatgaggtgaacgaatgcgcagcggaataatgcggctttcttgatattgaactaaacgctttaataaactcgaacccgggtatggatctccaatataaacctccgctactccgcatctgtataaatctactgcagaggtaaaaggacatctattacggtctttttctctagtaggaagaccttgataaatagggcctcttttttcgccttctccaggaatataagcgcagactggaatacgaagttcattaaataaatctgtctgctgttgaaaaaacgtttcttcaagtcctgtttcaggccgcggataaaaattatgccatgcaagcagctgatgatgatgaagccctgcagataagagtgcttcaatttcttttttggataacgtacttgcattaacagcaatataaaattcattcgcaagcgaaagagtttcttctacgctaaagccatcgtctagtctaataccagatacgccaagtgaagatagcgacataaggctttcaatacctaaatgaactggcgtatgcttggatacgtctgcatacacgcttattccacaatctctagccacatgaagcaattcttttgcccgttcagccaaatctcctgtttcctctggaatgtgaagcgaagtgaatgcacgtgtgacgccgcactcacttgcttctattaatctttttttagcatttttatcatttaaataaaacgaaatgccaatcattcaaactccctcgccatttcatcgttaaatccaaagaaatacgtacagacaaagcctgctgcgtaagcaataactaatccgagtaaataaagaagaatttgatgcgcatgaactaaaaacgtaagcggcaaacctgatactcccaccgctacagtcgcaatatgaaagtgcgcctgaaacgctccgccgattccagctccaagacaagcggttaagaatggacgccctaaaggaagcgtgactccaaaaataagcggctctccgattccaagcagccctgaaggaagagcgcctccaattgctcgctttaaacgttttttctttgttttgatataaatagcaaaagcggcacctacctgaccagctccgcccattgccagtataggaagaagcggatcatctccaattgaattgataagctctaaatgaacaggagtaagaccttgatgcagtcctgtaatgacgagcggcaagaacgttgctcctaaaacaaagcctgctacaactcctccaacctctaaaactcctaaaaggccttttgtgattccgtctgaaatcaagccaccgattggcatgaacactacatacgtaataatgcctgtaattagcaccgtaacggtcggtgtaataataatatccagtgactgagggacaaatttacgcactcgtttttccactacggccataaagattgctgcaagcaagacgcctattaagccgccccgccccggcaaaagtgcttcaccgaaaagtttaatatcagctacggcaggattaatgactaaaataccggctaagcctcctagagcgggcgaaccaccaaattcttttgcagcattaatgcctactaaaataccaagataagcaaataagccgcttccgataacggttaaaagaatagcaatctgtgaatctgccggaagccacttcgcttgaacagctgcttttgtcactccggtgataagtccagatgctacaagagcaggtattaacggaataaaaatactcgcaattcgtcgaagcaagagcttaaacggagttgcgtttttttctttcagctccgatttccgctgagccgcacgattttctaaattaataccgccagattcatcaattaactttccaaattcctctgttacgttgtttacttttccaggaccaataatgatttgcagcgtttcttcttcaactaatccgagtacgccttcaagctttcgtatatctgccttttttacaattgaatcatcttttacagtcacgcgcagccgagtcatacaatgcgtatacgcttcaatattcgatgctcccccaagcatctccaaaataacctttgctaattgatgattatctaaagacatgttaatccccctttgtattttcctcttagatggacacggtactgaggaaacagaccacaaaatcccctttttgtaatcgctttcttttttttatttcttagttttcaaaaactgaatggcatcccttgttttatcaatatattcaatcgtctggtcatactgctgcgctgcaatacttaaaaataacacatcaatcacataaagctgggccaaacgagacgatgtagctgcgcttcgaaacggcgcttcttgagaataagacgtatacaaacaaatatcagctaaagacgaaacggtagactgtccgtacttggttaagccaatcgtctttactccgcgatttttagctaaagataagacgttgcttacttcaggagtctcccctgaaaaagagatgcccacaactacatcgtctttacttgcatttgcgatgagtgtagctgctagatggctatctgcaaaagccgtcgcatttttattaattcgaagaaatttttgctgcgcatccatagcaataatatgtgaagcaccgattccaaaaaaatgaatgtttttggcttcaatcagcgccaaaacagcccgctctgcttctttgtaattcacaagctcggccgtatcacttagactttgaatgctgttgcttgccgtttttttgacaatagattgaatcgtttcatttgtttcaatatccctgtatccttgctccgtatctctagctaaatcaccggctactcttacctttaattcttgaaacccgctaaccccgatagatttacacaaacgaataacagcagcactgctagcattcgctagtctacctaattctccagccgtactgtttaccacagtatgcggattatttaaaatatattcagcaattttcctctccgaatcaggaagcttagccaccgtgtttttaatcattgttaatccgcctgttgacatcgtttctctcctttatacgtaatgttcaatcgcttttctcacataaccgcccgcattattcagtaacatcttcgcggtgtcgtaattttcatttgttttgatcataaccactgctgtttttacctcattatttgcttcttccagcgtttgacttgcttgttcataagaaacacctgtaattttacaaataatacctattgctcgttctttaagcttttcgttactcacatgaacatctatcattaagttttcatacgcttttcctactttgatcatagccgcggtagaaatcatgttaagaatcattttatgagcgcttgctgcttttaaccttgtggaacctgttagcacttccggacctactaccacctcaatactatggtccgcttcttttccaataagagaattatcattgcaagacagcgccaccgttttagcttttacagattttgcatatcttaatgcaccaatcacataaggagtgcgtccgcttgcagcaattccaatgactgtgtctcgttcattcaaatgaattttttgtaaatctgccgctcccaattcttctttatcttcagcaccttcaactgctttaacaaatgctttttttcctccagccatcaatccctgtacctgatcgggattggtactgaaagtaggcgggcattcaacagcatccaatactcccagccttccgcttgttcctgctccgacataaataagccgaccttccttttgaaacgattcacttacaaattcaactgccacctctacgtctggaagtactttttgtacagccagcgccactttttgatcttctttattcattatgtttaaaatttcttttgtactagctgtatctatcttcattgtgtgttcgttttgggactctgttgttaataacgtaagctgttcattcatcttttgggctcctttttcatcatgtagtgaagttatggttattataatttgtttgaaatatattttcaataatttatattattttttaaaattatattttaaaaaaacataaaaaaaattcagtcatatagctgaaatctttttttatgtctatttatgattgttgagcaaatgttaacagatactcatcttgcgttaaaacttcgtaatctttttcaccatttcttacgacgtgtacagggactgtttttgccggaagtaattcaactggctcacgatagcgttttgctactccgttaataagttcgtttactaactgctcgttactcagctcacccgcctgatatttttctgcaagtggtgtcatgacttccgctagcacattatttacatttaaatggtaactaatgaaagaaggaaattgcacaataaaaaagtcacgaatccgtgacttttctaacaacattcataacttattttttgttggcgttttcattttaatctctaataattccattacttgtccctatcagtacttctttaccttgttgatttcgatacactgatttaattttcactttttgaaaaccatctgctttttctactttagttaatatgcattcacaagtaactgtatctcctgcaaaaactggacgaagaaattcactcaccatttctcttgcaatgtagtttaagtctccccctatttttgtcccaatactagcagtcataagtccatgcaccattagccgccctttttcgtcacgttctatatgatgtttgccccggtctccggtcatctccgcaaactacataatttcttcctcttgaaacgttcttcgccacgtaaatgtatctcctgctttacattccatcttatccctccccttaagattatgactttacttttaactatatcacaaaatgaacgatcattcatttccacatcaaaaaaatagcagaataaatatatcctgctatttttgacaagtaggacagtaataaagccttctagaagcagcttgcacttttaagataggcgtgccgtcaattcggcaagcttctccttcacggttaaaaacccagtggcggtattcagagcgcttttggcctttcttttttaacgtttcagcaagctttacatcatttgtaatgccacctgtttcataggactgttttacaagagaaatggttgcttcagctgcctttttaagctgttcttctgtgcagtctacgggacgagctgcagggttaattcccgctacaaataggatttcactgcgcaaataatttccaatccccgctataaagctttggtctagcagcagcgacgcccattttctgcggtaaaatggcttagaataaaagcgatctaaaagctcatctgccgttaattcttcacttaaaatatcagggccaactcttgatacaaaaggatgagcagaaacttcttcatcacgcaatacttcaatatcagaagcgctatagagcagcgctgatttcttttcattatgaatagcaagacgcagctgtctgtttgtagatgggtaattgtatgacgaacgaacataccattttccataaagctgattatgtgaataaatggtatagccgttgtcaaaacgaataagcatagcctttccttttgtatctactcttttaatacaagctcctgttaatacttctttatagtgctgcaaagatggaaaagcaaaccatatctcgctgacgggaagaccgataatcgctttttccacttcgtcggctgatcgtctaatttctggaccttctggcatataatgaaactcctttcttgtctgactttcttcatttattatttcggttttatttctgctttgcaagaaagaagcggttgcgcccttcttttcctaaaagaacctttaaattatgcatgacgtttactcttatagcaaaatgttgatacctttttactttctatagtgtttatcttacttcctttggcttatactagttgataaccctttagaaacttgtcaattacttaggcatgagaagtttattatgaataatcaatcattttctccattatcagaaaaactaatgatgttccacctagctgcgatgattactgaaaatgcacgtggttacgggcttgctatgtcaacaagcccgcgtttagatctcgctttaaaattatacagcattcacgactgaaattttggaatacgccaaagaagtatcaagaataagtattgaacaaggatggctggaagagcctccgcataatccatgtccaaaaattcatttggaataaaaataagctcgcgctaaagcgcgagcttattttttagattctctccacaataaataaagaaagtacggagcaccgataatgccgatgattaatccggccggaatttcaaccggaggagcaattcctcgcccaattaaatctgctgctagtacaaacaaagcgccaagtaaagcggctgtaggaattagttgtttatgtctcggtcccactaaccgtttggccacatgaggaataataagccctacaaagccaatggtgccaacaaccgatacaacggcagcggtcattgccactgcgcttgctagtaatactagacgaattaattctactctagcccctagccctcgagccacttcatcacctaaatgaattaaatctagccgggcagctaacagccaaatcagcggtaataatataaccacccagggaagtaaaccaatcaattgatcccatgtccttccccataagctgccgctcagccaaatgagtgccgcgtttacgtttggatttgcttttgaaattaacaagtgaataccggatgaacaaaaagcgctgactgctacacctattaatgcaaatcgaataggttctactccttttttataagcaagcaaatagacgatgacaaaaacaagcgagcctcctgcaaacgcagcggcggataaaacagacgggcttgctaaaggcagtaaaatagtgactgcaacagcagctaaccctgatccgcttgaaagacctaatgtatctggactagcgagcggatttctcataatagactgtacgacgactccagacacagctaggccgattcccgttaaaatagctagcaaaatacgaggcagacgaaattctaccaaaatagacgtcaagtcaggatcgccaataccaataaaagacgtaataatgtctagaggaggtatgttaatgtctcctaagctaaggcttatcacgctcagcgctataattaagacagaaagagtgataaacaggccgacagacttgaatcgagatggctgcttttttgttttattgacagtctgcatatatactcatgccttcctttctgtttttttgcgtctcgctaagtaaataaagtacggcgttccaagtaatgctgttactgcaccaacaggagtctcatacgggtatgtaataaatcgcgacaatacgtctgctaacagcaataaagatgcaccaagcagcgcgctcattggcaaaacgacccggtaatctacgcctattaaatagcgtaccatatgaggaacaacaagccctacaaatccaataggacccgcaatagccactgaaacaccagctaatacaatcacaacaactgccgtgaacgctctaatggcaaagacccgctgcccgagtcctctagctacgtcatctcctaaagacaacaaagaagatgctcttcccaaaccaaaggcaataatcagacctacgatgctaaaaggaagcaatacatgaacatgtccccaatctcgtccaataactgaaccggtgagccagaacataacgccttctgttttgctttcattaaaaatcagcagtgtttgcgtgagagacataagcataccttgtatagcaacacctgttaaagcaagctttacgtcactgtcgccgcctttaatcaacgaactcatcacgtaaacaataacagcagcaacagcccctcctaaaaatgcaccaaataccccgccaatcatacttacacccggcactaaaaccgttaaaaataccattgccgctgaggccccggcattaataccaaaaataccaggagaagctaatggatttctagttaatgcttgcatcaacgctccggcgacagccaagttagcgccaacaaatgccgttaccagtaagcgaggcagacggacagtttgaataatagactgttcttttgatccgtcaaaatttagtatagcttgcttaatcgttccaaaagaaatatgtatagaaccgatggaaatagataaaaacattgaaatcagtaaaagaataataaccgcaagaaaaatagctattatacgaagcggagatttgtttcttttggataagccgtgaacagctttcatagtagactgcgcctcctttcattcgaaagttcattaaaaagaaaaaaacaatcccgctggattgttcttttcttcgttattatttgccttcaaataataacttctctgcttcatctgcaataccatttgcaccttgtacacttcggcgaagagaccatttaaatacatcaacttcatacacttgattatttttaaccgcttttagctctttccataatggctgttttgctaaaggcgtatgacctttttcatttcgcataacaatgagtttgtccggatctgcttttacaagctgttccattgtcatttttacactgtactcttttgtaggatctgttaatgcatttttgaagcctaattgctcaagaacacccgttgtaaagaaatttgaagttctagcattaatattaccatttgcatcagcgataacaagtacattgcccggattttttggtgcttttgcttttaaatccttcattttttgcttatgctcttctaccactttttcaacttttgctttcttgccaaccgcttctcctacttttaactctgtatttagtaaatcatcgtaattagcatttaagtttttcaactcaatcgttggcgcaatttttgataattctttgtatacatttttatgacgttctgaatccgcgataatcaaatctggcttcaacagtttaatcgactctaagcttggctgtgctcgcgtgccaactgatttgtatcctttgatttcttttagtacatctttatcaataagctgttctgctttatcatcatcggctactcctacaggtttgataccagcatctaacaatgcatcaataaaacctaactctaatacgactactcgctttggattttcttttacctttgtctctccaagctcatgtttgaccactcttgttttttcatttttttcatcggctgaattttccttattcgtgctgctgcagccgataagcattccgattgccagcattgtaataaaagccagcagtcctatttttttcttattcaaatgtcattcctcctgcttgtatctttatgtagataatcgactcttgaaactgataatcgttatcattatatcagttttatctatttaaacaagctgattcgtgattttttaattaaaaaaattatatctattctacaaaaaaagagattgagacataactacatcattccaatctaaaaatgggataaacgagctagcagggatcacttgttccaccgctgttgatttccgtgcaagacttcgctttccgcaggcggccgatgagcctcctcgtcgcttatgctcctgcggggtctcaccgattccgcttttttcccgcaggagtcttcgtcttgccttccaatcaaaagctagaagcaactcaatatatgaaacctacgttcaccctcaccatgaaaaaatccgaacgattcatcgttcggatcttccttcaactaaactacttttctcccagccactttttagactttctatgaatatggtgtaatagggggcagttcaccgctaagacaccatttacctatgtcacgcagcttataagcaataggatcgtgtaagctaattgtccgggcgttgcgccagtatcggtcaaatttatactgatcagacgtggctctcgctcccatcccatcaaatatagtagaagtaatatgtaagaccgttttgacagtaaatgttttggccatcgcaatggcgactccgcacttaccccgctgctgtttcgttagcgcatcttcttttttccatgcatgatcaaattctgcaacagctttttctataagtgctgaacaagcatgaaggtttaaactcatttcaccatattgctgaataatgtaaggatcttgctccgctgcttcaacgcccgaacttatccacggctttgtatgagccttcacataagcttttgattcctccaaagctccttgagcaataccgtacaataagtgagtgagcataagctgagccaaatgcgttcgcaccgtaggaaaaaccttttgctcttcagctgctttatacaatatttcttcttcataaacgataacatcttcaaactttacacttccgctatccgtttgacgctgtccaaatccgtcccaattatcttcagtaacgattccggctctatgagtaggaagtacacatagcaatgcctcgccgcttccttcttcttgagccgatactaacaaacggtctgaatcggttgccccggaacaaaaactcttgcttccgctaagcattaatcgtccattttctcgaactgcttttagtcctgaatctctaggattaaaggcattgccccaaaatagctggtgagctgctgtttctttgtaaaaagttttgtactgctcagtacttccaaacagaaacgtcgaacaaaccgtcaaataatgataccccaacaagtgtgcaagtgaactatctgctttcgcaatgatattcacgactttaaaaacaatcggccagccggctccataacctccgtattccttaggaatcgggagagctaaaagaccgctttttctaagcagattacgctcatgtagaggcgttccaccttctctatctctttttacagcagttttggaaaactcttgagccaactggttagccaattcaaggatcttttcttgagacgctgcaatcgtttgggtgttgttcacgatttccctcctttctcaccttttagcgggtgttttaccattcactttcacttcaccaaatggactgataaatgtgcgctcgttctcatcgtgcttacgcttaactggaagccttggaaacaaaagctctgctgttcgatacgcttcttctaaatggggatatccagataaaataaatgtttcgatacctaactctgcatattctttgattcgttgtgccaccgtatcagcatctcctactaaagcagtccctgctcctcctcgaactaaccctacaccagcccatagattagggcttacctctaagtttgaacgatcgccttgatgcaaggcgctcatacgtttttgaccttctgaatccattcgagaaaatactttttgggctgatttaactgcttcttcatctacatgttgaatcagttcatctgcagctttccaggcttcttcttcagtttcacgaacaatgacatgaagcctgatgccaaatcgaatttctcttcctgtctgctttgctttttctttcattcgtttaattttttctttgacttgtgcaggaggctctccccaagtcaaatagacgtctatatgccttgaggcaacgtccatcgctacaggagaagaacctccaaaataaaggggaggatacggtttttggattggcggataaagcacgtctccacccttaacactcaagtagtctccttcgaagtgaacatcggattcatttaatacccttctccatatcgttaaaaattcatctgtcagctcatagcgatcgtgatggtttaaaaacactccgtctccttctaactcaacgggatctcctcctgctacgacattaatgagaagccttcctttcgaaaagcggtcaaatgtcgcagccattcttgcggcttgtgtaggcgacattaaacccgggcgtaccgctactaaaaacttcagattttcagtgactggcactaaagtagatgcagcaatccacgcatcttcacatgattttcccgtcggaagcaaaaccccgctatagcctagctcatccgcagcttgtgcaacttgtttgcaataagaatagcttgcagccctggctccttcatggcttcctaaataacgtccatctccatacgttggaataaaccaaaataactccacttgtattcaccccttttgaaagctacataaaaaaactccgttattacaaataaactgcaataaggagcctcagttgtctgatagcttcattttttactatttttaaatcaagcatacggattaggtgtagggtactgctgattcaacacccagttcccaaccgttcgaagcttgtattcagctggattatgaagagtatgagttcttacattacgccagaatcggtcgtatccgtattcagcatgaaccgaacgcgctcccataacttcaaatatcttacttgtgatatccagtgcagtattaccagcaaaaacattggcagccgctacgtgaactgctaggtttccacgttcttcttccgttaattttctgcctttttcccacgcttcatccaatatgagagctgcttcatctgcaagtgcactggctgctttcgcttgaatccagagttcaccgtattttcgcagtatacctggatcatccgaagctttttctactcctgatgttaaccaaggccttgttttagaagccgtgtagttttgtgcttcttcaattgctccaaaagcgcttcctataaagacattcgttaaaataatttgcgacagcgaggctccaatagttgaaaaaggagtaggattttcaacaaaatctcgaatcacttcatgttcttctattcgtacatttttaaagtctacatttccacttcccgtctgtctttgtcccatcgcattccaatcatctttgacggtaatgcctgttctgtcagtagacacgacgccgtttaaatattgtcccgtttctctgtcattaaatgatagccataagtactgagaatcaggtgaaccagaaccgaacgctttcgttccatttaacagataaccttgtgattgcttatcgccttttaggctttctactaaaggattagaggcatttccccaaaaagcttgctgctgaacagataaaggataaaaataggcctgctgttcttctgtgcctttgattcgaatatctgagacaaacaaggagtgatagccatataagtgacctaatgctgcatcgcctttcgccaactcttgaacaatagccaaagccgttgaccatttcccgccttctccgccatatttttgaggaattaataaatttaacagcccgctttggcgaatagcatctttttgctgtttaggtgttcccccttctttatctctttgtgccgcatcctttgcaaaagaaacggacagcttttttgcttgatcaagataaatttcttcctttacagttgttgcagtcatgttaaactctccttttggctcgtctttcgatactgagcgccatagtgttcatcaggcaagaaatgtgattttttaaatagcttttctctataagttccttcactgtaatctgttttgaataaatctctttcctgcaaaacaggaatcactaaatcaataaaatcagcaaacgttcccggcgtggtcacataagccatattaaatccatccatgcctgtatcgtctatccactcttccataaaatcagctacttgttccggacttcccacagtaaccggtcccattcctccgatactgacaaatttcactacttcttctaccgtccactttctatcgggatcacttattgtaaatttctctaaagcggaacgaactgaattcgtcgcaataaattcaataggctgttctggttcataggcagaaacatcgattcccgtccagccgctaaacagcgtagctgctccttcgaaattgacatagctctcaaactgagcaagcttctcctcagcctctttttcagttcgtccaacaattggtgtaaataaattaaaaattaatacgctctgtgggtctctgccttctgcagcgatttgagcgcgcatttttttcacataatctgcggctacttttttagtaggaaaacttgtaaagatacactcagcatgtttggcggcaaattctcttcctggggcagaagctcctgcttggaataaaactggagttcgctgcggggaaggttctgataaatgtacacccggaacactaaaccacttccctttatgattaatcgaatgaacccggtctggaagtgtaaagatccctttttctttatcttttacaacagatccttcctcccaacttccttcccataatttatagcaaacttctaaaaattcatcggcaatatcatagcgggtttcatgcgtaaaatgttcttctaatcctagattaattgacccgctttcaagatatgaagtcacaatattccatgcaatacgtccatttgttaaatggtccaacgtcgaaaattttcgcgcaaacgcataaggcttctcataagtagtagacaccgttaccccaaaccctaaatgctttgtggcatatgccatagcggaaataagcgcagttggttcattcaccggaagctgagcagcttgtttaagagctccttcgttacttttcctgtaaacgtcataaatgcctaatacatcggctaaaaacaatccgtcaaactttcctttttccaatagcttagctaacttcacccagtaatctaacgttttatattcggccgcctgatcacttgggtacgtccacaaaccaggtgtctgatgtacaacacaattcatatcaaacgcatttaaataaatatgtttccccatagaaacctccaaaactaattaaatacataaattaactaagaattaaatctgtttggaagtaatcttaaaacatattcttccagagtgtcaataaaacttctctctttataatgaaacataaatgaagctattactaatgctgaattaggatttctttaaaggttattgacttattattgcaacaactaaaaaaacactacgacggcgtctatacccctgtagataatcatttttatttgactgaagaagcagtaaaacaataaaaaaagcgccacattttcttttgaaaaatgtggcgcttttagcgttagtcttcaatacaaagatactgaatcacttcttttaaacttttctctttcatcgattcgatgtgtaagtgatatctttcgaatgacagatgtttagttaatggatttggtacaatcacacagcgcaagcctgctgccatagcagcttttgctccattagaagaatcttcaaatgctaaagcttcagagggctctactcctagcttttcaattgcatttcggtaaagagccggatctggcttcactttttctacatcatcgcgcgtttgaatgacttcaaaatagtgcagcaaatctagctcttttaaaaatgctgttacccagtctcgatatgagctgcttgctaaaccaatttttaatccaagttcttttgcttctgccaagtactccgctacaccttctcgggctactaatgatttcattttttcttgatgacgtcttaacgattcttgagctagttcctcttttgtgaactcattgttaaactgctgaagcaagtaatcgtaaagtgccgtagcatccgttcctacataagaagcaaacgttgcaatcggtagatctactcccctgtcttctaacatttcgcggtacacctcgtaccacacggattctgtatcaataattaatccatcaaaatcaaacacaactgctttaatcataatttacctacctttttctatcttatcgttcttacatagtaacacgttcaaaatacgcaatccataaatgtggcttccttaataagataggcttaaacaggtagtttctatccttacttttctccgactttcatcaaaggtgacatttcttctgtttccttaaactcaatggaagacagctgccttctaaaacctttcgttgcatacactaaataaactaaaccggcaatcgcccagccaataccaagtaaaaatgaattgcgctccaagttaagccataaaacgccaatcgccgctgctcctaatagtggcataataatgtatgaccaaaaacccttagccgaccggtgctgcttttgatgaacagcatagtgcgcaataaccgaaatattaacaaaagaaaacgcaatgagtgctccaaaattaataaatgacgtagccgttgccagactgaagaaaatggcagttgctgatacaactccgactaatacaatatttcgagagggagtgcgcagcttaggatgaacataaccaaaaaatgactgaggtaaaattcgatcgcgtcccattacgtataataaacgcgaaacgcttgcatgcgatgacatgcctgatgataatgttcctgcaattcctccagctaaaaagacaatttgaaacagcgtaccgctcacatacatagcaatttcaggagccgcagcgtctggatgcttgaatccttctaacgttggaaaaaccgcttgaataaaataagatgtcacggtaaacatgactcctccgattaacgcaactaaaaaaatagcttgcggaatcgtttttttaggattaggcgtttcttctgataacatagccactgcatcaaaccctaaataggaaaaacacataagtgtggctcccgctattagtcctgatgacgtcatgttctgattaaagaaaggcttcatagaaaaaagagtaccttcccccattccgcctaacaaggctttgattgaaacagcaacaaataatactaaaatcgtcatttgaaatacaacaagaaacgtattgaaattggcggtgaaattaacgcttcgtaaatttagcagcgtaacgataatgacgaagctgacaacccaaatccacgatggtaccgaaggaaaaatagatgataaataaatttggaaaataagtgcgttaaccatcggtaaaaagagataatccattagtgcagaccagccaactaagaaccctaaatgtggattgattgtcttttgcgtatatgtataagctgaccctgcatttggaaacacttgaatcatctttttgtagcttactgccgtgagaagcatcccgacaagggctatgatataagacgtgggaacgtgtccattcgtcatatcagacgcaatcccaaacgtatcaaacactaccatcggagtcatatatccgatccccattaatacaatctgccataatttcaacgacctttttaatgttaccgtttcatgtttcatttatcttcccccttctatttattaagaacattctgacaattaaatccataaatgcctgtatttaatttctttatataaaaatgaatgactttcattcatttttatataaagagtagttacatttactatagcaaatatatgatttatttctttaagttggtaagggttgctaacaaactatctttttcttttatcataatatgaaagcgctttattttaaatagctatatgttcctaatctcctgctatatcaacgcagaaacaccctctgaataagagggatttctgcttacaagccgttattcaaccatcgtatccaatgactctcttttcgttttcactgcaactaaactagcaaaatcatgaatgattgtagctgcaagcaacgaggttatttgagttggatcataagaaggcagcacttccaccaggtcaaatccaacatagttaaattccgtcagagaacggattatctgcagcgtttctctgctgctgaatccacctacttcaagcgttcctgttcctggtgcacaagaaggatcaacaaaatcaatatcaaacgttaaaaagcacggcgtatctccaatagctgtcttcatttgctctaaaatcactgaaaatccttgatgttcaagctcccctgccgttactacatgataaccgaggtctttgctttcttgaacatctcccggatgatttaatgttcctctgatgccaatttgaaagaccttctttggatctactagcccttcttcatatgcgcgtatgaaaggagatccgtgccaatatttttcatcgtaatacgtatcccacgtgtctgtatgggaatcaaaatgaatcatagccactggaccatatcttttagcagcagcacgaaggcttgccaaagtaattgaatgatctcctccaattccaattggaacaattcctctatccataagagtacctaccgcttcttccattaattcatagcttctgtgaatattatgcggaataacgggcacatcaccaatatcgatagcatttgtatcatcgaatggatatacgtcgtgtaccgggtgataaggaaacagcgtcatggaagcttgccgaattgcctgaggtgcaaagcgcgcacctactctgaaagatgctgcagtatcaaacggcatccctactagccctacttttgcattttctctttccgctggcagcctcataaatgagcccgttgtacaaaattctggtttgacatctggggacaatggatatttcataatttactcctccgtttcaatgatttcagttagtcgctaggtatttccactactaaaatcattgaaagcaatacgggaataagaaacgtttgccgactcatattcattgctccttgttacatttattggtggttcagctcatttaatactttttcaaatgtagaaatgacttgatctacttcttccgctgaaatagtcaacggcggctcaatacgaattgttttagagtttacaagcgtcccagctactagaatcccttcgtcaaacatacctttagaaagcgcgtagccaatttcatcttggtgaaactcaattccaatcattaaaccttgccctctgatttcaagtactttatctccatgtttttcagctgctttttttaaaccagtaaggaaatattctcccagctcttttgcacggtttggcagctgctcttcaatcaacacgttaatggttgcaatagcggctgcgcaggcaagcgggttgcctccaaacgttgttgtgtgcataaacggattatcaaagaagcttgaaaacactttttctttggctacaaccgcgccagcaggcataactcctcctccaaaagctttagcaagacataaaatatctggtacaacatcgtatagttctgatgcaaacatttcaccggtacgtcccatacctgtttgaacttcatcaaaaattaagatagcgtcgtactcatcacatagtgcacgcacttcttttaaataattttcaggaggaagaataatgccgccttctccttgaattggttctaataaaacagctgccacatcttcccctacaagcgcgcacgtttcaaatgttttgcgcatcatgtcaatatcaccaaacggtacgtgacggaagcctggaattaacggcagaaatggtttacggaacattccttttgcagtacctgataaagaacctagactttttccatgaaaagaacgtgttgtggaaataaacgttgttcgatcactatacattttcgctaattttaaagcggcttctacactttctgttccgctgtttgtgaaaaaggaatacttcaaatcccccggtgtaatatctgctaaaattttagcaagcatcgcacgaagtggatctaataagtcttggctatgaagcgcttggcgctgaagctgatcttgaacagctttgactactttaggatgacggtgccccacgttataaattccaaatccgcccaaacaatcaatgtattttttaccgtttacatcagtaaaacaagaaccttcatctgaccattcaacagctgcaaactgcgtatccaccgttactgttttacgatattctaaaaagcctgggttgacatgttcacgaaatccctctactgtttctttcgtaatccactgtgcttcttcagctgacacttcgcttttttcaataagtcctagcactttgttgatatattcgtttacttcaccatatgctttgtttacctcttgatttttcgtcactgtattcatttcaatatcgctccttctctactttttaatttttaaaccagccgattggctctacttgtaagttaatgttaatttgttttacttcttgaaattcttccaaaccaaacgtgcctagtcctcggccaattccgctctgcttatatccgccccaaggcgcttcgttaaatgtaaaatgatatgtgtttacccaagtgatgcccgcacgcagctttttaatcacccgaagagcttttgcaccgtcgtttgtaaacacactgcctgccaaaccatattccgtatcatttgcaagcttaatagcttctttttcgttcttaaacgtttgaataacgacaacgggcccaaagatttcatcttgcacaattttcatatttgacgtaacgttactaaaaaccgtgggttctacaaaaaaacctttttccaatccagtgctggtgattcgattgcctccgcatacaagacgggcgccttcttgctttccaatttcgatgtactttaatacttttttcatatgttcctcacttacaagaggacccatttcaatctcttgatctattccattgcctactttaattttttgagcacgctctgcaaaacgttcgataaatttctcagcaatgctttcttctactaaaatacgagagcctgcagcgcaaacttggccgcttcctgcaaaaattccaaataacgcataatctacggctgtttcaaagtcagcgtcagcaaatataatgttcggggactttcctccaagttctaaagagacttttgttacattttctgctgcttgacgcataatgtgttttccagttaccgttccgcctgtaaaggaaattttgtcaacacgcttatcttgaataagcgtatttcccacagtatctccggctcccataacaaggtttgcgacaccttttggcaatcctacgctttctaaaatctcaaaaagttttgtaggagtaaccggtgttacttcagaaggtttaaatacaatcgtatttcctgcagctaaagcaggtgcaattttccacacgctcatcaacagcggataattccaaggtacaatcaatccgcacaccccgattggttcttttataaccattgcttgcataggtgcaggaacactgtaggtttgaccgtctggctttgtaattaatccagcgtaatatctaaaacaagcagctgcatcttccacatcggcctcagcttcgcgatatggctttccattatccattgtttctagtgctgctaattcttctttcgcttcctcaagcttatcggcaattttgaacaagatggcggctctttcagatgcagaagtctcagaccaaattccgctgtcaaaagcttctcgtgctgctccaatcgctgttttcatatcttctatgctgccttctgcagcatatccaatcacttcacctgtagctggattaacagtaagacgctgcttctctgcttttttccactctccgtttatgtacatattcaaagttaaagttttaacggctgtacgatccataagatacctcctcattaaataacgactgattgtcagtcattttaaacttttaaaaacttacaattctgataattatttgtatagtttgaatgaatgtcagtcattttaataggtgtaatattagcattgctaatattacacggacggcacaagagaacgctttaagaattgaaaaagttcttcctttgattgctcaagtgtgacatcttgctctcgcccgatgtaaaaaagttcagcagcattttcaatcaagttaatcattgtcttagctgtccatttaacgttaagctgcttgatgacttcttcctttctaacagcctcatttaatacctcttcaaaccagttgtaataaggtaagtaaatagcttcccatgtttctaatgaatagtcaaaagcgagccctgaatagcataaaacaagaacatccctatactcatctgttgttttatacgtttcgtcaatcattacctctaatgtacttaaaaaatccgttgctgttttagctcgttctttgatcttttcaagcgacaaagaaagtaagttttctgcaatagcaggaacaagagcatttttagatctgaaataaagataaaaagtcccttgagctacgcctgcgcgctttacaatgtctgaaatggatgttttatcaagtcccttttcagatatgacttcaatcgctgcctgtaaaattttatcgtatttttcacttgtgcttgtaaccaaaactttccctccacctataaaatgaatgactttcattcattttactataagcaactagaattatgcaagataaatttttctgaatctttaaatttaatcaaaaaattgtccgtatggcggcttcaaaaatatttttttattttatcaatttcccctcgctctttttatatgtctcactgttatttctcttcctttcataatccaaagtaaaagctgatacaacgcactttaagcacccaatcttctgaaataataactttattaaaaagatacttttctgcctttatttatactgcttgatcgcttaattactcttgacttgaagttgacggagtaaaaaaaagagtggtaacatgtaaaactgattcaacagtcacttattccatccatttatttcccataatttctcttaactacgatgtacatttttagttaaaaataactttacatcatctaaaatcatccactatgtttatttcacattttaaattttctaggtttatcattcgaaaaagcgggtatgcatctcgttgtatttagtaaccgttttacatattaatcagttgagttaaaactttataaaggagttatatttcatgaagaaactattgttaatcagcatgacttgctttcttctagttattgcttccgcttgcggcaacggtaatggcgcatttaaagataaaaaaactattaccattggcatgaataactatactgaaaacattgcctacacgtacgtgtggaaacacattttggaagatcgaggctacaaagtcagaaccgttttcttagagaaggctggtgtttgggtaggaacagctaatgacgacattgacgtttcgtttgcaccatggcttcctacaacagatgcgcctttttacaaaaagtataaagatcaagtgaacatcgaagacccttggcttaaaaacgcacgcttaggatttgcagttcccagctatatgaaagatgtgaacacaacggaagaccttgctaaggttgcttctgatgtcgataacaaagtaattggaattgacccaggctccagcattaacggattagccgaacaggcgttaaaagattataaccttaaaagctacacgcttgtaaaatcatctgaggcagctatgctcagtgaactgcgcaaagcctatgatgccaaaaaaccaattgttgttactatgtggaatcctcactgggcttttgcagactttgatatcaaatacttaaaagatcctaaaaattcgtttggagaccctgacaacatttacacaatgacaagcaaggaatttaaaaagacaaatcctcaagtcataaaatggatgaataatgcacagatgaatgataaattaatcagtcctcttctgtcacaagttgaaaaatcttcaaatcctgaagaagcagcgcaagaatgggtaaaaaagcataaaaagctagtcgacagttggacaaaagattaatggacgtaaaagaaaacaacaattgaggtggacatatggaacacgtaaaattaaaagtacaaaatataaccaaagtgtttggtaagaatccgtcaaaggcgattgatttacttcaaaaaggaaaaacaaaaaaagaaattctagaagaaacaggaatgacaattggggttaatcaagcaaacttcgaaatcaaatccggtgaaatcttcgttattatgggcctgtctggaagtggtaaatccactttagttcgtatgtttaatcgccttgttgaaccgacatctggatctcttattttagacggtgacgatgtagtaaaaatgaacaaagaggaacttcgcgacatgcgccgaaaaaaaatgagcatggtttttcaaaactttgctctattccctcaccgtacggttcttgataacacagaatacggattagaagttcaaggtacaccaaaagccgaacgtgaaaaaaaagcaaaagaagcgcttgaattagtaggtttgaaagggtacgaaaatcaataccctggtgaactaagcggcggtatgcagcagcgtgtcggactggcccgagcacttgccaatgaccctgacattttattaatggatgaagcattcagtgcactagatccgcttattcgtaaagacatgcaagatttcttactggagcttcaagaaaaaatggagcgtacaatcatttttattactcatgaccttgatgaagctcttcgaatcggagatcgcatcgttttaatgaaagacggcagtgttgtgcaagtaggaacacctgaagaaattatgacaaaccctgccaatgattatgtcgagcgctttgtcgaagacgttaatgtagctaaagtatacacagctgaaagcgtgatgaaccgtgccgaatctattaccgtagaccgaggcccgcgcgtggctcttaaaattatgcaagaagctggttattcaagcatctacgtcgtagacaagaaaaaaactcttctaggagttgtaactgcagatgatattagccgtgccattaaacaagataaactgacagcagacgtattagatacggatattccaactgttacaacagatacgctactagaaaacttgtacgacaaaatggttatcagccgctttccgctaccggttgtagatgaaaaccatcgtttgcgcggcatcattaaaaaagaacgagtgattgaagcactcgccggtactgatagtaatgaggtgaacgtaaatgaatagtattcctaaaattcccgttggcaattggattgaccattttgtcacgtttttaaatgataatattaaagggttttttgatgttatttcagctattgtcgatggtattgtaagttttattgtactagtgctaacctttccaccagcactaattttaatcttaattgtgggaatcattgcttggttttcaagtaaaaaatggtcatttactattttatcgatgattggcctgttatttattcttaatcttggctactggcaagaaaccatggacacactagccctcgttttaacaagcgtactgatttcgattatagtaggaattccgcttggcatttggacatctcaaagcgaaaagacggctcggattattacgccaatcttagactttatgcaaacaatgcccgcatttgtttatttgattccagcacttttcttttttggaatcggtgtggtgccaggtgttatctcatctgttatctttgcaatgcctccaacgattcgcttaacgaacctaggtattcgcgaagtacccgctgacttagtagaagcagcaaatgcctacggttcaacaacaaaacaaaaattatttaaagtacagcttccattagctacaaaaacaatcatggcagggattaaccaaagcatcatgctatccctttcaatggttgttattgcctctcttgtaggtgctccgggacttggtgcggaagtatatcgtgcagtttctcgacttgaagtcggcacgggctttgaagctggaatttcaatcgttattttagcgattattttagatcgtattacacaatattttggaaatcgttcaaaccaacgagcataagtaaaaaaagaagccaactccggtgagttggcctctttttatttatttttgtaacacgctacaaagattgcttctccttgaaatgattcaattctttgttgattcgttttgatgtcgaaaaactgcttaaatccgcttggtatattcagcatatattgagtaagctcacgctttgtctcttccggaacattcatcatcccgcaccagtcatcaaataaaaagcgctttgggaaagttgtcagcacttctgtacggaatccttgcatttcaagcatagaaagccactctgtttttttataagcacgataatggcttggatctcttgtcttttcaactcgattataaaactcgtcataagcattcacttccggtgctacattatcaatgagcaagaactgtccccctggctttaacactcggtatacctctttgatgaactgtttaatattaggaaaatggtgcggtgcaattctgcacgttaccgtatcaaactcgtcatcttgaaatggcatatcttcagcatctccttgaacaaacgatacattttcataaccattttctttaatgaagccttcagcactttgcagcatttgaggagttaagtcaaaagccgttacttcttgaaagacaggtgctagcttatttgccacgtgtcctcctcctgttgctacatcaagcagctttcctcctttattttcttcagcaatttccgctaaaacagctaaatctttgcctttcgcatgacctttacttttgacgtactttccagcatttcccccgaactgactgaccaccatttctttattactcatctattctcccccccattttcctctttaagactctctattactttgcctagtgcattcacatatttattatgaaacgtgtgaatgtattctttttctttctccccattgatgaaacatgcgaaacagcggaggaagaagcagccaaatggttaaaattcgaagcacttggaccgctaccaccaacgtcgaatcggcttgcagtacaattgatgtagtcgccatttctgcaatgcctccaggagcaaacgctaaaatagacgtaataagcccgattccagttattttggagactgctagtgcacaaacaaacatagcagcaattaagccgattgtattaataagcgcaacaactataattttttttacgccaataaacatttctttatgaaagcgagaaccaatgcttgacgcgataaaaatttgcgataaaatcatcacagaatgaggccagtatgcttgaagattatagcccgcgtacgatgaagcagctgtttgaacaatcgcaacagtaagcattccccctactaaccaaggagcaggaaattttagtttttttcctatataatagcctactactgctgtaacgattaaaacgcctgtccataacagtgattcccacccaaaaatacttggagtagctgacactgcatgccgacctgtattacttccccaatagaccacaaataaaggaacagcaagcacaactaaaaagacgcgcatcgtttgaatgatgcttacaactgccgtattggcccctacctcttcagccatgcctggcattgcgctcattcctccaggagtcgtgccgaaaaagcttgttaataagtctgtggaactgaatttccatagcaaataaccggataaaagagaaaaaacaacggacagcaaaagcatgatcgtaatggtggaccagtgagattgaaacgtagttaatacagacaagttaatcttttgacctaattcaatccctaaaatacactgtcctgcgtacagccaatattttggaataccttttttgcttgtttgagataaaaaacgcggctttcggaaagctagaatagcagctaaaatgagggtcccaagcatccagccaatggataagcccgttaacgataaaagaaatcctcccacgcatgttagtaaaataaaaaatatagattgtaaaaaaataattcttgcgttcatatctacttccttccttctacaaggcttttctttcttacaccgaacattcttcttcttaaatatagtataattttagaaataattaaaatatcgaaattttattataaaccattcattttttttattcctggagggatagtatggacgatcgagattggcttattctacaagtgttgtatcgagaaaaaaacattacaaaagcagccaaggagctgtttatctctcagcctgcgcttacgcatagactgcagcagatggagaaggaattccatgttcagatcgtgaacagaggacgccgcggagttcaatttacaccgcagggagaatatttagtgaagtgcgcagaagaaatgctgctcacgcttcaaaaaataaaagaaaatgtgttaaacatggatgatcaattaaccggtactttacgtctaggagtgtctaactttttcactgactacaagctccctggactattacggttatttaaagagcgatttcctgacgttgaattcaaagtcacgaccggatggagcagcgacatggcccacttactttataagcacgatgttcatattgcgtttgtaaaaggtgattataactggcaggatcagaaagagctgctttttaaagaaacgatttgcattgcgtctgcacagcctgttgacataaacaaccttcccaatatacctcgaattgactatcaccaagatcgttttttaaaaacatctgttgataactggtgggctgaaaattactctcagcctccccttgtcagtattgaagtggataaagcagaaacatgcaaaaagatggttgtaaacggactcggttatgcgattttgccgagtatgctgcttgatgacgcagcagagatttacagatacacgttaaaaacaaaagaccagcagcctttaacgcgcagtacatggatgttttatcatgaggattcattaaaaattaacatcgtaaaagcttttattgagttcattcaaaacttggatttaaaagatgtacactgatagaaagagattgaaacaaaagtagtttagctgaaatgaaaaaacgaaccattaatcaaaatgtttgattagtggttcatctttagattagattcatttcgtcatgtctcacccttttctttatcatgtctactcgtcatttgttccgcccattaagtcagaatacagcttgctttgctgttcaagaaaaactttagcaccgctgctatttttataaaaagaggttaaatcgttatctttaagcagctgtccccattcttttgtatgaaccatttcatacactgtcttattccaatatgctacctgctctttggtcatattaggcggtcccattagacctctccaatggctaaatgttacgtcaattcccgcttctttccacgttgggatctcttttaactcttctagcctgctgggagaagaaacggcgagtattcttacctgcccttgttcatactgcttttttacttctgataatgacataggtgctacatctagctgatgatgaacgagcgcatcgatcactttatgactgctgttgtaaacgaagaactcaagcttggaagagtctacgcctgcttttttattcagctgcatgaacgataaatgatcgtcgtttcctaagcgaggtgatattcccactttcatgctggattcactttggtttaacgtgcgtatgagctgttttaaattatatataggagagttagcagggactacgatgacctcccattcagatgttaaaatagcgagcggagtaaagtctttataggttaattgactttgccctagcaaattatttgtaatcagtaagctggaatttccggaaacaatattcccttcttttctctgtttaatatatttccatccttcttcaccttgcccacctattttattactaacagaaacgggtaccttcacaatcttcttttccgttagcacttgttgaatggctcttactgttgcatctgctcctccgccttttgcaccggctgccacaatttcaatttcccccatatcaatacggtcttttttagagggagaagaacagctaacaagcaatacacttataaacactatcatgagctttttgatcatatataccatccttcaaggctaatgctacgctaaatagtacttgcgctccggccgtccaataatcccataatcatattcaacgtgacattcaccagttgatactagatactctaaatatcgtctagctgtcgttctagatactcccatgtgttgtcccatctcttcgatcgtaattcctttgatgctttttaaaatgtcttttgacttttgtaatgtgataccatcaatacctgaaggaagagatttatccgtttttggctttgttctgacatgtccaaagtacgcatcaataaatgattgattaacttcttcatgcctactaaacagttcctttttctcttgatactgtttaatagcattaatgaaggattccatcataaccggcttaatcaaataattaacgacgccgtttctcaaacagatttctacaatgtttttttcggttgcagccgttacaacgataacgtcaacttgtggaaactgcgctctgattttcggcagtaaatctgttcccatttcatctggcatatagatgtctaaaagaagtaaatcaactttcttctcctttagcatttcaagcgtctcttttgcattcaacgctttgcctacaacttccacaccatctacttctaataaaaatcgctcttgaacttgagcaattcgaaaatcgtcttctgcaattgcgactcgtaacatttcgactctccccttacttctcatgattcagttttttggaaggtaaactgaaaaaatggctcctccttctggctgattatacacttcaatagatcctccaagctcatctaccattttctttatatttgccagtccgtatcctctgtctgtacctttggttgaaaaaccttttgtaaaaatttgatttagtacttcttctgatatacctggtccgttatccatcacttcaataattaaatcatgaccaatatcggtaataaaaaacgacacttcttttttagactgctgactcaccgcttcaaatgcattatcaattaagttcccaataatgataatgagatgagaaatttcaatatgttctgggagcgtatcgagtgtactctcagagtcaaccgaaaagtgaattttcttttcagatgcttttccaatctttccaagcaatattgcttggactttagaatctaatatctgatcaaatagaatacgattttgtgtttggtgtacagctgattctttttgaataaactcaaatgcatctttgtactgccctaactgcagcaaacccgacaaaacatacagcttattcgtaaactcatgcgtttgggctcgtaaatcctctgaatactttcgtacttctgaaatcgtattgattaagctttttaattctgtcttatcacgaaaactagcgaccactcctacaattcgttgatgttcaataatgggtgttaagtttaagataaacgttttttcattcaaaaaaatttcttggtcgcttcgggctattcccgtatctagcacttcaatcatattcgtataaggaaatacttcaatgatatgatgatgcaaatattctgtctgtagtcctagcatatttttagctgatgtattcatcatcgtaataaagccttgatgatcaatagcaataattccttcttttatcgaaagtaaaatcgcatttcgttcacggtataaagaagcgatttcatggggctcaagaccgagagtatcttttttaatacttttagctaaaaagatacccccgatcataccaagcaataaaacagctaatgaaaataggataatttgctgaatgcgcgtaatgagctgagcatgaacatgagactttaaaaactcaaccgtcactactcccacgacctccgtatactttccatgactgatgacaataggcgctttccccataattgcaggccctgtggttccctctccgtcaagcgtataatatccgccgaataatagtgctctatcgttaaccgcctctttgtctttctttcctatccattttcgattagcatgagaatagatgatttgctcacggttttgaactacaatacttgctgctccgatttgttccctcacttgctcggcaagcggctgaatatagcgactcggctgttttttttgaaaagcagctttgacttccggcataaatgatattgatttggctgcttgaagagccagctgctcggcttgccttttagattctacaaactgcatgtaagagaaaatactcgctaaaagaacaataacagttatgattaatgctgcggataaacctacgatttttgtttgcagcgatacttgaaaccattttttcatttcatcgcacctttagcctttaccttataattctattcctcttttattttatcaaatttttttgtatatccgctccttattccaaaagctttttagacaaaaaaacttaccaatcccaaaagcggaattgataagtttttaggttcatgatctttacagcgtaataactcctgtgataatagctactaaaagcatcaccatcgctgttccaatcgtccactttaaagtaaagcgctggaattcaccaagctcgacttttgccataccgaccaatagatacgtagaagcaactaaaggacttagtaagtgaacaggttgaccaatcaatgaagcacggccaatttctgcagcatcaataccgtatgctgaagctgcttgagcaataattggtaaaatcccatagtagtaagcatcatttgacataaagaacgtaaatggcatacttgtgatggctgtaatcacagacatgtaaggccctaacgcatctggaattaatcctactaaactattacccattgcatctaccatttttgtacctgataaaatgcctgtgaatacgcctgctgcgaatacaagagatacaacagcaagtacattgccagcatgtgctgtgatacgctctttttgaacttctaaatttggatagttaatcatgatagcgattgcaaatccaatcataaacagaatttgaagcggcataactgctgtgataagtcctactaataagagagctgttaaagcaaagtttacccacaaaagcttcggacgcttgtactcgattccttcagcagcggctgcttctgcaaaagctacttgagcatttgtgacgtcttgaatatcaataacacctaagcgctggcgctctttttttccgaaatagtaagccgtgaataataaccaaacagctccaccaatcatggctggaataagtggtgtaaacacctgtgaagcatctaacttcaatgcgctcatcacacgagcagtaggtccgccccaaggcgttaagttcataactccactacccataatagcgatacaggctaaaatcatcggcttcatgtttagctttttataaagcggaagcatcgctgagagcgtaatcatatatgttgttgttccgtctccgtctaatgagataataagaactaaaatagctgtaccaattgtgatttttagtggatcaccttttacgatttttaaaattcttcctacaactggatcaaacaaaccagcatcaatcataatcccaaaatataaaatagcgaacattaacataacgcctgtaggtgctaattcttttacaccatttaaagccatttctccaatatcagttgtgaatccccctatgattgcaaacaatactggaataaccattaaagcaataagcggcgttaatcgttttgtcataattagaaacataaatgtacaaaccatcaaaaacccaagaatagctaacattattacccctcctatttttgaatccgctttcataacagtggaagcgattcgtttgtatgtatgacccgcatatgtatgccagttcgtctatacgattacaacatcgcttgttcactattaagttgtaccttaaaactttaaaattttctgttttttcttaaaataatcataatttacaggagggtatagtgtaaataattcgtactataaaaacttttaaaactttatgggtaattaaatcctttttgttcatttgaaggataaaagaaaggaagaggaaaaagataggaaaataaaaaacggagagagaggaactattctcgtgaattattcaatttgaactctaagagaacaagctccaggatgaggagttttattccattgagtaagagactcctctaaaaatggaatgtttttcaacttttttgtttggaacttttctatttttgaatatttctctaaagcatacgtattagcaaacatttcttgcgttctatttccttcttttaaaagcgttccatttgtcatacgatccacatgatggcctaattcatgcagaatgataaaagcaaattgatgaggctttttattttttgttgtatcgataaagacaataggacattccgttactgtatatttaatatagtcaatttcaaactgaagtttgcgcttctcttttggaaggttatcattaaattggccatagtacacacctagcacatcttttccttgcacctttacactgcctaagcaatacacaccttttagcccatcccagtctttttcatctgttacattagcaatttcctgcagggcggctttttgcttcgcactcatgactccatgaaacgttacgccatgaattttgattttttcactacgcttaaacatcttcttgcctcctttgctaaattccttctacaacatattatttagcaataagtatattcattcacaatacatggttaaaaacatgaagttaatgtcaagattcccgttttgatgttttttaaccatgcttatatgctgcttcgtttattttctatttttactatattacatatgtagccattaataaaatatcatttttttatgatttatcattacttttttttatttctatttttgtttatcgataatctgaagcctgtgtatcatttttaaatttaaaaccattgctatataaagaaaaggatagcaaaaaaacgagtatatcgtcttccattcgttataataaaacacttctgtttgggcagaaatatattcaaacagtgttgtaagaattacccacactgtaatatataaagcttttttagccaaactcttgctctgtggataaaaattcaaaaatacactattcgtcgcaggataaataaaaattaaaagatattcaaaatctactccttttgtaaagaatccataaaggtcatatttagcatcaagatatacatctgctaccgatcctaaaaacacaacaaacaaagaagttgtgtacatttctatccagctgatacgttttggcataactagtacactcagaatagaaatcaccgttgtaaggattaagagcaccatgctaaggacctcgttttctataggagatagaaacagctttcccattggatattaaattcattctgaaggctaaaaaattaagacttcgtaaaaaaagagattgaggcataacgaaatcaagccaatctaaatacgaacaaaggagataaatgatttggactgcttggtacgccgctgttgatttccgtgcaaaacttcacttacccttctgcggggtctcagccactccactttcccccggagtcttcgccttgccctctaatcaacagctagaagcaaatatatataatctacgttcaccatcacaataaaaaatccgaacgagttggattctttatcaagaatctcgattcatcgttcggatcttccttcaactaaactacttttgtttcagcttctttttgttaacgaaaggaaataatgcaagaaccaagctcttgctgtccccatttaagtgaaagatgatcgtgatgtgaaagcggacctactccctcaggggtacctgtaaaaataagatctcctttatcaagaccaaaatgttttcctgtaaaatcaataatcgtttgtaagtcaaaaatcaaatctttaatattccccagctgcacgcgttcattgtttttcactagcgaaaagtctttcttcttagatgcttctactccttcaaatggaataaagtttcccacaaccgcagaatgtttgaatccttttgcaagcagccaagggtgctttctttgttttaattcgctctgcacgtctcgaagcgtcaagtctaatccaatcgtcatctcatcaacaagttcatccactgttatgccttctttgtaagattgtccaatatgaagaatcagttcagtttcaaagtgcacctctccttggtcgctaggaagagtgattgattgtccagctgcttcaacgagagcgtgagtaggtttggaaaataaaaaaggtgatgttggaatatcattatgtaattcttttgcatgcagtgcgtagttccggcctacacaataaatatttttaatatctttcactttcatcatcccttctttcgttcaaataaagattttttaacttgtattcttttattttacaagaaaaaaaggttgggacataataaaatgaatccaatctaaagacggaaaatgggaataaatgagctgaactgcttgtgacaccgctgttgatttccgtgcaaggctccgctttccgcgggagttttcgccttgccctccaaccaacagctagaaggacctgcgcacacgaaacctacgttcaccatgaccataaaaaaacacgaactatctatttttgatagatagttcgtgtttaacgttagcgaaacacttttctcacattctctttctttcaatccgttattttctagcccattttgtaatgcctttgatatcatctggagtcgtacgacagcaccctccgattaactgagcacctgcttcataccagctgtgagcgctgcagccatacgtttcgcccgcagatgttccgttccatgttttagattcagcatcataatgctcccctgaatttggatacacaatgaccggcttatccgtttgagatttaatttctttaataagtgaagaaatatattgaggcggcgtacagttaactccaagagccgctacttgctcgtaggaatccagatagcgtgcacactccgagattaatgttccgctgctaatgtgcaggtcatcttttgcgctgaacgtaatccatgcgtacgcacctgcaaattcttctagcagcctcgcaatggctcttgcttccattacattaggaatggtttcacaagctaatacgtccgctcctgcttcaattaatgctttcatacgaggacgatgaaattccattaactcttcttctgttacgtcatactgtccagtatattccgatccgtttgctaaaaatgctccgtaaggccccaccgaagcggcgacaattggttttggacgattatgacgattctcttcttgctgccaaaattcatctcttgcttccgccgcaatttttacagatgcttgaattaactcgcgagcctctgcttcactcaaaccacgtttagcaaaaccttcaaatgtgctttgatagcttgctgtaattgcacagtcagctcccgctgcaaagtagtcttggtgcactctcttaatcagttccggctgctccatcagcacttttgcagaccataagctgtcgtttaaatcacagccatatctctccagttcagttgccattgcaccatctagtacaatcacaggaaatgtatataaaatttgttggataggattcattgtttaatctagggttgtccactagcaattagtttcgattaccctatcctcctttcagataatttaaaatatatgcaaaaaagtctaaaggactaggcaacttttgtcaagaaaccgaaaaaacgagcatggatttataaccaagctttttttaatcgttttattccttcttctatttcttctctccccaaacttccaaaacctaataatagatgagtcatttgttgaggtgattccgtaaggcaataacgagaagtgccgtagacagagacatcttgctttcgagctgcgttaattaattgctgttcgttcatatcgttgtgcacgcgtacaagtatatgcaaacctgcagattcacctgatatcgtaatgtttttgttaaactccttctgtaaagctgctaaaagagtactatgtttcagttgataagcagttctcactcttcttaaatgcttactccactctccatttttcatcatgagcccgagcgtccgctgatggagagttggaacagcttgctcgtataaagagaaacgttcatgatattcctttagaagaacttcaggtaatacaaggtagctgattcttaaagaaggcataaaagattttgaaaatgtgcctgtataaatgacgcgccccttagtgtctaagctttgcaatgaagggatgggagagcctttataacgaaattctccgtcataatcatcctcaataacaaatccattgcagtcattcgcccatttaagaagctctattcttcttgaaacaggcatgatcattccatatggaaactgatgagatggtgtaacataaacagctcgtgcttggctatcataaagctcttgaatgtttatgccattgttattaagcgacacgggttttaaggaaaatccatgctgcttaaatacaaagctagccccgtcataacaaggattttcaaaggcaatacctctgatgctttgctttaacatctgcgctaataaactgagtgattgctgcgtacctgctccaataataatttgatgttttgaacaaaccactcctcttgactgataaaggtacgtcgcaatttcttcacgcagtgattcttctccttgactttcttggtacgtgaacagcgcttctctataggtttgaagactttcattgtatcgctttttccactcattcaagggaaacaaacggctatcaacttttccataccgaaaatcataggtacacgactttgtttctgagtgaggatgtaaaaatacagtcggctttttatctgtttgcagtaaatcaaactgtgtattcgttacgtacagtccacttttgggcctgctttctacatatccttcagctaaaagctgctgataggccatatctacagtatttcgacttacgtttaagtaatcagcaagagaccggatagaaggcagtttgtcattcacttccaccctgctagatacaatttctttttttatacattcatatagctggtgatacaaaggcatatcatccttgcggtttaataaaggtgtgaacttcacgctagctcctttcatctatccctattttatttttcaaatctggctcttttagaggggatacatttcttttactataagtgtagatcatctgattaaaaaggagaagatttaatgactactattacaattcgtcaagctaatgctgctgacatggaagcacttatttcattaatgaacgagtacattgttgatttttacaagcgccctcagcctaccaaaaagcagctgagaaatttaattaatcacttgtttcaccatccggatgctggcgttcagtttatcgcgactcaaaatgacgaggcagtaggtttttcgacactttattttacatttagcaccacgcgtgtaaagcctgtagcgattttaaatgacttgtacgttactgaaaaagcaagaggacaaaaaattggagaaaagttattttcgactagtcaccagtatacaaaagaacatcagtatgcagctatgtcttgggaaacggcttatgataatacaagagcccaaacgctttacagaaaaatgggcggaaatgtaacgaacgatgaatggattcactacgacatttcaaacaatattttataatattcttccatccataaagttttaacacgttcttaacactccttttataaatttgttttatgatgaatacgacaaataaatcagttcctgtatgtatttgtcacattctctgttaaagttttcacaaagtgttcaaactttaagtgaaaacgctttctatttttgtgtataataaaaatatgcaaatgaaaatgaatgttacagctcgttaatcatacacattttaaatatggaaggagttttgaaaatgattttaaaagcattaagaaaaaacggggccgttacaattaactattataaaaacggtttgcttcaaacgtttaaaggaaaagtacagcgcctagatttaacagaccaaacgctttcattaaaagatgaacagcaaaatactttctctattcgcttatcgggaattaaagaaatttattgatgaatagtttacagtaaaaaagaacatgatgttcattctgctttgcagaagtcatcatgttcttttgattttagctttatttagctggtgtttctgtttcttccttcccgtacatatatttcgaagggtcgactgtttggaaatccttcagcttgtggaagcgaagtaagtctccataaagcacttgatcagataactccagttctttcgctaccttctgtttataagctttcatttgattattttctttaagcgcttggcccgtcttagaatcataatacgttccatccactaatgtatacttcggagatacgtagttgccattacggaatgccactacattatcatgatttttagaaaataaatccgtaccaaattggataaattctttgctgtcaatccctactaaatgaagaagagttggcacaacgtcaatttctccaccgtacgtatgattaactccgccttttactccaggaacgtgaatgaatagaggtacacgctgcagctgagcattttcataaggcgtaatttcttttcccattactttttccattgccgcattatgattttcagaaataccgtagtgatctccataaatcataatcacagaattatcataaagcccagaagctttcaattcttggaagaaagattgcaatgattcgtctaaataacgagccgtttggaaataacggtcaactgttgcatcgcccgtgttagccggctgtatgcttgcctcattgttcccaagtaaaaatggaaaatgatttgttaacgtaattaaatgcgcatagaacggctgtggtaaagactgcagcattggaacagattctttaaagaacggtttgtcttttaagccataattaattttattttcacccgtcatattgtaataacttgcatcaaagaacttatccacaccgaactgcttgtaaatttcgttgcggttccaaaacgtcttatagtctccgtgcagcacagcgctcgtatagccagcttcttgatctaaaatagctggtgctgcctgatacgtattgcttcctttcagtacaaaggcagaaccttgaggaaggccatatagagagttgtccatcatcagctcagcatctgatgtttttccttgtcctgtttgatgaaagaagttatcaaaatacgtaaagtcatttccatgggccaacgaatttaagaaaggtgtcacttcctgaccatttaatttgtaatcaattaaaaaagactgaaatgattccaaatgaattttaataatatttttccctttagcttttccaaaataaacggaattaggctccgcataatgactgtttttaaaattaacgacgtttgttaaatcattgctgcttgcaaaagctcgctgtttagagttttgagcagtctgaacaccgtcatacatcgtataattataagcgcctaaatactttactagataattgcggtcaaaagttcgagatagaagctgcgggcgatcaatttctgctaatgttaaattgacagaaaagaccatgaatcctaaagaaagaatggttacagcattcttaaccgataccttttcattatgccagtcaatttttttactgaaaaagaagaaaagataaataataaaatcaacaaaataaaaaacatcatgtgcttttaataaattcataatgcttccgcccatacttcctgcattacttgtctgcaatagtgtaggaagcgttacaaaatcgttaaaaaaacgataatagagaacgttgctgtataacagcagcgtcataatgaaactgcctgcaagaatccaagctcctgctctctttcctttaaaaaataagccgattcctaaaaaaataagcactgaactcacagggtttatgaacagcagcatttgctgcattacgccgcttacgcctaagttaaattcagttttataggccacgtacgactttatccacattaaaacagcggctaatatgaaatagtgcagcggcttagaaacgattcgcttcattttgattttcctttctcgattattttatgagtagattcacaaagaacatatagaaaacctttatcattatactcatagaaaatgaaaattaaatgaaatcctagccttcacaactatagatagattctttaaattcatctactagtttacctaatacccataaataaataaactaaaatcaccttttttatcataaaaccccttctctcctcatatactgtattctgttgcaacacccgtactgcaaacttgtgcattttttcacaatttatctacaaactattctcatcttgctgtataataataattctgccttgagcattctccaaatttttatgcttaagccacagctttcttttcataacaggcgcacacatgaaaggagatgaataaatgattttaaaagcgttaaagaaaaacaaacatgtaaccgtgaattattacgaaaatggcctgcttcaaaccttcaaaggaaaaatccaaaatttaaacctaaccgaccaaaccctctccctacgagatgaaaaacaaaacattttttccattcgtttgtctggcattaaagaaatttattaacaaaaaagatcctgaagaattcttctaggatcttttttgtattttttatccattaattattgaagaataatccaatttatgttaaattaactttacataatgttaaatcaacttaacaaacttattaaaaagacagcgggtgatcatattgactcttattaatcacgtaaaagagcttagagctaaacatggatatacgcaaggagatttagctgaaaaagttggagccactcgccaaaccattgcagctattgaaaagggaaattacgttccttctctactacttggtttaacaatttgtgatgtctttcaattaaaaatggaagatgtttttacacttcaaaaggaggagaaaaatgttgagtaatgttattaaatcttatttgttgaatgtagtgtctctgttatgcgtaggttggtttttatatgattttttaagcctaaatattcaatttagtgaaattatgacccaccctgaacccccgtgggaaattactatgtctataggctcttttgcttctttaattgttcttttaatcgtctcatttttttactaccgcgcgcgtaaaaagacgaagaacgtgtcgcctttattatttccttttgaatttgcagaagaagatgaacgtgaaaagatgataacagcagaagcttgtaaaaaagcctttgttttcctcctgttttctattcctataggtgctatattaatagctttttatccgctgttacctaattcttttagcttctatcccattgccgttcttttgcttctttctcttgtgcagttaacggtttattacgtatcaattagtaagatttatcgctgattaaaaaagggttgttctttttagaacaacccttttttaatctaataattcactgaattccctaaaaaaataatccaacctacatctatttcactattttttcattttctctgtctatattgaattataacaattgaacgatgtatgttaccttccactgcagtttttcttcagtgttcagttgcaaaatatgaaagataaaaggagcatatcaatggcagctaataagtggacaaaatggatggttggtttatcgagcgttgctgcatttaccacttttataggactttctcaaaaatataatcaaacaaattcaacagctacagcactaaataacgatacatcagccgatcattcatctcaacctcaaacggaagatgagacggacctatttccagattcaggatccgactccaatacggacaatggaactaacggacaagatcaatggtcaaatgacagttctaatgagcaaagtgatcaatggtcagacgataattcaagcagtcaagatgatcagtggtcagacgatgattcgagtaatcagcaagaccagtggtcaaatgacgattccacaaatggccaggataacggaggcaataataatgattcttctatccaatcaagaccttcttaaggatgtgatgtaatgagctactcatttaaagcaatgaataccgaatttaatgtataccagcttgaagcacctgtcagcaaaaaagtggagagctggtgttatcgtgtagaagaaaccctaagccgctttcttccaacaagcgagctttcacagctgaattcgctgaacggaagattatttttaccgtcaaaaatgttgtatgaagctgtaaaaatagcctcttactattacaatgaaacaaacggaattttcaacccatttctgtatcattccattcaaactctaggatatgaccaaagctttgaacaactgcctaacaatcagcttcctcaagaagtagcatcttttgatgctgttaaccctattatgattcataaaggaatgagaagtattcagcttgcttctaatgtcggtctggatttaggcggaatcgcaaaaggttggagcattcagcaaatggcgaatcaattaaagaaaaaaggaacttcacttggggcaatcgatggaggcggtgatattgtaacgtgggggcctgctagcaagcactggtctattgcactctctcatccatttgatttatcaaaaaatctcatgagtattaaagtaaagagcaacagtggcattgccacaagcagtgtaggcaagcgattgtggaaagtaaacggacacactcaccatcatattattgacggcagaatcagcaagcctagttcatcagagcttctgcaagtaacggttatttcagaagacttgaccgtttctgaagtctatgcaaaatgcatgcttattctcggatgggacgctggattaagattagctaaaatgcatcacccttctttagaggtaattgcggttacaaaagaaggcaaggtgttaatcgaaaaaaatgtgaaaggtcaggtataccattatggctactctcctcgcgcaatttagtgcccactttcccgtttggaatacccttcgggcagccggcttaacctcttatttactaatgtttatatcggttgccgctggcatttctcacagcttttcattttttaaaccaaaacgaaaaaaacagcttttgctggttcaccaatcatcagggtggttcgggttattatttggcatgattcacggacttgttttatcatttgatcaatctattcatttttcactttctgacattttaattccgttcacttccgattacaaaccaattagcacaggtcttggtactatttcactctacattttattcgtactaattattacatccgattttataaaacagcttgggagaaaaacatggaaagccattcattttcttgcttttccaggctatttgctagcgctgtatcacggcattacttctggaaccgatacacagcagccgcttattcttgggatatacagcatcactggctgcatcattttaattttgctttttttacgaattcaacaccagtcagctcctaagaaccaaaaaaaagctcaggaaaactaaaaaacgcactctatcatagagtgcgtttttttcttatccgcgtcctgcttggaatgatgggtactgtgtcataccgccgtcagcaaagagcgtaatccctgttacataacttgcctctgaagaagctagccatgcagcaaccgctgcaatttcttccggctctccgatgtatcccattggaatcatgctttctacatctgcacgctgctcaggatcagcaaatttctcagcgttaatcggtgtattaatcgctcccggtccaatgttatttacacgaataccttttggagcgtattctaatgcaagtgtttcagtcatgagcttcataccgcctttacttgctgcgtaatgaacaaataacggccaaggaattttctcgtgaacactcgacatgttaataactgttcccttaatatcattttccacaaaatatttaatcgcttcacggctgcctaaaaatgctcccgttaagttcgtatcaataactttattccaatcgcttaaagacatttcatgagacgaaaccggattttccattcctgcgttattaatcataacgtctaactttccaaattctttaatagcagattgaactaaattgataacgtcagactcaactgttacatcacctttgacggcaattgcctctccgccaacttttttaatttcttctaagacgctgttagcttcgtcttctttcgaacgataattcacaactaccttggctttttctgtcgcaaaacgaatcgccattgattttcccaaacctgtagatgaacctgttatgacaactacttttccttctaaatctttatacattgttaataccctcctagttagcttttggcgagccctaacatgactcctgctatgatgatcagtataattccaataataatcccaactaactgacgcttcgttttcttctcacctaaaataatgatcccgcctaatgttgaaatgacgattcccatttgggaaagcgaaaagcttgttgctacgcctactttaggttgtgagatgaataaaaacatattaccagcggcccaaataagacctgggataatgttgcgaattgcatatttattaaatggcttatgcttaaacgtcagcaatactcctccaataaccataccaattgcttgaggtaataaagccgaccatccgtctacattaaatagacgggctactacaacataaactaaataaccaacggttgaaattaataaaataacaattccttttttgaagtttccttttccttcttcagcctctttctcttctttgctttgaagtgatgctaaaacaatccctacaataataaagataagagcgagcacaccaagaatgattgaagtttttgtagaccactcatgaaacacaattactccaaataatgaagtggaaactaactgaagcccagttgaaataggcatcgttttagaaactccaattaaatcaatacttttcagctgattactttgtccaactgcccaaaatagtcccgatacaactccaacgccaaagattaaaggcgtaagcgtagggtgtacaaaaatataaataccaatggagaaaatcaaagctcccaatgtggttccaagcgtttgactataaggtcctccgcctagtttcacattgaaaagcacaatgcttccccaaaatatggctggtaagacggctaaaaatatgtccatgtttcaaaaccttcctgtgctaaaattaaatgtcaaagtgcatattccccaatttttccgccattaatcctttttcagggacattttatgaattaatgaccgcacgaaatattctttagatagcgaaaactgtataccttaatttgttctaggagagaaaaagatatactttctaacgcaaaaaaacagctttttcaaataaaagctgttctgtatgatttaatttatttttaacatatagcgattaataggtctccccactctgccgtattcaactgataatttcagctcgttttcctgttctaaaaactctaaataccttcttgccgtaacacgcgcaattcctacgccgtccgctacttcttcagcagaaattggatgattttgttcggaaagatattgttgtattctccttaacgtaaccgcatttagcccttttggaagcaaatcggctttttcttcgaattgctgaaacagcatagaatctaattcagactgagtaatatgttctttttgacttattttaatttgaaacgaacgatactgctcaagcgcttgcttcattcgttcaaacttgaacggtttcataatataatccaccgcgccgtattgaagaactttccgtacggtttcaatatcacttgcagccgtaactgctatcacgtctgttttatagccatttgctcgaatttgctgtaaggtggttaagccatcttgactaggcatatacatatcaataatcgttaaatcaggctgatgctgtttaatgagctgtataccctctaaaccattcgaagctgcagcgataacgatgaacccttcaacttgttcaataaattggcggttcacttcttgtaccataggatcgtcttctatgagaagaaccgtccattcttttttattcatttcccactccccctataaaaagaatgtaatgataaaagtcgttccaacatctaattctgactctacttcgatctgaccgtttcctttttcaacaatttgttttactaaatgcaaaccaattcctctattttcctttgctttggttgaaaaaccttcatcaaagattctctctacttgatcctcattcatgccacacccgttatcttcaactaatatagaaagaatgccgtcattttgttccatacttatatagatcttccgttcacgacgctccatatgttgatacgaatcaaaagcgttctcaattaagttaccaataataatcacaaaatcatgatgatctaagtaaggaggaaatgagtgaagctcgctgtggcgatcgatagctaactcaattccaagttctttggcacgactgactttgctcaacagcaatcccgatatactttcatctttaatatgcttatgaagaaattgggtgagctcttcttgctgttcagacacttgaaaaacatactgaagagccttgtctttatttccaagttggataagccctgcaatcgtatgaagtttattcatgtattcatggttttgaactctaagagcgcttacaaatgatttaactcctgttaactcttcagctaattttttaacttccgttctgtcttgaaaaatagcgaccgcaccgactgtgtgattattaaccttaatcggcacacgattgcttaaaatattcaaatttcgaacttgaagctctcgattataaacaggctgattaagctgcagaatttctggaagtcttgtatctggaatcacatcatagatcttttttccaattacctcatcgggtacatccatcataattttcgctttatgattaaaaatagtaatattctgctctttatcaatggcaatgaccccttcatgcatggcattaaaggtctccgttcgttctacgaacaaacgagcaatttcatgaggttcaagctcaaacatctcttttttgatacgagatgcaagcgcccacgctccccatcctccaaaaaaaagagcaagacctgagataagaaagatttctttttttaaacttaaaatgacttctgtaaatttcggaagaagatagcctgagacaaccactcctacttgttcatgctgatcgtttacaacgggcacaaaagagcgaatgaccattccgccttctccttttgctttatcggtataggtatgttctgcaaacgcctgtccctcatcatctcctttagagatttttccaatcatgctttgcaaagggtgagacaaacgttcatgattcatattcataaccactacataataagcaccgtgaataatgcgaatcggctctacaatttgattaatgttcttactatctttttcaattttttctcgaatttcaggcatttcagcaactgttctcgaagtgattaaagccctttgctctaaatcattttcttttgactgtacaaaattattaatcaccacgatacttgctaaaaacaacgaaaaggccacgataaaaaagattaaccccgtcattttcgtttgcatggataagcgcatcatagcggaacacctactgctgattgaagtttattttaattttaccacgttgagaaattgcgtgttagaatatttgtagagaaaaattattgaatcgcggggttggacattttgaagatgtttataggggcaagtattattgttagcgttttcttgatgatctatgtttttttgcagtatacggttataaatcaggataatgtgtatcatgacgatgagcaaaaaggattaaataagcaaattgtgattaattttagccacgttgtagctgaaaatactccaaaaggcttagccgctcaaaaatttgctgaaatcgttaatcaaaaatcggatggtaaagttaaaattgaagtgtattcaaacggtgtattatattcagacgacgaagaacttgccgcccttcgccgaaatgatgtacaaatgattgcaccttccatttcaaagctaagcgacctctcccctacgtggcaactttttgatcttcccttcattttcgatgattacagcgaggcaaaacaagtgtttaccggtaaaatcggacaggatttgttgagtacgctgcaagagaaaaacattaaagggcttgctttatggagcaacggctttaaacaaatgactagcaatacgaaacctttgctccatccagcagattttcaaggtaaaacgtttcgcattatgccaagtgaagtaatcaaaaaacaattcgaacttcttggcgccaagcctcaggctgtctcgtttaataaagtatatcaatcccttgaacgacaggaatttgatggacaggaaaataccatttctaatatttattcaaaacgtttgtacgagctgcaaaaatatatgaccatcagcaaccatggatacttgggctacgctgttttaatggatgaaaagtattgggacagcctccctgaagatgtaaaacaactattaagtgatgcaatggtagaaacaactaactggatttggactcaatcaaaaatgatgaacgatgaacagctgcagcaaataaaaaataaatctggcatgcgcgtttattacttaaatgatttacaaaaagccgaatggaaaaaacagtttaactctctttatcaatcgtttgaaaacaatgcaacaaaacaaacgcttgatatcattcaacaaataaaaaatatcgaaagcaaaaagtgatgactatatgttcatcactttttttgaccaaaatgaccaaaaagaacattataaccagaaatataaatagttaaaattatcagttaatataaggataagaataatgtaagcgttaacaaaaatattctcgaaaggagcattacgtatgaaattaagttttaaaaatctaactgttcaagttgttatcggtatccttcttggtattgcaattggcttcatgtttcctgaatttggagctaaattaaaagtattggctgatatcttcattaaattaattaagatggtgattgccccaattattttcttaacagtggtcatcggtatcggaagcatgggagatttaaagaaagtgggacgaattggaggtaaagctcttttatactttgagattgtcactacttttgccttagcaattggaattatcgttgtaaactttatcaaacctggggctggctttaatatcaatggcgcaagcggagctgatgttactcaatatacgcagcaagcagctgaagcggagcatggctttatggagtttatcatgggaattattccagacagcgtatttggggcaatggcaaatggtgaattattgccaatcttattctttgccgtactatttggaatggctacagctacactcggcgaaaaagcggctcctgtcattacattctttgaacgctgtacagatattttctttggaattgttaatatgattatgaaactttcacctattgcggcgtttggagcgatggcttatacgatcggtaactttggaataggctctcttcaaaaactcggtttcttaatgggatctgtttacattactatgttcttatttattgtatttgtacttggaaccattgctaagatttatggatttaatatttttaaattcattgcttttattaaagaagaaattctacttgtattaggtacgtcttcttcggaatctgcactgccaaaaatgatggacaaaatggagaagtacggatgttcaaaatctgtggtaggacttgtcattccaactggttactcatttaacctagatggaacagccatctacttatccatggctgctatctttatcgctcaagcgtatggagtcgacctgtcgttaatgcaagagattacgctacttggcattttaatgctaacgtctaaaggagctgccggagttactggctctggatttattacactagcagctacgcttgctgcattcccgatgattccagttgaaggaatcgcgctgttaatcggggtagatcgcttcatgtcggaagctcgtgccattacaaacttaattggaaatggtgtagcaactgtagttgtatcaaaaatggaaaatgaatttcatcctcctgtagagacgatacaggacgttaattccgcacctccattagctaaataataaaaaaagaggttgagacatagcgaaatgaatccaatctaaagacgaataaatgggatacatgagctgaacaaatgaagcctacgttcaccacaacaaaaaaacgaaccactaatcaaacattttgattagtggttcgtttttcacttcatcttaaatacttttgtcccaacctcttttttaggattaatgcgtttcttttttagaacgtccgctaagtttcccaacaacaacaactaaaatagctaacaaaataggaataatcgtatgcaaatgcggattcaacccttctaataagtgtcccaccgctttgtctttaaagatcatttcaccagcagtatagccaagaagcgctgctccggcaatgatgataatcgggaatttttccataattttcattaaaagctgacttccccaaatgattaacggaatgctgataacaagaccaaggataatgagtagaatattgccgttagccgcacctgcaaccgctactacgttatctaaactcataacaagatccgctataataattgttttaatagcacctgctagagttgaattcgctttaatatctccatcctcttcaccttttaaaagactaatagcaatccatagaagaagcaggcctccgatgaaatttaaaaatggaattgttaataaatatacagcgacaaacgttagccctacacgtagtacaaccgctcctaatgtaccgaaaacaaccgctttgtttcgatgctcgtccggaagattccgacaagctaaagcaatcacgactgcgttatcgccactcagtacaatgttaatcagtaaaatttctaaaagatttaaaataaaactctgatccataaaaaaactccttgattgatttttattagtctatttctctatctcttatttcattactagaaatagagaactaaaactctatcaatataacccgttcttaccctttaatgaagagaagtagttatttcactaacagtattttatcactaaaaagaaatttgaaataggtatttgtaaaggaaaaatcagttcattacaataaatcaaaccttatcctttatctttcatctatttttcaccatcaccctctactattagtagcaggagagcatttataaaaaatagagtaatttttataaataatacaagcctccaatgcttcttcgttattttgtagtttttcgtcagctacgatataagaaaggagaaaataggtatgattttaaaagcgctaaaaacaaataaactattaactattaactatcaaaacaacggttttgttcaaacggtaaaaggttatattcaaaacttaaacttgcttgaacaaacgcttctattaaaagatgaaaatcagcatgtacgatcacttcgcctatcaagtattaaaaatatttattgataaaaaaaagatccgaacgattcatcgttcggatcttttttcaattaaataaaatatttttgtcttaccctctttttatttaactcactgtatagcgtgcaattacttctttaattgatttatatacaatttctaccattgtttttaattcttcgtctgtcattgaaagaataggcatcatcgtaatcacaggacctagctctctaataattaaacctttttggcgagccgctaaaataatgtctcccatcacttttttatcttcaaaaatagactttgtttgacggtctttcacaacttcgattcctgccattaatcctctttgtctaatgtcccccacgttaggcagttcataaagctttaatagataacgtttaaaaactttttccttttcttttacattacggattaactccctttcttctatcagttcaatatttctaagcgctactgtacaggctaattgatttcccgtatacgtatgtccatgaaagaacgttttattttcatctggatgagctaaaaaagcattaaatatcttttcgcttgttaacgtagcagcaagcggcatataccctcctgttatcccttttcctacacacataatatccggtacaacatcttcttgctcacatgcaaacagcgttcctgttcgtccaaatccaacggctacttcgtcacaaatcagcaataccccgtacgctttgcacagacgctctacttgttttaaaaaaccgggaggatgtgtaataatacccgctgctccttgcacaagcggttcaataatcaagccggctacttcttctcctttgttctgcaagagcttctctagctgatgaatacagtaagctgaagcttgctcttccgtttctaacccgtccatacggtaagtataaggagaaggtgcgggaattcgttcaaacagcaaaggcttaaagatgcgatgaaataaatccatgcctcccacactgactgccccaattgtgtctccatgatatgcctcattcaatgagataaatttacttttgtttttgtactttacagagtcgagattttgccaatattgataggcaattttcaacgcaatttcgacagcggcggagcctgtatcagagtagaagactttcgataagctgccaggagtaatttccgctagctttttggctaacaaaatggatggaacgttggccgatccaagcagcgtagaatgcgctaatttttccacttgtatatgtaaagctgtatttaattccggatcattatgtccatgcacgttcacccatagagaagcgtatccgtctaaatatttgtttccctctacatcatataaatagcttccttctcctctttcaataataagaggattcgattgacggtaagctttcatttgtgtaaacggatgccacacatattctttatcccatttctccagctcagctttttgatacggcacagtcaaacacctcctgaatatgttgcataacacttttttgcctcatcattttctcaatatatgcatctaactcttcatcgatatgtgtgaatactggaacggtcattaaagatgatatttgaagcagcttttcaatcgttcgaacattatcgttatgaatgatactgctgtgattaaaacgattaaaaatgagtccgttgattttaaggtgatgctcacttgcatatgaaaaggtagaaagcgcgtcgtgaatagctcctaaccccgttgttccaacagcaataaccggcatttgtgcatctatgatcaaatcttttgtcatatagaatgttgtttcctcctcaattaaaggtacggcaagacctcccgctccttccacgagcactacatcaaatttcttttttaattcattaatgcgttttaagacgattgaaggctctacttgcttgttgctcaatgcaatagccaaatgaggagacgtctccggctttaactgataaatacccgtatctgctactccgagtcttgtttcaaaccagtgaatatccggataacctccaatttcatcttggtagccggtttgaaatggtttgcaaattgtcgtttttattcctagacgaccaagtactttatacaaaatacttgtaaccagggtttttccaatatctgttccagttcccgtaataaaatacgctttacccattttcttttctctcctttttttctatgtcttagttaccccgctttaacccgctttgatgacaaacgactaaattgaggctgcattcggtgaatcagcactgaacataaaatgcacaataaaagatctccaggtattggcaaaacagctccaaaaagaagtgtatcactcagtgaaagaggcttttcaattatccatttcattgctccgtaaagccagaagcagccgactgcgtacacaataactaacgtagataagttagctaaaaagatagaaaaaggtttctttaagtcatatttttgaataaggtagccgttcataaatgcccctgtagcatagccaattaaatagccaaacgttggtttgaagatataccctaaacctcctccttctgcaaaaaccggagcacctattaacccaatacctatgtagcatagctgactatacaaacctaaacgcggacctaacagcgcaccggctaaataaacaggaacaatttgaagagtaaacggtatgtagggaataggaatttttataaatgcaccaatcgccgttaaagctgcaaataaggaaacatacgccattgttttcggtttcatattcaccctcctttctcttttcgctgctttaattttgcaataatttctttttatttgtcaacttaattttattttaagttgacaaataaacaataaaaaaaagacgcaaaaaactgggcttttgcgtcttttgatttttataaaattacttttttgtcgtctttaagctgcacttcttgacggctgatagataaatcaactttcttttttacacgtgcatgataataagcataaaacagcagcgctagtggaataccgacatacagcgccattcgctgttctgcatcaaatgccatgcttcccaatacgattgtatttaatactaatgcgattaaaggtaataccgggtaaagagggactttaaattttaaatcctcgatttgccctccttgatttatatatctttttctaaatgcaagcagtgatgcagcaatcgtaatccagccgatttgtgcacctaaacccgctgcagaaatgagccatacaaatactgtttcttgagcaaagaatcctgaaagtaaagataaaagcgcaatgcctaatgttaaaagcagggcattcatcggcacaccgcgtttatttactttcatgaaagctgaacttgccatgttatcttttgacaatgaatacagcatacgcgttgctgcataaagacctgagttagctacagataacagcgccgttaggataacaaagttcataatatctgctgcatatggaataccaatttggtcaaatacaacaacaaatggactctcaactacgcctgctttttcaagcggaatcatacccgctaagacagctacagctagtacaaaaaatacaagcgttctccataccgtttgtttaattgctcttggtacagtcttgtctgggttttcactttccccagccgctacaccaataagctccgtgccttggaatgaaaagttaactgtaatcatggtaatcaacacggcactaattccgtgaggaaacacgccgtgagccgtataattagagaaaagcggtgcgctgtctccattacttaatggaagaaaaccaaacatagcagctccacccagcacgataaataaaataatagctaacaccttaatgctggcaaaccaaaactccgcttcaccaaacgctttagctgacagtgcatttaatgaaaataataaaagcgcaaatatagcacaccagatccatacaggagaatcaggaaaccatctttgcataagctgacctgcggataaaaattctaatgcaaccgttacagcccagcccaaccaatataaccatccaaaagcgaaaccaacgccagggccaataaattttgttgtgtatgtctgaaacgaaccggaaactggcattgctactgcaagttcccctaagcaaagcattgttaagtacataatgaagccacctacgataaacgaaaggatagctccaatcgctcctgcttggctaattgtgtatcctgttcctaaaaagaaacctgtaccgataaccccgccgagcgaaatcataaacaaatgtctgcttttcatcgtcttttttaattcatttgtttgctgttgtccttctatcatattaacgacatttcctttcaacctatttattacgagatattacctagaaaaaaattaataaacctttgttttctatgcatatttacttacatatttatgcggtgttctcaatttaaatgaaacagccttttgtaatcttaacataatgctcactagatttaaaatgtttttctgcaaaagtaaaatgaatttttcttgaatagtgtgattttcttttactgttgatattcataaccgtttttctgcaaatgaatagatgatgcaacaagaaaaaagctgtgctttcgaagacgaaagcacagctttttttaactttttaccaaacaaacaatccaacaatcatagcacttaataacgaaacagcgataccgctcacaagcagtttccatacgttttttccaataatcgttgatttaccttctgataacgtagaattatacgttccataaatcatacccaccgtactgaagttagcaaaagatgttaagaatgttgtagcaactgcaatcgtatgcggtggaagtgtatctagatttttcttcaaatccatcatcgcgacgaattcatttgttgctagcttgatacccatcagctgagctacgtacattgcatcatgccccgttagccctagtaagaatgcgaatggactaaagatataagagaaaatcttttgtacagtcaagccgtctacgataacgcctaaaataccgttaagcgcagatgtaagagctacatatccaataaccatcgctaaaataacaataaccatgttcattccgactaacatactgtttgaaatggtagagaaaaagtcttttttctccgactttggcggtacgtaaatcatatcttcttcttttgtaacatgaactggattcaataagctcactaaaataagcgcgtttaaacagttcagtggaattgctgtaaacacgtacgtagcgggaaccatcgttaaataagcaccgataatagatccgctaatactgctcatactcataattccaaacgtaagcaaacggttgtcttttaacacagaaagttgattacgaataaccgctaatgcttccgtatttcctaaaaacatcatttgaatagcgaaaaagctttctaatttaggcaaacgagaaactttcgaaatgacccagcctactttatcaataatccacgttaaaataccaaagtaagataaaatatcaaaaaatgtcacgacaaagatgataggcagtaatgcactgaagaaaaagtcaaccgtttcatttcccattacagatgggaacgcaaaagcaattccgtcgttagcacaggaaattagccaagtaaagaacgaagcaattttattaatgatccatgttccgattgaagttcctaacataaaccaagtaatgaggacttcaacgaccaacagtgaagcaataggacgccactttatttctttctttttaggagaacataagaagacgacacccattactacaaaaacgcctaataaatttaataaaaagtacatgcaagccactcccaggtgtgtatttgaaaaccaaaaaaagctcttacttttcataaattctgacaataacagaaagtatgaaaagtaagagctttgaaagaaggctgtatctatgataatacgcccttctttttgctgcttatatccaaactttcttgtagtctagttttttacggttactaggtagagactatcagaccatattactgataatatacaagatcgtaatcttagttgtattcaattgatatgaacaaattctaccctttatttttttaataatcaacactttaaaagtttttcggaataataaaattggtatgaaaattctatttatttatcacttcttttgaactactcataggaaaatcacaaaaaaaaagtgaatttaatcgttcttttaactcaattattttcctatttttgaagaaaagaaattgattctttgatgagtatgtttaaatatctacttcgcttttcatttaattcctcaaaaaaatgtttcatttttacgacttgagacgtagaaaaaaataatcctgctgttcgttgaaattaaccgcttttcattttacactttatggtagaagaaaacaaatttaatttaggtagaaagcgggttataacgtgaaaaaaatattggcttttattttagtgataggtggtacggcagtcctcttttctactgcgtttgcaccttcctcttggtcgttaagttcattcaagacgtccaagtctgaagcggcgttatcaagtgatattcagcatattcaaattgactctccaagtattagtacaactgtcgtgccgcaagatcgtcaagatattaaaacaaaagtagaaggtaaaggaaaagtagatgtaaagcaaaatggagacaccctagtcgtcacttatcaaaaaagtccttttcaatggctttctattttttcaaacataaaagtaacaatctacattcctacagattatcaccacaaccttgcgcttacggtaggttctggggaccttcaagttgctgcacagcctgagcaagcgcttcagctgaaagatgtttcgattaaagtaggttctggaaatgcaagtatttcaaacttgaggagcacttctcttcgtacggatgtcaattctggagatttacagctgagtaatgttgaaagccaaacggctaaatttgctgtaggctctggggaaattaaaggaacaaactataaaggaaaacttcaagcgcgcattggatctggtgatctctatatggattttaaaaagctagaagaggccgtttctgtagatgtaggatctggagatgccgtgctggttcttccgaaaagcgctggttttaaagtgaatggaaaagtaagcatcggtgatataaacaatgactttaagttaagcaatgcaaccgtaacaaaaaatgtattaaaaggaaagcatggaaatggaaaatatcctattgatgtagctgtttcaagcggagaattaacgttaaaatcaaaataaaacgaacacggaagtgttcgttttatttatggtctcactgcaatataccacgctactcctacgattgatcctatgaatacgactccgtaaataatagataaattcactatacttttctttttagattttccgtaatcttcatctactttctttgcagcactgattgtacctgcaagagcagcaacgccgataataatgacaagaagcaatgctagtttcattcattctctcctccatatttcggtgattgaataagactgaataccatgatgttatttatttcattttaagcagcacgatttaatcagaatatgaaagcattatatcttctctttctatcataaagctaaattatgtaaaatcaaccatccaatcgtgcattattttcctcccccactttacatacataaaaaattcccgagcttcactgctcaggaatcttcacctaatagaaatggccttttaaggctttaaaataactttaatgcagttatcttgatgatcattaaagattttgtaggcatcagctgcgtcttctaaagcgactttatgagtaataatttcttttggatcgaattctccttttacaatttaatcatataatttcggcataatgggaatgacaggagcttgccccattttgagagttacatttcgagcaaaaaaagctcctaacagaaaactgttatagttgcttccgtataccccggtgatttggacggttccacatttacgaacggcttttgtcgcaatttgaataggtccgagcgttccaccttgaagttttaatttttgttcaatatattcaagaggcgactttttgccatccatacctacacagtcaatcaccacatcagctccgccttttgtgatttcttttaaatgctcccccatatctgggtattgtgtaaaatcaaaggtttctacggcattcattttctttgcatgctgcattcggtatggaacatgatctattgcaataacccgtttggcacctttcatccaagcaaacttttgagccattaatcccactgatccgcagccgagtacgataacggtatctccttttttaacatccgcatgctctacactccaataagcagttggaagcacatctgataaaaaaaagaagcgattcatcttctaattcgcacgattccggaatgacaaacggtgtaaaatttccaaacggtacttttaaatattcagcttgacctcctggatgatttccaaacttttcagtataaccgaaataaccgccagaatcataatgtggattagaattatcacattggctcgttaaatcatccttacagtacgcacactgtccgcacgctacgttaaacggaataataacgcgatctcctttttttacttttgtaacatccggtcctacttcttccacaattcccattggttcatgacccataatataaccgtgaggcaatggcatgcttccttgatataaatgcagatcagaaccacatatagccgttgacgttattttaatgacaatgtcatctttcttctctaacttcgtatcttctacttctgctacttttacctgattaggcccttgatacgttaccgctctcattttcaccctccacttttacaaccttcatattacttaaatttatctaaaggcatgtattctatccggagaaatcaaggaaaataaaaaagcagcgcttacgcgtctgcttaaatgattattaaaactgaaatatatgttttcctaccagtacatctgccatctttacaaagcgcttgatttctaatacgtcatgaactcgaaccatttgaacaccttgtgcaatccctgcgtatacagtagctgcagttccttccattctttccgtaggaggagcaccgactatttgtccaataaatcctttacgagaagtagcaagcagcacaggatagcccatcgttgtcagctgatctagatgctgaatcgcttctacattatgcgcagccgtttttccaaaaccaacgcctggatctaaaataatttgatcatctcgaacccctgcagcttttgcaattgatatgctttcttccaaatcacttatcatatctgtaatcagatttgtataattgggctcatggcggttatgcattaaaataataggaacattatagtcagctgcaacttgagccattttgggatcagcctttgcgccccatatatcgttaataatatgtgctcctgcttctagcgcatgcttggccacttccgacttgtatgtatctacagaaatcggcacctctacgcgcttagccacttcagaaataacgggcacaatccgtttaatctcttcttcatcgctaattcttgtataaccaggacgagttgattctcctccgatatcaatgatgtctgctccttgcttcaccatttcctcagcatgagcaactgctttatctacatcgtaatattttccgccatctgaaaatgaatccgggtttacgtttaaaatccccataataagtgtacgttccgcataattcagttcatactttccgcatttgatgacggattgagacgttaaagttgacactaccctcagccccttcgtaatttgcaaattgatgtatatttataaatatcatgtattttgagaatgtcataccgttcgtaattatatcaaaagtcaccagtcctatgtgatttttcttagagtttctttcttctatagtgtgagataaacattaaaagtgaatacacagataacattaaaaatctctatcgggcttttcttcagggtcttttttcctcttttcacatcttttgtgagtctttttattcaaaaagaaaggatttgcataaaaagcgtttaatttatagcaatagttgggaatttataattaaacagcttccattttttaaggaatttattttaaggaggatgactatgactcaacaaccgttacaagtcaaattaattccttatacaattgagtcgattatcgactcaacaaatgaaacgcctaaaggagtaagcttaattcaagcgcctgctatttgggaacaaagcaatcaaggagaaggcattgtaattgcagttatcgacactggtgttgacacaaatcatcctgacttaaaagattgtattatcggaggaagaaacttcacttcggattatgacggagattcttctgtatttgaagataataatgggcacggcactcatgtgtctggtaccattgccgctgcgctcaataatgaaggggtagtaggagtggcacccaaagcaaaaattctaagcttaaaagtacttaccggtgaaggatcgggaaattacgaatggattattgacgctattaactacgccgtcgaatggcgcggtcctaacaatgaacgagcacgagttatttccatgtcactcgggggaccacaagacgttccagaactgcacgaagctgtgcgagatgctgtgaataaagatgtttctgtcgttgttgcggctggaaacgaaggtgatgatcgcgaagaaacacttgaatattcgtacccaggaagttacaacgaagttattcaagtaggagctgtagacagcagcttaaatcttgccccttttactaatgcaaatgaggaagtggacttagtcgcaccgggagttaacattatctctacttttttagaaggtaaatatgcggctctttcaggaacttcaatggcaactccccacgtcgccggagctttagctctattaattaacttatgtgagaaagaatttggccgttctttaatcgaagccgaaatctatgctcaacttgtaagaagaacccttcctcttggatatcggaaaagctctgaaggaaacggatttctcatgctcgatttggtagagaaaatacatgatattattaacgtagcccgtatcaaccctagtaagtaataaataagaaaaacgaaaaatcttcttggttctcgttaaattgaaataaagacatgcgaacgcatgtctttattcatatcttaatgcttcgattggatctagcttcgccgctttgtttgcaggaagcatgccgaatacaataccaatcgtcatggagaataacactcctccaagtactacttgccacgaaattaatgacggccagccagcaaataacgaaacaagagctgccccgcccgcgccgaggccaattccaagcaaaccaccaattaacgtgagggtaatggattcaatcaaaaactgagttagaatttgtcttttagatgcgcccaaagctttacgaataccaatttctcttgtacgttccgttacagaaaccagcataatgttcataacgccaatcccgccaacaagcagggaaatgcctgcaatcgatccaataatcgttgtcataattcgcgttacatttccaatgctatctgctatttcttctaagttctgcacttggtaagcatcttccgcatcatgcaaattatttaacaaatccgttgcgtcattgcctactttttttagttgatcagagctttttgcttgaacactaaggtttgtgtaatcaagcttaccgaagcttgatttatacgtattattcggaatataaatggtcggtatttcaaacgctaaaaagcccgttgccttttttgtcacaccaataattttgataggctgtccttgaacccatactacttgcccaagggcttctttcttatcaaatagctcttttttcatatcgcttgttataacacctactcgattacctgataaaaagtcagagctgtctaacattcttccttttgaaacttccagctgattaacttcaatatatccttcgttaatagcattaacagtcgtattagattccttgtctctatatcttattcccattcccattgagctagaagccaccacattcttcactccgggaatagtcgaaagagctttaatatcgtcctctgtaaagatgggctcacccgtcattgaaaggtcatcagcttgcatctcgtcttcaggaggctgatagtatacatcaactgtattgcttgctcctgttatttccgacttaatcatttgttctccgccttgaccaatggctacaacgataataacagccgctacgccaatgataataccaagcatcgtcaaaatagagcgcattttatgagcaagaaccgaagagagagccatgcgaatattttctatcaaactcataagctatcgttctccttatcgctatgacttagcactttaccgtcacgaacgataactgtacgcgatgtgtattctgctacttcaggttcatgggtaatgactacaaccgttgtgccatctgcattaagctgagaaaattgttccataatatcagcacttgtttttgtatctagagctcctgttggttcatctgctaaaataagcgtcggattgttaacaatagaacgagcaatagcaacgcgctgcttttgccctcctgatagctcgctcggtaaatgtttcatccgctcactcaaccctactttttcaagcgcagcttctgctctggctcgtctttccttacgcgttacgccggcgtataccattggaagctctacgttttctaccgctgttaaacgcggcaacagctgaaattgctgaaaaacaaaaccgatatgaatatttcttacttttgcaagctgctcatcactataagtggagatttcttgttcatttaataaataggatcctgaagacgcacggtctaaacatccgataatgttcattagcgttgatttaccagagccagaaggtcccataatcgcaacaaattcaccgtcataaatcttcaaattaatatcttttaaaattggcacttcctctttgccaagatgataacttttatgaatattcacaagctcaatcattgaacagtcacttccgcaccgtcagttaagttctttgtaggatttgtaatgactttgtctttagaagatacgccgctattgatttcaataaatttatttgttgtttctccaatctttacttccttacgaaccgcctttttatctttcaccacatatacatatttttctccgtcttcatttacaactgcttttatcggcaaagatgaagcttttttactgcttgtttcaatttcaagcagcagcttaaatcccggcttaatcatcgtgatatcctggtcatctacttttacttcaattggatattgattagccccatcattgcccgcttctgctgatgcctgctgctgaggtagatagtcaatttgtttaacgctccctgcccattctttatcaggcagcacatctgacgtgattttaacaggttgaccggttttaatttttaatgcatcatactcagacagcacaccagtagctaagtattcatcggtattaccaatatgtataagtggtttttgaacgtcacttgtgttattaaccgcttctttatctacttctagcacagtcccattaatatcactcgctacatctaaattacgttcttttttagcaattgatttggcttctagtttgtttcgttctaaatcaattttagccgtttctaaatcgagattgagctgcgtacgctccgtgtcgatttgatctctcgcttcttgcttactcatttctttttccaattctttttgttttttatttaaattagaaagctgtttgcttactgagtcaatttggagctgactggattttttttctaacttgttttgttcttgctctaaatcaagcgcatcgctttcgtacgttacaagagaggttccctgctgtacacgagatccttctgttacatgaaaacgttcaacctcgcctttttcagcatcaaaatagacatattgctcatcagcaagctttaacgtacccggaaccataactgtatttcttaactttttttcctttatatttgctacttgaacattgactgctttcccacttacactttgtgcacgatatacgttaatcccaataaccgcaacaataacaactgctacagctgtaataattattccttttttcatttacaaccctgctcctttaagcgcttctgaagcagctcctccaactcctgaaatagccgctcctaagatgaataaaataatcactgtaataatagaagcagcttttgatacatttgccactttttgcagtcctactgctgtcagaatgagtccccaaatagaaaagatttcaatggaagtaaatactcctcccatagcacctttagcaccaaccattccatttaacgaagtgacattagctgaagtatgtgctagtgcagctactcccgtattaattagctgaccgattgctgtgatgaacgtaacaaacaaattcaaactaaacatttggcggtaagttgtttttccagtccctaactttgcaattaaaaacagaatcaaacttgtgaatgctagtgtagcaactactgcaataactcctccaatcgctcctccaatcatactaaatgttgaattcacttcaatgccagcttctttttgctgttgcagcgcttcttttgcctgaggggtatagacggctagaatcgttgttgcagctgttaagatgaggataagtaaaagaggtccccaaatgaccgggctgcttttcattttctcaaactgtacaaccggactcgtaataaaaccaaaaatagaaggctttcctttctcttggacttccgaagatacattgacttctgtgctcataatcaaactccttttattttgtttcgttattagctcttaagacccgtcttttactattttttaaagtcttctagcaaaatcggctctctctaagaaactctcaaacacctaatattctaacataattatacaaattaatttacatttttcttacattttatattttttatggtatttttagaaattaaagagatgtcttaatgctgaatgacagtattaattttatttatattttctaaatattctaattatcatttgacatcattcaatagaattcgtatattatgattaaagtttattattcctatgttttttataagttttatatttaaggaggagtttcaatgtctgctaagaaaccatttcgtcctgaaacacaagccatccattctggtcaacagcttgacccggctactttttcgcgtgcggtacctatttatcaaacaagctcatttggatttaaagatacggagcatgctgcgtctttgtttaatttaagtgaacaaggctatatctacactcgaattgtaaaccctactacggacgtttttgaacagcgaattgctgagttagaaggcggagtaggtgctctaggagtagcttcgggtcagtcagctactactttttccattttgaatatcgcttccgcaggagatgaaattgtatcagcaagcagtttatatgggggaacatataacctcttttcgtctacgcttcctaaactgggcattaccgttaaatttgtaaatgccgataatccagaaaattttagaagtgcaatcacttccaaaacaaaggcaatttatgctgaatccgttggaaacccgcagggaaatgtgctagacatcgaggcagttgcagacattgcccatgagcatggaattcctcttattattgataatacggttccaagcccttaccttcttcgtcccatcgatttcggagcagatgttgtcgttcattctgctactaagtttcttggagggcatggaacagcaattgggggcgttatcgtagacagtggaaaatttgattgggaagcgagcgggaaatttccagacttaacaactccagatccaagttatcatggcctcgtatacacagaagctgccggtgaagctgcttatattacaaaagcgcgcgttcagcttttacgagatattggagctgctttatcaccttttaattcctttttactccttcaaggggtagaaacactccatctgcgattagagcgtcagagcgaaaacgcattaaaggtggcaaaatttttagagcagcatgaattagtagaatgggtgcattatgcggggcttccttctcacccttcctattcattggcacaaaaatacttgcctaaagggcaaggagcaattttaacctttggtgtaaggggcggaaaaaacgctgcggctaagttaattgattcggttcagttattttctcatttagccaatatcggcgactctaaatcactcattattcacccggcgagcaccactcatcaacagctatctgaagacgaacaaaaagcttcaggtgtgacgccagaactcattcgtctatcggttggaacagaagcaatcgaggaccttcttgaagatttagattatgccttaaaagccagccaaaaagtgaatacaactgtttaaaagctgtgatttttcacagctttttttatatcacccaatacctttttatactttcgcttatgctacaataaacaaaaagaatgaaaaaggagttactatgaacacgttcaattcaatacctgctatcacatttacagacgttcataaaacatttaaggataaagaacatagtgttctaaaaggcatatcgggtacagtgatgcaaggctcgctcgtcatgatggtaggaccatcaggatccggaaaaagcacccttctttccatgtgcaatttactttctgcacctgatgaaggaagtattgaagtatatggaaaagacattagcaaatggaatatttctgatttacgaaaaaaagtgggcattgcttttcaatcagcccctgttattgatggaacagtgcgagataatatgatgcttgttcaaaaactgcatggcaaacaggatattatgcctgaagaactctgcgcattaaccggtctttcccctgacttgttagagcaggatgcaagagatttatccggtggtcaaagacaaaggttatcattagcccgcacgctgtcgaacggatctgaccttttacttttagacgaaatcacttccgctttggatgccacttctgctcatgaaattgaacagcttatttctcatttacataaagagcagaagaaaacgattatttgggttacccataatttagatcaagccaaacgtttaggagaggaagtctggcttttaatgaacggagtgattgtagaaaaagcgaagaccgagactttttttaatgctcctgtaaaagatgaaacaaaacaatttattgaaggagcctttctatgagttcactttcactgatttttaccattgtttttgtttttattgctctttttttatcaaaatcgtttcgtataggactcgaaaaagatattatcattgccagtattcgagcagccgttcagctgttggtgataggatatgttttatcttttatttttgacgcgaatcatcctacttttatgattctcattttattccttatgctgacggtcgcttcccaaaatgttgtaaagaaaaaaaagcagggatttaaagctttctttcgtgtatttgtcactctttttattgtagaaaccctgacccaaagtgttatgctcggcctacatattatccctgctactccgcgatatatcattcctgtcagcggtatgattattggaaattcgatgattttggccaatttatttttaaatcggttagatgctgaagtaaatagaagacgagacgaaattcaattgattctggcgcttggcggcactcctaaacaagctattcatagtattttaaatgccgcaatcaaagctagcatgattcctactgtagaaagtcaaaaaacaattggactcgttcagcttccgggtatgatgacaggccagattattggaggggcagatccgatacaagctgtcaaattccagttgcttatcgtttttactattctagcttctgctacgctttcctgcgtcattttaagccgattaacataccctaccctttttaatagctatcagcagcttatccgtgagcatacataaaaaaagaagaaaggagtctcctttcttctttttttattgagcagctttttttaatcttgatcctatgtcacttccaaaggttactcctaaatcgccgagccatcttctataagcaatactcagtcggtccgggttcaaatgaagctctgcttgtaagtcaagcggcagctcttctggtttttgactttccacaatactggtatcttgttcaataataagctgctgaaaatcgcgaaaatattgatcaggtgcatcaaacgaatagtttctagaaaccagcgcaaacacggtggactttctttcctcttcaggtaaaaccgcaaacagcattgaaaagatttcacccgtttcgtagttcacttttttcaaccttgcaacggtaggacgaagaatttcaaaggtataataaatagtcgcaaagttacccgtaccatctgcatctgcgtacacagcgatttcatcagaaacgtatcggttatctttccaatgcaccttataatcaggaatttcggcgtagtcagagtgtccaaggcttccttcgtgaacaaaagccaaatggcttacatctagaaagttttctacgacacgaggagctgctgcctgtagaatatgagggttggcgcaaaccgttttgaatccggagttaagatgttcgtcatacaggggaagaggagtatcgcctgcctcgctgttcatcttcacccatataatcccgtacttttcaacgcagtcatacacctgtgcttttgcttttgaaggaatagctcttcccggcggctgttgaggaatttttacacaagccccggcatcatcgtatttccatccgtgataagggcatacaatgcaaccatctaccacttttccaagagataacgctgcaccgcgatggatgcacaaatctttaaatgctttaatggcattagatgtgcgaaaaagcacaactcgctcttctaaaatcgttacttgcaagggctgatccgttaaatcatgtgaataagctgcaggcagccattccttagccagtactaaatctttaatcatctgcatcgcctccgtacgataagtaaatttatttcttgtttataaaaaaaccgcagaaatagaaggggtgcttctatttccgcagctttttcgttccgtaaaacagactataagcgcgcgaagattctacatgattgcagatagagcgaccttagcatttcatctacaatgacaatacgtattcatcgctatttttttaatcttaaaacctaacccttatatattgaataaagagcggccagccgctaaaagcttttctatccactgatttctcttatttttactttatcaatttcccactgaaaaatcccttgctttgtaagcatctctaacataattttttcagttaaacgaataaaagctgcggttttaaaaaccacagcttgctttattatgagctcatataactggccgtatattttttcgtctgtttttgtatttcttgatttaaatgtttgaaaaatgagagcgtttcttcataatcggtcgctttttcatgaaacttcaatgtaagattttcttcaaacaacgtttctcctagatgaccgaccgctttcagctgaacatctgtaacaataccttgcgaaatcgaacataataaataattaaagcaatgaaccggaacgatatgcatcagatgaaaatcgtcgatagttctatcactttttgttttcttaaattccacagtgagttcttctggatgaataaacacatttatatgctgtttggacaaacaagtaggagtcattttttgtgtatactcacaaaattccagtccaataaatatagaattctcggagtcagcttcaatgaagatttgcgaattttttaccattatcctcgtcctccatattcaatctagttaccccaccactcgcattcgtttgtagaatattaccattttctctctattttatcattgatttttctcagtgcctatttaacaggcggaagttctctttaaaagagagggaactgacaggcagttctttatgtgagaaaaataaacaaaagacacctcttttgttttcttgaggtgtcttttggtatcatcagcctgtgttacgcaaccctgctgcaatgccgttaatcgttaataacgcttcttttaaaagttcttcatttaacgtttcagcctcatcttcacgcagcttggaaatgaccttaacttgtaagaaggttagagggtccacatacggatttcgtaatttaatagattctttaatcgtaggaagatgatccattaattctttttgacccgtgattcgaagaatcatttctttcgtaacattatactcttttttaatagcggtaaaaattcgctctgaaataaccgggtcttgtaccatctccgtatattcttttgctgccattaaatctgcttttgttaaggccatttgcagattatcgacggtcgagcggaagaatggccattccttatacatttgctgaagaagctgtatatctccggatttctctactaaatgctgtaagcctgtacctgcagcgtaccaggctggaagcagctgtctgctttgcgtccatgcaaatacccacggaattgctcgcaagtcttcaaagcgatcacttccttttcgactcattggacgtgacccaatatttaaagcccccagctcaggaagaggtgtagcttgtttaaagtacgttaaaaagtctggatctttgaaaacaagctcttgatacttacgtaaagaagcagttgaaatctcgtccattgtttcttcccattcatgtgtacgaatatcacattgttcagcttcttgagaaacatttgctgccgctgtaagaagagctgagaccgcttgttcaaggcttcggtaagcaatgtcatataaagagtatctagaagaaagaacttctccttgctctgtaattttgacgccatctcctagcgtctcaacaggctgagataaaatgcttcggtttaacggcccacctcctcggcctagtgagccgcctcggccatggaaaaacttcagacgaacttgatacttcctcgccatatcgtgaatttcctgctgcgctttatagagcttccaattagcagtaagcgttcctccgtctttacttccatctgagtagccaagcataatttcctgcaaatcctgctgtttccttaggtgctctcgataaaaatctagttgaaatagctgttccatgattttaggacctgctgtgagatcatcaatcgtttcaagcagcggagctatatttaacttactttcaatgcggccatctgcatgaaggcggtaaatacccgcttctttggcgagtaccatgacttctaacaaatcacttgcagactgcgtcatactgattaagtagacttcaatagatctttcgccaaattctttatgtgctcgatgtatcatattaaatacttcaattacttgctgcgtttctttagagtaattctctacaaatgatatcacaggtcttgggtcttgaagaaccttccctagcagctcaacttttttctcttctgttaacgctgaataatcttcagctaaagaaacagcatggaaaatttctttgattgccgcttcatgttccccgctgtgattacggatatcaagcgttgctaaatgaaaaccaaacagctcaacttggcgaattaatttacataagctttttaactgataatcctgaggctggtgcttttgcaagctatctttgattagaaataaatcatgtagaagttcttccgacctttgatagcctgcttccgattctccaactaaatttaatttatgaagcataatcgtaagcttgcagcgatatacttcgtgtttgattctccatcgctttttctcaggcagcaacgatatttcttgattaatagaatcaagaagattatctgaaactgcgactctttttgtagactgacttaacctttgtctcaattgagtaagcgactctttatatttacgaatagctaacttcctttgtttgacaagcgtttgccacgttactttaggagttacgtttggatttccatctcggtctccgccaatccatgaaccaaatcgaagaatattaggcaccttccaattttcttcagggtaattctcctgcaatgaattttctaactcctgatgaagttgaggaagcacttcaaataacgtttcatcaaaataatataatccattggatacttcatccatcacggtcggcttgcgatctcgcagttcatttgtttgccataaaattaatacttcgctaaacagtctttcttcaatttccgtacgttcacgttttgttaacgttggattatccaagtttttcagaagctcagccattcgtttatgaatatcaaggacacttcgtctagtggcttctgttggatgagcagtgatgatgagctctagagatagagtttgaagcaagttagcaattacgtctggcgccacgccattatttttaagcgaaacaacggcactttccaatgagcccggctgcataatagaatcttcttgctgctgatattcgcgtctgcgacgaattcgatgattttgctctgcaatattaactaaatgaaaataaactgcaaacgcccgaataacctgctcgcgcatcggctgttcaagagtaacgatttcattttttatttctttatagataacttcatctttgttttctctaagtgattttgctacttcgcgtattttttctactttgctaagcagttcttctccaccttggtgaaccagaacttttcctaacaattgaccgagaaactttacatcacggcgcagggcagtgctgctgttttgtctttctgctgcttctactgttaccattagacacgacacctttcttcataaatgttgtactttttaaactttttagaaaattatattaaatccatattaccatgaacgaaaataaatttcatataattttatttcctcctctcgttcaggagaggagattaatcaaatataaaaaagaggttaagacataactaaatgaatccaatctaaagacgaacaaatgggatacataagctgaaccgcttgtgacaccgcagttgatttctgtgcaagactttgctttccgcaggtggctgctgagcctcctcgtcgcttccgcttttcccccgggagtcttcgtcttgccctccaatcaactgctagaaagaacgaaacagacgaaacctacgtttgccataacaaaaaaaacgaaccactaatcaaacattttgatcactggttcgtttttcatttgagctaaaatacttttgtctcggcctctcttttatgctaccatggttgtcctaaatccaataccgaggctagttcattgctttttttacgcacttgtttacgcgtggcagcgcgatctgcccccgtttgaaacaggtatttttcttcttctgtttctggaataagctccggtactgcacggggctttccatcatcatccattgccacaaaagttaaaaatgatgtggctgcaatttgacgctccccggtttttaaattttctttaatcactttcacaaacacttccatagatgaacgacctgtccatgatacgtatgactccaaacatacagaatcctgaggcttaatagggtgcagaaaatgaatagagtctgctgaagccgtcacacactctgtacgactgtgacgataagctgaaatggacgcaatcatatcaatatcactcattaactttccgccaaataacgtattgtgattattaatatcattaggaaaaatgcggctcgttcgaacggcctttgtatctttacaataatttgctttcattagtaagaacctccattgatgcctatcataataagaataaaagaatgaatgaacctatactagcatattttgataaatttagctttacaaaaaactcgttgatttatttacaatatctttgaatttagaagccgcaaactcttcagagtgttctgtatcgtaatctttcgtttcatctgtatacgctcgcttaagctgcgatacgtacgaatataagtctgataaattaagagtagtgtactccatttctactacggctttattatttgcattcgcaatcacatttgttttcacacttgctttttcttttaaaacatctttatacatgttaaaaaaatctttttttgctttgtcggttaaactgttagaaaacgcaccttttaattcctcattaaacgcttttttctgttcttctatgacagctgttttgtctgctgttacatatttatcataagtctacgttttctttgtttaagtaaaggacttctgtataagcttgcagagctttttctgggtcttgcagcttattatagcttttcgcgtattttttcgtatccagtgttaatgtcacttcgtcaatttcttcatcataatcagatgattttggctgaagcccaattttgtactttttatcttttttgacttcaaagacaaacgttaaatttctttgctttccagcgccaatcttgtcagatgcactgctttctagtctagtccaagctcacgactgttcactcccgtttttggatacatttttcactttcaaatcaacttttaacagccctttttcttcacttgtagctccttcatcactatctattaaaatataagatgcgctgtcaatggatgcttcaatcgccttatttttagccgaagtggatcctcccgtttccttagaactgctgcaagccgctaatactagcataagtacaaaagccaaagccaaaacattcatttttttcacagctgcctaatctcctttattttgtttttttagaactttatccaaaataaaggttcccgctgtataaatacttaataaaatctatattttttacaatattttgataaaaactaagtctaaattctccgttcatctaaataaaaaaacacgagcacgggctcgtgtttttttatttagatttaaaattttcttgattgatttgttcagcttctttcatatatcggttagatttgccacttttaattccccagtaataaaaagctaatgatacgcaagcaatcactagcatatcccatccgaaaggcaaaatatttttgcctccgaatttttcgcttcctatgtaggaaataaaaatcatgcacgctaaatagataagcatccaagccccggttaaaaactcttttttaaagcccacccatttatttttcgcttggtaataaaaataaacaggcaagccaattgccataataaagatcacttcacctgtaagtggccaccttgcccagtaaagcgtcaaggaagcaaaaacgaagccgcatggtgcaataactgatgccccttttaaataaaatggacggtaaaagtgtgaagccgtttttcttaatgttataagtgctacaggacccataatataagagataagcgtcgctactgagatcacttctgctaagacaccccatcctctaaataaaaagagaaacaagaagcaagctgctaaatttagccacatggctgggcgcgggacattgtaaagtggatgaagagtaccaaatatctttggcaagtatccgttttgctgcatcccgtataacattctagaagtagttgccgtatatgtagcacctgtgccggaaggagaaacaaatgcgtctgcgtataacacaattgttagccagttaattccaagcgcaatcgctaaatcagcaaaaggagaattaaaattcaaatgattccatccatcagcaattgatgacggacttactgctccgataaagacaatttgcaatataatgtatacaattcctgcaataaaaattgaaccaattacagctatcggaatcgatttattaggtgattttgcttctcctgccatatttacaggactttgaaacccattaaatgcaaacacaatacctgatgttgccactgccgttaaaacactggcccatccgtaaggtgctaccccatgctcacttgaaaagtttccactatgaaaaccagcaaaaaataaagctcctgccgttaaaccaggaattattaatttaataatcgtaataaatgagtttgctttagcaaagagatttaccgtccaatagttcacaaaaaagtaaacgaataataacaaagacgcaaccgccaaccccttggacgttaaaatgccattgtctactaattcatgagtccagcgagcccatttccacggccaagtactcatatattgcacagatgcaatagcctccactgttatcgttgaagcgattgaaatccagttagcccaagcagccaaaaaaccaataaatgatccgtgtgaatactgaggatatttgaccatcccccctgcttgtggaaacatcgcgcccagttcagcatatgatagagcaatggtcaaaataaccaccattccaataacccatgaaaaaatagccgcgggtcccgcaatttgagctgctttccatgctccaaacagccatcccgaaccgataatcgaacctatgcctgtcatggtcaaagcaaatgttcccatcttcctttgcatattgctcatccaaatctactcctcttccctaggaaaataaaaaaaacacttgcgaaattttctcaagtgtttgcccaggcgcgcggcttatacgctatatgctcccccatggtcatccatgttgcgccagtcacatataggaatatattttttatcagtatataacattcattactattactcaatacacaaaaatgtttacattacttttctaaaaataataaattattcgtaaaattccgaatt

SEQ ID NO: 11 - DNA, 140646 bp, Priestia aryabhattai
  source 1..140646: mol_type = genomic DNA
tgtttgaaagaaggctaaaaagtatatttcaaaagtatgtttacttaaaaagttaagcaggttgattagtagcatcattcatttagctaaatttcgaaaggagctgctaaaaatgagtattcaaaaaagtacagatagttctagtttagcggaagtgattgaccgaattctcgacaaagggattgtcatcgatgcttttgctcgagtatcactcgtaggaattgaaattttaacgattgaagcaagagtcgttattgcaagcgtcgatacgtggcttcgctatgcggaagccgtcgggttattaaccgacaaagtagaggaagaagggctgcctggccgaacagaggagcgaggagcagggcttagcttttaagtcttttaatcattaaaaaatccattaaataaataataataagagaaaagaggatgggacatgacaacaactgatcaaaatgaaaaacaacaaaatcagcagcaagaagaaaaaacgcaaaactctttaaatcttgccattttaggaggcgtagtaggagcgggaattggacttctttcgagtccgcaaacgagtaaaaaagtactcagccgcttaggacaatcagaaattgtacgtgccacaggacaagagttaagaagaaacgcacaggatattctaacgcagcaagcgatgggagcgttaagacagacggctacaggctatcttgaaaaagacaatttaagcaagctgctggcacctaaaaagaaaaaagaagatgcatcaaatgaacagggagattcgcaggaagaagtcagccaaagcgcagaaatggaaacgtctcagtacgaagagctaaaagaagaaaataaaaatatgaacgaccagctgcagcgcattgaagagatgctaaacaaacttatggacgcgaagaagtaagatatccgtcctgaaggggaatttcatggataaaaaagatgtggagaaagcagccttaaaagcaggaaaaaagatcatcgatcatacgcctgaacctgttaagaaaaaggttaaagaaaaagcgaaagaaaaatttgtcgaaaaaactgaagggaaactgcaggaaaaagcaaatgaagcgtcagaaaaactgcaggaaacaaaagaaaaaaatgcccaaaaggtacacggcaaaggggaagaagcaaaagaaaagctccaagacgtcttattatcagtaaaagataagcttagtgatgtgaaagaagctggagaaaactttcaagaaagagtttcttcttcagacgataaagagaagtcaaaaaataagcggaaaataaaaggcgtaaatcagattaaaaaagcaacggatattaaaagctctactaagattaaaagttccactgatattaaatcatctacagatttaaaaacaatgggatcataagcgaaaggagaaatgagatatgtctattcaaaaaagtactaatagttcaagtttagcagaagtcattgaccgtattttagataaaggaattgttattgatgcttttgcaagagtttctgttgtaggaattgaaattttaacgattgaagcgcgagtggttattgccagtgttgatacatggttacgctatgcagaagcagtagggcttcttcgtgacgatgtagaagaaaacggtcttcctgaacgttcaaattcaagtgaaggacagccgcgttttagtatttaatatgaagtgatatggaaccttccttttttgagggtggttccagattttagacttttagatctaactattggaggctactaaaaatggaaattaaaaaaattatgcaagccgtgaacgactttttcggtgaacacgtagctcctcctcataaaattacctcggtggaagctactgaagatgaaggctggagagttattgttgaagtcattgaagaacgagaatacatgaaaaaatacgcaaaagatgaaatgctcggaacatacgagtgctttttaaataaagaaaaagaagtcatttcattcaaacgactcgacgtcagatatagaagcgccattggcattgaagcataaaagataagatggcaggaggaacgtaaaaatgaccgtcttaacagacaaaaggaaaaaaggcagtggagcttttatacaagatgacgagacaaaagaagttctttcaagagcgctgagctatttaaaatccggctattccattcattttacaggtcctgccggaggaggcaaaacctctttagcacgagcgcttgctaaaaaaagaaagcgtcctgtaatgctgatgcacgggaatcacgagctcaacaacaaagatttaattggcgattttacgggatacacgagcaaaaaagtaatcgaccagtatgttcgttctgtctataaaaaagatgaacaagtgagtgaaaactggcaggatggccgattgcttgaagctgtaaaaaatggctatacgctgatttacgacgaatttactcgttctaagcctgcgacgaataatatctttctatcgatattagaagaaggcgtgctgccgctgtatggagtaaaaatgaccgatccttttgtgcgcgtgcatcccgatttccgcgtcatcttcacaagcaatccagctgagtatgccggcgtatatgatacgcaagatgcgcttcttgacaggttaattaccatgtttattgactacaaagacatcgacagagagacagcaattttaacggaaaaaacggacgtggaagaagacgaagcgcgcacaattgtaacgctcgtagcaaacgtgcgacaccgctctggagacgaaaacagcagcggacttagcctgcgggcttcgcttatgatcgctacccttgccacgcagcaagacattgctatcgatggaaatgacgaagattttcaaacgttatgtatcgatattttacatcatccgcttaccaaatgtttggatgaagaaaatgcaaaaagtaaagccgaaaaaatcattttagaagaatgtaagaatatagacacggaagaaaagtaaaggagcttgaaaacatgagtgaaacacacgaaacaggtatttatatttttagcgccattcaaacggataaagacgaagaatttggcgccgtggaagtagaaggaacaaaagctgaaacatttttgattcgctacaaagacgcggccatggtagcagctgaagtaccgatgaaaatttatcatcctaatcgccaaaatttattaatgcatcaaaacgcagtagcagcgattatggacaagaacgatacggttattccaatcagctttgggaatgtattcaaatccaaagaagacgtaaaagttcttttggaaaacctttatccgcagtttgaaaagctgtttccagcgatcaaaggaaaaattgaagtcggtttaaaagtaatcgggaaaaaagaatggcttgagaaaaaagtgaacgaaaatcctgaacttgaaaaagtatcagcatctgtaaaaggaaaatcagaagcagccggctattatgagcgtattcagcttgggggaatggctcaaaagatgtttacttctctgcaaaaagaagtcaagacagatgtgttttctccgctcgaagaagcagcggaagcagcaaaagcaaatgagccaacgggcgaaacaatgcttttaaacgcgtctttcttaattaaccgagaagatgaagcgaagtttgatgaaaaagtggatgaagcgcatgaaaactggaaagacaaagccgattttcattacagcggcccttggcctgcttataattttgtaaacattcgcctaaaagtagaagagaaataacgtgcttcacaaattagtaaccgcacctattaatcttgtagtgaaaatcggcgaaaaagtacaggaagaagctgataaacagctatatgaccttccgacgattcagcaaaaacttattcagcttcaaatgatgtttgagcttggtgaaattccagaagaagcgtttcaagaaaaagaagatgagctgttaatgaggtacgaaatcgcgaaacgcagagaaattgaacaatgggaagagctaacacaaaaaagaaatgaggaatcctagatgggagaattactgtatttatacggtttaattccaacaaaagaagcagcatccatagagccgtttccatcttataaagggtttgacggagaacattcactgtacccaataacgattgatcaggtgacggctgtagtttctaagctagatgctgacacctattcacaagaagtgattaaagaaaaaatggagcaggatatgagctggctgcaggaaaaagcttttcatcatcacgagacggtagccgctttgtacgaagaatttacgatcattccattaaaattttgcaccctttataaaagtgaagaaagtctgcaagcagctattgagattaacaaagaaaagatagagaattcactgaagctgcttcgaggaaatgaagagtggaacgtgaagatttactgtgatgatacggagcttaaaaaagggatcagcaaaacaaatgaaagcgtgaaagcgaaaaaagaagaaattagtcacttatcaccaggaagacagttttttgaaaagaaaaaaatagatcagctgattgaaaaagaattagaacttcacaaaaacaaagtatgtgaagagatacatgacaagcttaaagaattatcgctttatgactctgttaaaaagaattggagcaaggacgtaacgggcgcagctgaacagatggcgtggaacagcgtgtttcttctcccgtctctgcagatcactaagttcgtaaacgaaatagaagagcttcagcaaaagcttgaaaataaaggctggaaatttgaagtgacgggaccatggccgccctatcatttctcgagctttgcgtaaagtgaggaattaacattatgtctcttaaacaatccatggagaataaagatattgctcttattgatattttagatgtgattttagataaaggagtcgccattaaaggagacttaatcatttccatagccggcgtcgatttagtgtatttggatttgcgggtgcttatttcttcggttgaaacgctggtgcaagcaaaagaaggaaatcgcaaaccaatcacttctgaacaatttgataaacaaaaggaggaattaatggatgcaaccggtcagccaagcaaatggacgaatccacttggatcctgatcaagctgaacatggcttagcgcagcttgtgatgacagttattgagctattgaggcaaatcgttgaacgtcatgccatgaggcgggtggagggtggaacgttgacggatgaacaaattgaaaacttaggaattgccctaatgaacttagaagaaaaaatggacgagttgaaagaggtgttcggtctggatgcagaagatttaaatattgatcttggaccgctaggcagcctgctttaagcggtcagtaggaggaacagtatggcagtcgaacataatatgcagtcaagtacgattgtagatgtgctcgaaaagattttggataaaggagttgttatagcgggggacatcaccgtaggaattgcagatgtcgagctattaacgataaagatccgcttgattgtggcttcggttgataaggcaaaagaaatcggcatggactggtgggaaaatgatccgtatctcagttcaaaaggagccaataacaaagcgctcgaagaagaaaataaaatgctgcatgagcggttaaaaacgcttgaagaaaaaatagaaacgaaacgttaaaaactgtacgctacttaaaaaacggagggatttacaatggcaactgaaacaaaattagataacacacaggcagaaaacaaggaaaataaaaatacggaaaacggttcaaaagaaaagaacggttcaaaagcaagcaaaacaacaagcagcgggccaatcaaacgagcggtagcaggaggtatcatcggtgcaacgattggatatgtatctactcctgaaaatcgaaaaagtcttcttgaccgcattgatacagacgaattaaaaagcaaagcatcggatttaggaacaaaggtaaaagaaaaatcaaaaagcagtgtgggcagcctgaaaacatctgcgggaagcttgtttaaaaaagataaagataaatcaaaagatgatgaagaaaacgtaaattcttctagtagcgaaacagaagacgataacgttcaagagtacgacgagttaaaagaagaaaatcaaactcttcaagatcgcttatcacagcttgaagaaaaaatgaacatgcttgttgagcttagcctcaataaaaatcaagacgaagaagcggaagatacagataccgacgaagaagagagcgatgagaacgaagaaaacgagcaggatgatgaaaacgaagaagaaacatctaagcctcgtaaaaagaataaaaaagaagctgagcaagaagaggaagaagaaagtgaaagtgacgaagacagcgaggaagaagaggaagattctcgctcaaacaaaaaaaataaaaaagtaaaaacagaagaagaaaacgaagatgaaagcgaagaagaaaaaaaggaagcgaaaccaaaaaagtcagcagctaaaaaatcaaaaaatacaaaagcaaagaaaaacacggatgaagaagatgatgacacaacatctctttctagtgaagacgatacaacagcctaaggcgtaaaggaggaaagaaagacatgagtacaggcccttctttttcaactaaagacaatacgcttgaatactttgtgaaagcttctaataaacacggcttttcacttgatatttcattaaatgtaaacggcgctgtgatttccggtaccatgatttcagcaaaagaatactttgattacttaagcgaaacgtttgaagaaggcagtgaagtggctcaggcgctaagcgaacaattctctttagcaagcgaagcgagcgaatcaaacggagaagcagaagcccattttattcacttgaaaaatacaaagatttactgtggagacagtaaatctactccttctaaaggcaagatcttttggagagggaaaatagcagaagtagacgggtttttcttaggaaagatttctgatgcaaagtcaacgagtaaaaagagttcataaaaaacggcggggtgattgccccgccgttttttagtgatgtgatgagatgtgcagattcttttttcgatacatgagcggagtcatcttcatttcttttcgaaactgattaataaaatagcttgtactattaaatcctacttgataggccacgtccgtcacatttgcttctgcttgctgcagcataactaagctttgctgaattcgatagtttaatacataggtcaaaggcgatttttttaacattttcttaaaatatcgacagcattcagaacggctcaattgtccggctttggcaatatcatcgagcgtaatcttttcagcaaagtgcaaatgaatccaattaagcatttgcttcatccgctgatttttgatcatttctttttcattgtatttcagctgcaaaccgttaagaattaaatttttccaaagtatgctgagttcagaggcaatctctatttcatagtggtgcggctgcttatgaatccatgtgtgtatcttatgtatagactctaacacgttatttccccaggtttgcattggactgatgaataaatgtgatagattcgttgcatgaatgtagggataaacgtaatttgtgaaaagttcttgcggcacaagaaaatgaggagaaacatttaaacaaatgtacacgcagccggatttgtttatatcttcagtcatatgaagacatccgctgttaataaacagtccgtagccttgtttgacagtcactgttttttcatttatttgaaaagacgcatcaccttttataaccaatacaaattgaagctcatcatgccagtgaagagggatgtagccgtttatgtgatcgccgattgtcgtttgataacatgctactggcagctcaacggtgcgatgggtcgttagctcttttaagttttcatcaattttaaaatgggctgctggcatacatagtcacctcaatatatttatattttttaatgcaatatgcgtattttccgccccgtttttcacttattataacactattcttataataaaagtgagggatgaaagatgaacgatcttagcagaaaaaaagggttcttctttgtaacaactggagctatatgttgggggatgggaggaacggttgctcaaaagctttttcaagaatttgaaatcagtgtagactggcttgtttcagtacggctgctcattgcgggttttttgctgctaatgatttcatgtataaaaaataatcgttctcacgtatttggagtatggaagaaccgaaagtcagcttttcagctcgtcgtttttgccatagttggtatgctcgccgttcagtatacgtatatggcttctattaagcatggaaatgcagcagtagctacgctgctgcagtatttatcaccggtgatgattatcttttatttgcttttgcgcaagcagtctatatttacgcgacaagacgtcatcactgttctgctggcactggggggctgcttttttttattaacaaacggctctatttctcagctgtctgttcctgtatctgccgttgtttggggagtgctgtcaggtgtagcagcagcattttatacgctgtatgccgtgccgctgatcaaaaagtacagttcgcttgtcatcgttggctggtcaatggtaattgggggaagcgtaatgagctttattcatcctccttgggaagcgtcaagcttatcaccaataacctgcggatatcttttatttgtcattatttttggcacgatgcttgctttttggttttatgtagaaagcctgcaaagtcttttacctaaagaaacgagtttgcttggaagtttagagcctttagccgctgttattacaaccgttgtttggctgaaagagccttttggtttttatcaatggataggcacagcttgtattattggattagttctattactcacacgaacgaaacaagcatcttctgagacgacactttcagcataaataggggcttgctaaaagaagaagcaaaccaatgtcactttgccgccgaatctgtagaaactcgtgtgacttttaaaatctttacatattgaataaacactctttcttttgtagagacatttaatttagcaagtcttgatgcgtcatctcggtttttagcagattctatcacaaaagttcctttgattttagcttcatcttttagaacggaatactgtatttcaaatcgttttgctttcgttttctgcatagtgattgataagctcctttgcctgatagattaatgtattgctatgaaataagcttcgataaaaaggaagaaaagaacgtaatatatactactaaatgaaatgcagagcggcagtgacttttatcacaccacaacctagtatttcatctttttaccaaaaaagatagggtgttttaccgtcgctgcttataaaatcttttattctttctgcttgacctagagttaactctatggtttatcttgtagtagtatcatttcaaggaggggctttatatgaagtatcatacaattgctaatactgacttacacgtatcaaatttaattatgggaaatatgcgtttaacagagctttctttacaagaagcagagaagctaatccgcacagcgatggaagaagaaattaacttttttgaccatgctgacatttacggtcctgattatgtaggacaatgcgaagagtattttgcaaacgctatacaaatgaattcaagtcttcgtgagaaaatggtgattcaaagtaaatgcggcattaacgcagcggaaaattactatgacttttcaaagaagcatattatagactctgttaacggcagcttagagcgtttgaaaacagattacttagatcttttattacttcatcgcccagatccattaatggatcctgaagaagtagcagaagcgtttaatgagcttcaaagcagcggaaaggtacgtcactttggtgtgtcgaaccacaacccagcgcaaattcagctgcttgaaaaatatatcaaccaaaagcttgtcgtaaaccaagtgcagttcagcatcgcacatacgccaatcatagactctggtatttctttaaatatgggcatcgaccaagctgtgaaccgcgacagcagcgtgcttgaatattgccgtttaaatgatataacgcttcaagcatggtcgccattccaaaacggatttttcgaaggacctttcctcggcgataaagagaaatttggaaagttaaacgaagtgattgatcgcatcgcaagtaaatatagcgtaacgaatacagcgattgccgttgcatggatcacaactcatcctgcaaatattcaagtcgtgcttggtactacaaatattcagcgtatgaaagatgcaagtaaaggttcagaaatcaagttaacgcgcgaagagtggtacgatatttataaagccgctggcaacatggtgccttaagcgctgcagttcttaaaataaagcaggtaactccgttcggatatggaacggagttacctgcgttttacgataagtaactactggttaagctagaaaaagatttagcagcagctcaattatttttgtgacgccaagacctaacaaaaaggcaataaaaccgccaattacaatggtaagcatcatgtgagcagtattcatcgtattcatcctttcaggtttaaatatatgttgcttgctgcttgtacaaaaaatctgcagcataaagagctcaatgaagaagactataaaagaataaatcctcgagataactagaggtcaagacaaactcattatgtttttctgagaagtttaaggtgtaggaggaagcagtatgacgtataccatttcacaagttgcaaagaaattgaacgtgacaatttataccattcgctattatgataaagaagggctttttccatttttagatcgtacagcgtcagggaatcgtatttttaaagaacaagatattgaatggattgatttaatttgctgcttaaaaagcacaggtatgcaaatcaaggacattcggacgcttattgaaaactgtacgcttgaaaatgccgtgcttgataaaagtctgcaaatgctgatggatcataaaaaagcggtacaaaaagaaatcgaagaaatccatcacaagcttgagacgattgattataaaattaagcacctgccggaaatgtatgagcgaattgttaacaagccttcaaactaaacaaaaaaggaagcgtaaaaatgatcgaaaaagtagtacctctcaatggagagaatatgcagcagtgcattaacttgtatatgaatgtatttacaaaaaaaccttggaatgaaccgtggacagagaaatcagctagagaaaggctgactgatttactaaacacacctaaatttatgggctatttattttatgaccaaggagagttgattggaatgattgcaggtcacgcaaaaaaatcatacagcggtatgaccttttacgtcgccgagctttgcgtcagcgcaagcgtgcagggaaaagggtacggttcagctatcttaaaccggtttgagaacgaacttcaaagacacgatatcaacagcttgtatctcttgacggcgactggaggagctgcacaggctttttatgaaagaaatggctatactgtcaatgatcagcgcgttgtcttgaaaaaaacgtttgtttaatgtttagcatctacatagagcaggaagagagttgcagagtgactctctttttaattaatctttttatctattaatatgtagaaaaaaaggaagtatgaacaagaaaaataagatgatgggaagaagcagacaagaaaagggagattaaaaaatctatttttttacaatggttagtcttattattatttggttcataagcacatttaaaaacagtgcccattatgtggacactgctttttcataataaagtggaaagctagcttttggtaaaaaattagtggaaatgaagctgttcatcattatttctaatgattagcaaccgccaaatcctccccagcaagcacagccgatgatgattaataaaatgaataatacgatgattaaagcaaagccactgccaaacccgccgccgccgtaaccgtaaccgccataaccacagccaccatagaagcccatgtatttcacctccaagttctgagtacatttttaacatatgcctgaaatgcaaaagtgctccaaaaatatccaatgatttcaatgaaaataaaaaaaggtaagaaaataaaatggacacggtactttttttttactttctacataggatgaatcatcccaagatctcatatatgagcccccatgttataacgaagcaggctaataccacttcctccttagcctgcgtacataatgaaggagaagccgaagaatttttcttcggcttcttataaacacgttagtactttccatataccattctaagtcaggaccgctttttttgtatgtattaggtactaaaaagaaatcaagctcattttcatataaacctagtaatttgctttttttcgtaattcttttcccttattttcagcataaccaagatatttgcccaagacagcgaataggtaaatgcatattcttgggtgaaagcaaaaaacaaaaaagcggaggtttctcttatgaattcagaaatgcattttttacctgctatgtattctcaagatcatcatcaacttcaacacgcagatgaaaggtttattggtagaccgtttggctttggccgaccgtttggctttgggcgaccattcggctttggctttggaggtccatttttaggaggattagcaggaggactagtagcaggttcattgttatcaccatatggctttggcggctacggttacggtggttatccgtatggtggctttggcggttacggctatggcttcggcggctgctgttaaacgtaaataaaagaaaaatcccagaagaagtatttttcacctcattcttttctataaagaagtctgttttggagcgtaaggctttatatccatccacagttaatcagagcatgcaccccacttaatataaaaaaccatctggtgattttccaggtggtttttgatttttacatagggaaggaattgctagaaaaaatgtaaatattaatggcatatgggaagaccatcaagtcttggcaatccttaaccctaatgatgaaatagaagaaataaacgagttcttaaaattttgatatacgtttttacatttaaaatttataatgagaataagagaatagaacagtctatatttaaatagtaggtgactaaggtaatggaagagaggaacatcaatgaaaaagccgtttgggatgtattgcagatggctagcgaagtagtcggaagcaggacgctgtttgtagggattttcgacgaacaattttcagttatgaaagcctttaataaagaagggggaagtcttgtagaggatggactgacgctgccgttagagcttgcggtatgcaacttagtcacgtgtgatgaaccccttgttattcccaatacaaaacgcgatgttagaacatctaatttagccatcattgatggtgcccgggtaggttcttatttaggaacacctattgtgctagaagacgggagaatgtttggtactttatgcgcggtcgatccggatccttatcagtttagcgaaagtgaaattcaagggttaaaccggctggctggtattttgtctcatattatttataaaaatcaagcggctgttttgccgaaaattgaagagaaaattctgcagcttgataaactggcgctcgtagggcagctagcagcaggattagcccatgaaattcgaaacccaatgcagtcggtgcgcggctttattcaatttttatttaatgaaaatgaacaggcagagccttttcaaaaaattgttcttgatgaactggatcgtatgaatgaactcattaataacttcttgcttgtcacgcagccaacagcgcctaaaaaagaaatcgtatcgattgtagaagttattcatgataccgttgctttcttgaaaagtgaagctgcgctgtataatgtcgaaatgaacgtaagaatagaaggagccattccgcttgtatcaatcgatcctgctcaaatgagacaagtgtttatgaatcttttaaaaaacgccattgaagcaatggagaaaaagaaacgcggcgaagtaaatcttattattaaagaatgggaaggctgggctcttattgacattcaagataccggctctggcattccgctatccattattaataaagtaggaaatccatttttctcaacaaaagatggaacaggcatggggttagggctttctatttgtaaaacgatcatcaacgagcataacggtaagcttgcgattgaaagtgatgagaacgggacagtggtgacggttaagctgcctttgacgctttaaggtagaacaaaaaagaaaggagagcaagcactcatcctttcttttttttgtggacctttttaatatgctgaactgtcttcaatccagtattcatagtcttccgcatcttttttatttaactttttgccgttgatgtaaattttgtcccactcgtaaatttgtttatccaaataaacgttaaatacaatgcgtacatgctctttttctgtataatcgtagccggtaaattgtacaacgtgatgacggccttctttcttgatgtaggtccattttggatgatcgttgtacgtttcaagcgtaattgcttcgtcgccgtagcgaactacatctttaatattcgtttttgttggtaaaagtgataatcccgctccggctccaaaagtaatcacaagcgctaagatgcttaaaccaatagcaattccgatgtgagtgccgccttttatttgcaaataagcttcttttcgctgctccggctgggcttcggctcgagctaacacgtttttagcgtgcttataataccagcggttggcacatagccctgtaataagtgaagcgccgccgaacacaattgcatcggaccactctggtatgtctacaaagcacaaaagggaaaaccaaattacttcaataagcgttaaaataaaaaagtgtttatacatttttcggtatgcaaaccaagcgcttgtcagaaaaaaggctgcccagttccacgtgttgtttttagctggattggctgtttttccccattttaaatcataatacgacgtattcgttcgaactactttatgctcttcttcaaaagaaacgagttcatttactgcttgttcttccatttaaaacacctttcattggttataatctatcatctaaaatgactctattattatacattatttctagtatttttctattcttccttaaattatttttaaagtaagaatatttgcgctgtagattttttaacaagaactttcataaaaaagaaaaacatggtagatttgaagaaaaaggagctgcttgaacatgaatcgtttaaagaaagctctgcaccaatcgtggtcaattcattcaagcacgaagtggacggctgacaatcctgccaaaggacagtgcggcgtgacagctcttgtcgttcaagatctaaaaggaggagatattctaaaaactccgtgtaaagaaggctggcatttctataaccagcttgatgaacagcgctatgattttacacaagaacaatttcgcgagcctctccattatgcagacattttgtccagtcgggaagaagcgtttatggatacgaataaagagcaatatgaggctttaaagaaaaacgtaatgacctatttcatacataaaaatttcctttagaaaggaacacataaatgaaaagtattgagtattccattgttgatgtatttgcacagagaaaatatacgggaaatcagctcgcagtttttaaagacgcaggaagcctttcagacaaagagatgcggcaaatggctaaagaaattaatttctctgaaacgacgtttatcacgtcttcttctgcaaaaggagaatataacgtgcgaatttttacgcctaatgaagaagtgccatttgcaggacatccgacgctcggaaccgcttatgttattcgagaagaactagaagaaaaagatacagagaagcttattcttcattataaagcaggtcctacgcccgttacatatgatgaacaaaaagatgtgctgtggatgacacaaggtcagccgacgtttgggaaagtgttagataaaaaacaagtggcggacgtgttaaaccttgatgaagcttatatcgatatgcgttttcccgttcaagaagtatccaccggcctgccagtcatccttgtcccgttaacatcattagaagcagctaaagagataaacgtagacaaagaaaaatatttcaaactgatagaaaatacagaagcgaaagcgattatggtattttcaccggaaacctatcaccaagatcaccacttaaacgtacgagattttgccgactactacggcgttccagaagatgcggcaaccggcagcgccaacggctgtttggcagcgtatttagttaaataccgttattttaatcagaccgtgattgacatatgtgtagaacaagggtacgaaatagaaagaccttcactgctgcatgtaaaagctagttatgacggagaggcttttcacattagggtaggcggaaaagtagagatgattgcgcgcggtgaatggattttgtaacaagccgttcatctgctgttcacaataagtccttatcctgataaaaacgcaataggaccacggcgtttggttacactagtaaacagatagatactgaaagaataaatgatggcggccaaaaggccgccattttaaatggttgataaaaggagtggcagaagaaatgattcacattttactggcggatgacgatgagcatatgctgcaattagttcgtcactatttgcagcttgaaggctatgtggtgcatgaagcaaaagacggagaggaagcttcaggtctgcttgctaagcagcacattcatttagcggttgtcgatattatgatgcctcgtaaagatgggtatgaagtttgcgaagaaatacgcagctattatgattttcccattattttattaacagcaaaagatcagctcgaagacaaagaaaaaggctttttagcaggaacggatgactatgtgacaaagccgtttgaaccaaaagaattgattttccgaatcaaagcgctgcttcgccggtacgaagtggtaaatgaaaaaatgatcgtgctgaacaacacctctatcgaccgaaaaagctatgaagtgcactgcagcgggcgactgttaattcttccaatgaaagaatttgaattattagctcagcttgcgagctatccaggaagaattttcacaagagaagaattaattcatctgatatggggagcggattttaacggagataaccgcacaatcgatgtacacgtaaaaaggctgcgcgaaaggtttggacataccgatgattttgtcattacgacggttcgaggcgtcggctataagcttgaggtgacggcaatatgaagacgctctatttgcggattgtcctgacgaccgttgctgtgatggtatttagcagtcttttagcatttattttggcaaacgtttattatcagtacagcttaaaaccttataacgatcaaaagcttacgcgtatggcaaaagacattgcgagcttttacgaaagcaataaaggcgtggatcaacaagcttatttacagcatattagtaaattaggctatcaaatatatgtggtggacagcagcggacatgagacgttttacggacgggaatttagaaatcagcgcttagaaaagagtgccgtcaaacaagtcctagacggaaaaatgtatcacggaattgcaaactttccttcacaggtgtttgtgacgggtttttttgataatgtgttagccaataccatcggcgtaccgttaaaaggagaaagtaacaagcagaaagcgctgtttattcgccctgatattcagctgcagttcggggaaatgcgcatttttttctcagtcattttactgctgatgattgtattaagtattttatttgtacttattagcacgcgttatttagtaaaaccaatcgtcaagctaacagaagcgacaaagcaagtggcaaaaggaaaatacaacgttgagctgtacgtaaagcgccgagacgaaatcggcgcgcttgcttcacatttttccgaaatggctaaaagtttagagcagcttgaagagatgcgccaagaatttgtatccaacgtgtcacatgaaattcagtctccgctggcgtccattcaaggattttcgaaaacgctccgttctgctcatctttcagatgaacagagaaatgaatatctgtctattattgaagaagaaagccggcgcatgtcgtcgctcagcaaacaactgcttacgcttgcttcacttgataaagaaagtgagcatatcgacaaaagcacctttgacgttgcagctcaaatcaagcaagtgttgtttatgacggagtggagctggcgtgaaaaagagctggccattgaaatggatcttccttcaacgatgatttcaggcgatcaaaaactgcttcatcaagtgtggacaaatttgattacaaacagcgtaaagttcacgaaagaaggaggaacgctgtctcttcgcgttggtatggaagacacgcattgccacgttgaatttcaagatacgggaatcggcatgtcaaaagaaagccttccccatatttttaatcgtttttataaagaagataaagcaagaagccggacggaaggaagcagcggtcttggtttagcgattgtaaagcaaattgtcgagatgcacggaggctcgattcacgttgaaagtgaaaaaggaaaaggcagcacctttcacgtttatcttccgaaaatgtaatgagccgttcatcttccattcattttctatttttatactttaaatagaattaaaaaaggagatgaaagaaacatgtttttggctttacgtgaattaaaacatgcgaagctgcgctacttactcattggcgtgattatggtgttaattgtatggcttgtactttttgtatcaggcttagcaaaggggctttcctctgacaatgcttcagctgttcaagaaatgaaaggaaattaccttgtgcttcaaaaagaagcggatcagcgcctgacgcgctctgttttatccataaacaaaacagaagatattcaacaactaaacggcaagaaaaatgctgagccgcttggtgtgatgatgacagccgttataaatgaaggaaaagagaaaaaaatagacgcctcgttttttgccataagcacaagcggctttttagctcctaacgtaacagaagggaagatgattacggacgatgcgaaacatgaagctgtggcggactcttcgctaaaagaagaaggagtaaagctaggtgatacgataaaagatacggcttcaggaaaaagctttaggattgttggttttacaaaaaatcagtcgtttagtcacgcgcctgttattcatattaatcttacagagtggaagacaattgaaagcacaggcgcttttaatgcagtggtgttaaacatgaacgataaaaaagcacatgctcttcaaaaaaaggagtctgacattgatgtgattagtaaagatgaagcgttaaaaggaattcctggctatcaagaagaacaaggctcgcttttaatgatggtcgcgtttctgtttatcattggagcttttgtcttagccgttttcttctacgtgatgacgcttcaaaaaatgaatcagtttggcgtgttaaaagcgataggagcaaaaacaagttatttagcacggacaattttatctcaagtggttgtgttaactttatgcagtcttgctattagtattggattgacatacggagtagctgccattttgcctcattcgatgccatttcacttggatttatcgctaatcgcaggctgttcggcgctgtttgtagctgtttctgtactgagttcattattgtcgctatatcgcgtagcaaaagtagatgcggttgaagcgattgggagggctgtttaatgagtgaagaaaaattagttttagagagtgttagcaagtcgtttggagacggagaaaacgctgtagtcgtgttagatgacctatcgctgtgtgtgaaagcaggagagcttgtggcgattgtcggtccttctggttctgggaaaagtacctttttatccattgcaggcgcgttgctttcaccgtctagcggacgcgtgattattgacggagacgagattaataaaatgtctccatcacaaatgaacagcattcgtctggagaaaattggctttatctttcaatcagctaatttaattccgtatttaacggttcgcgatcagcttcttcttgtaacggaactagaaggaaatcgaaataaagaagcgaaaaaaagagcggatgatttgcttgaaaaactagggcttgctcatcgaaagcatcattatcctgaaagtttatccggaggagaacgtcagcgggtagcgattgcaagggcgtggatgaataaccctgaaattatctttgcagatgagccgacggcaagcttggattcagagcgaggaagagcagtcgtgcaaatgctcgcagatgaagtaaagctgaggggcaaatcagctgtaatggttacgcatgaccaaagaatgctggatttatgtgaccgcgttgcgtggatggaagatggaaaattagtggaatcaaatagcgtgcaagtttaaaaaagtgctgctcttgacaagagcagcactttttttgcattcttcattgtgcatatatttgtcgtctcggtttggcgcctccatacgttcacttctttattagtaaatcagttagttattcatattccattactttaaaaagcgtgtagcgaaaataaaacaacgctatttaggaaggaaataagacacaggaaatgaaaaagcaatgaagaaatagtaaaaaggtgatgaaacgatgagaaaaaggagtgaaagtaatgattagaaaagtcggtcaaattatggtatatgtaaacgatcaagatcaagcagtaaagttttggacagaaaaaatgggatttcaggttatgtctgaacaaaataatgaacaaggcatgaagtggattgagttagcgccggtagcgggtgctgaaacaactattatccttcataacaaacagctaatagcaaaaatgcagccagaattaaatgttgagactccttcgctgctgttttttacagagaatgtggatgaattatataaagagttaacagtaaaaggcgtaacagtgggagaaatcgtatcgatgccttcaggaaaagtctttaacttctcagacagtgaaggtaactattttgcggttatggaaaacgcgaatcatgcataaagggaaaataaaaagacagcgggagcgttcattctcggtgtcttacatgtaaagcaggatgagttactctgcatcgttattataaatcaaggagtgatgcccctcatgataaaactaataggagaaaaagtgttgttaagagaagcgacacagaaagacattaatgagctttattgctggaaatacgaagaaaataatcaagaagcaaaaaaatggaaagccccttatataccagaagaaagactcacgaaagaagaatatatgaacttatgggaccaagagtatgagctttttccaggcgttcctcaactccttgtggtcatcattgatgaaaaagcggtgggaaccgtaagctgttactgggtggacaagcagacaaactggctggaaaccggaattgttatttacgactcagactattggagcggaggatatggaacggaagcttaccgcacgtggattgattttttatttgagtctacgccgttacataggctcggcatgtccacgtggtcaggcaacatcagaatgatgaaaacagctgcaaaaatagggatgaaagaagaagcaagaatccgagaagcacgtatcgtaaatggtgaatattttgatagcatcaaaatgggcattctgcgaagggaatgggaaagtaagcgtagtaagagctgtaataggaaagaatacagaggtgaactaaagcattgatcaatatagtcttattatttaaggcttcttcctttatgaatggaagaagcttttcttatgtcaaacatgtcatctgtaagacctagcgtgtataaaattaaaagaaggaacgtttatataggtctgctcaaatcagctactgtgttaaaaacatcaggggggaaatgcatgcgggcaaagtttaaaaaatctacaaaaagaagcgtaaaaaaggagagaacgctgcagtttacactaaatgtaatcggaatatttatgtttataggggttttaatcaggtggtggaccgttccgtttgctgttaataacgatctccgaatttactataatccagattttcaaatgaagctgagtgagtgcaaggaatttcttgaatttacgttatgcgcagcaagcgtgtattttctgttagtgaacatctacttcttggggaaaagaggtaaaaaactagtctatatcattcttgttttacttgctgtttttaacctctatatgatgcttacacttcttgctgtagccacacattaaaggcgtgcatgcagcttaaaagaaagaggtcaaacttcctttctcttttaaagtgttttgcgatttttttatacgaaaaacagatagatcttcaaacatcttcattagttgagctttcatattacttccaccttttgatattttcacctgacacatatgtaaacattatatatgtttttaatttcatacaattctatcaaatccattaaagcagttttattttttaaattcaatcgaaaagtattttcattatttttccataaactaaacgagataagctgctataaggtttaaagaaaaaaagaaaactgaaattatttttttgcgattttaatatcttgacgaaaaaatatttcaggaataagataggttacataaagtaacgagtgaaagaaaagttactttttaaagattatatttttcctaacaggaggaagagatatggaagcgatgacttttgttttattcggttcaacaagtgatttagcgaaacgcaaaatttatcctgcactctataatttatttgtagacgggaaaatccctaaatcaatttctgttgtaggactaggcagaagggagatgtccgatgcagattttcagaaaaaggtagaagaatctattcacactttttcacgtcgcatcgaaaaagattcatctcttatgaagcattttctttcagcttttcgctacagccaattggatgcaacgaatgctgaagactataaaagtctgttaaatctagtagaagcacgagaagcagaactaaacattccaagcaaccgaatgttttatctctccgttgcaccagaattctttggtacgattgccgagcatattaaagacagtggcttaggtgctacaaagggttggaaacggttaattattgaaaaaccgtttggtcatgatctaaagtcagctcgacaattaaacgaaaacttaagcaaagcgtttaaagaagaagagatttaccgcattgaccactaccttggcaagtcgatggtgcaaaatttagaagcgctggaattcgctaatcctattcttcaatcattatggaataacgaacatattgcgaatatacaaattacagcaagtgaaacggtcggcgtagaggaaagagcaagctattatgaccattcaggaaccattcgagatatggttcaaaatcatatgctgcaaatgctgatgatgacggctatgcacttaccggctcgcattagcgctgatgatattcgaaacgaaaaaataaatgtgttaaaagcgcttcgtccgcttgtaaaagaagatatggatctagacgttgttcgcggtcaatatgagactggaaaaataaacgggtcttcagtgccgagctacataaatgagcccggcgtatcaccatcttctcagacggacacgtttttagcagccagactatatatcgataattcgctttggaaaggcgttcctttctacattcgtacagggaaaagaatggcggaaaaagcgacgcgaattgttattgaatttaaagactcgttaaaagagttgtacttagacaaaggagaaacaacatctccaaatctgttaatgattgaaatcaacccgcatgaaaatattacgctgcagttgaacagtaaaaacccatttaatcatggtcatattgagcctgtacaaattaatttttcaggtcagcaagaaggagcaccggaagcatatgaacgccttattgcagatgcatgtaccggagattctactttttttgctcattggaaagaagtagagctagcttgggaatgggttcagccgcttcttgaagcatttgaggaaaatacagtgccgcttcataaatatgctgctggttcacacggccctgatgcatcgcatgtacttttagaaaaagacggttttaaatggtggttggatgaagaaacagcaaatcaatcacgcgaagtgcagccagtttaatacaaacaaagcgaaagaaggatgacacatgagtaccaacatagacacacttgcagttaatacgattcgcaccttgtcaattgatgcggtgaacgcagccaattcaggccaccctgggcttccgatgggagctgctccgatgacctatgcgctgtgggcgaatcacttacagcataatccggcaaattcaagctggtttaaccgagatcgttttatcttatcagccggtcatggctcaagcttgctgtatagcatgcttcatctaagcggatacaatgtatcaatagaggatttaaaaagcttccgcaagctaaacagtaaaacaccgggtcatcctgaatttggacatacggacggcgtagaagcaacaacaggtcctttaggtcaaggaattgcaaatgcagtcggaatggcaatggcagaagcccatttagcagcaaaatttaaccagtcaagtttccctgttattgatcactatacgtatacgttagtaggcgatggtgacttaatggaaggcatttcttatgaagcgatgtccatggctggccatatgaagcttggcaaacttattgctttatatgactccaacgatatttcgttagacggggaattaaatctttcgtttagcgaaaatatccaaaaaagagcggaatctgcgaactggcagtatttgcgtgtagaagatggaaatgacggggatgaagtcacaaacgcaatcgataaagcgaagcagaacaccgaacagccaacgctcatcgaagtgagaacaattattggctacggaagcccaaaagtagcaggaacaaataaagcacacggcaatccgcttggagaagaagaggcaaaagcaacaaaacaagcctacggctgggaagctgaagaaaacttctatgttccagaagaagtaaaagctcattttgaaaagctagaagaaaaagggatgaaagcagaagcagagtggaacgagctgtttgcttcttaccaaaaagaataccctatgctcgctgatgaattggagcgtgccatcacgggcgaagcgttaattgaagtgaatgatattttaacattttcatcagaaaaagcggtttcgactcgtgttgcaagcggagaagctattaattatttcactaaatctgtgccatctatttttggaggcagcgctgatttatcgcattccacgatgacggacattaaagaagaaggcccttacgcacccagatatttcggtaaccgaaatatttacttcggagtacgtgaacatgcaatgggagcggctggtaatggaatggctcttcacggcggtgtgaagccgtttgtcagcacattttttgtttttaatgattacttgcgtccagcgattcgtttagcttcactgcaaaagctgccggtcacatatgtgtttactcatgattccatagcagtgggcgaagatggaccgactcatgagcccgttgagcatttagcttctcttcgtgcaattccagggcttaccgtaatccgtccgtctgatgcaaacgaaacagctagcgcttgggcttatgcgcttcagcaagcggaaggtcctgtagccttagtgcttagccgtcaaaacttgcctgtatttgaagaaacaaaacaaaatatcaacgacatagctaaaggagcttacgtattaaccgaaacagacgataagccagagctgattttcatcgctacaggttctgaagtagcactagcggtcagtgctaaaactcagctggaacgtgaaggtacatctgtacgggttgtagcaatgcctagctgggagctgtttaacaaacagtcaaaagagtatcaagagcgcatcttgcctgagtctgtttcaaaacgaatctctctagaaatgggaatttcacttggctgggaacgttttgtaggaccaaaaggaaaagtgttagccattgacacatttggtgcttcaggaacgggagctgatgtgatgaagctgttcggatttacagaagaaaacgtagtggcacaagcaaacgaattgctaaaggcttaaataagaagatgaaaaaataaatagaaggagctgttcacatgaaagtaggattagttggtttagggaaaatggggattaacttaggacaaaacttattggatcagcgtcatgacgttgtagcatttgacgtaaactcaaacgcagtggaacaaatgaaagagtacggtgcttcaggagtatcaagcttgcaggaacttgttcagtcactagaaacaccaagagttgtatggctgatggttcctcatacggttgttgattctgttattagtgaagtgacgcctcttttagctgaaggagatatcgtaattgaagccggaaactctcattacaaagagtctattcgacgctataacgagttaaaagaaaacagaatccactttatggacgttggaacatccggcggaatggaaggcgctcgtaacggagcttgttatatgattggcggagatcgtgaagcgtgggaaattgttgaacctatcttccgcgatacatcagtagaaaacggatatctatacgctggagaagcaggcagcggacactttttaaaaatggttcataacggcattgaatacggcatgatggctgcaatcggagaaggatttgaagttcttgaaaaaagccagttcgactatgattacgaaaaagtggcgagagtatggaacaatggatctgttattcgttcatggctaatggaattaacagaaaatgcattctctaaagatgctaagctagatgacatcaaaggagttatgaactcttctggtgaagggaaatggacggtagaaactgctctagaccttcaaacagctacgccggttattgcgatgtctttactgatgcgctatcgctcgcttgaagatgatacgtttacaggaaaggtagtttccgcacttcgaaatgagtttggcggtcatgctgtggaaaagaaataacaagtgaaataatgggtatagtaaaaaaaactaatggaggaatgaaaaaatgaaattttttattgatactgcaaaccttgacgatattaaaaaagcatacaaattgggcgttttatctggagtcacaacaaacccatctcttgttgcaaaagaaggcgtaaagtttgaagatcgtattgaagaaattttaaaaaccgttccagaagtagaatccgtttcagcagaagtgacgccggatgccgaaacagcagaagacatgattgcgcaagcagaagaactaatcaaaattaacggcggggatcaaaacattacgattaagcttccaatgacaatcgctggattagaagcgactcgctaccttgctaaaaaaggcgtaaaaacaaacgtaacgcttattttcactgtaaaccaagcgcttttagcagctcgtgcaggtgcaacatatgtatctccgttccttggtcgccttgatgatatttcagaagacggcgtacagcttgtggctaaaattgccgagttgttccgcatccaaaatatcgattctcaaatcattgcggcttctgtaagacatcccgatcacgttacacgcgtagcccttgccggagctcatattgcaactattccatattcagtaatcgagcagcttgttaaacatcctttaaccgaacaaggaattgaaaaatttgcggctgattggaaaaatgctgttcaaaactaagtaaaagataaagaacgtgcatattctagaaaaagaatgcacgcgttctctcataatatccttaaagaggtaaacaccatgaatacagtagacgctaagattattaaaacccaatacggtttagaggtttatgtagatgatgtagagcatattaactttaaaagctttcatgcgccgaaagttaatcagccgctctatcgcattgaatttgaaattggctactttttattaaaagaacacagatattacgaatacgaaaagaactatttttggcttgcagtaagcgaagattttagtaagctaattattcaagaccctgatatggagagcttatttggagctaaaagcgaagacgaaagaaaggcgacaaaagagcttttaagtcagtggctcattcacaccgaggcttataaaaaacaattaaaccagcatattaatgactgcaaaaaaagtaatgaaacaaataagggcataacggctgttttagaaaagttgctgactatatcagcagcagatatcgaacaagctcccattgaaaaattagctgccccacgagcagtttaacttgaaaaagtgaattagcgcagtcatagtatgagagataaaaggtgcttcgtttaacacgcgaagcaccttttttatgttgtcataaaaagctgttccctccgtgaaaaatgcagggattaaaattttggaacattacttttgttacttcaacaattcagtgaatcgatgtgtttttaagtaagcttaaaaagagaaagaggctttgaatcttctacttcctgtgaatagttttgcaaaaattaggcataatacgactgcaaactatatttaaggagatggaaaaaatgaaaaaaggacttatcattgcttcttcagttctttttctttcaggcttagctgcatgtggaggaaataaagacaataacgcaatggacaatactcaaaatgacttacgcaacacttctacaaacgacggggttgataacaatatcccaatggataacactgatcagccgaccaagtcagttgaagcagcgcaaaatgtagaagatatgaaggaagttgatgatgcatatgtgcttcgcgataataataatgcctatgtaacggtagatttagctggaaatgacgcagcggacaacaatgataacggcaaggtgaacaccgtaacgtataacggcgatacttaccatgaagtttcaactgattttgagcaaaaaattgcagaccgcgtaagagaagccgataataaaatcgacaaagtatacgtggcgtttgtaaacacgggcttagacaatatgaacaacaacaataacgtacctggcgtagataaaaatgacaagatgtatcgagatgatgaaaaagacaacaaccgtgatccagaagatattgtagaagatccaaaagatatgatggaccgtaacaacaaagatcaataacatcaaaaaggcctctgaatcaccagaggccttttgttcattaactaagttcaagtaaagaaataaaaatcggaagaacacagcaagaaacggctgaaataaaatcaagctcgttctgtttttttgcagaaagcgtgaactccatcaaaataattgtcaggatactcatgaaaagcgttgcataaaaaagaaaatcgcgctgactttccactaaaaacaacaccgcatttaaaatcaaaataacggcataaagaaacttaagcagcacgtgaagctgcatgctgaatttattctcttgtttgtagcgcaagatataaacaaaaaagaaaataaataaagttaattgccatgaggcaggaagtaactgctgccatagattgtccaagaaactcattcctcctataaaacgatgatgcatatatgtataacatacatttttattttaaaagtgaagagtatctttaggcaagaacaattctacttttttattctttttcttatacagactctcaacgtaaaaaaagaacggtcgcgatgaccattctttttacttcacttcaattaaaaccttcgtaccgtcagaaaactcgtctacttgatgggagatccaagacccggcgcctcggttgtctgaaggctttacatattcaatatcggcgccgcttccgccttcttcacaaaaggccatcggaaactcatctcggtcatagccgcttttagtcggaatgccttttaaagattcacggcggttttcttcagccccgtctcggtcgattgtacaaacagccgattttcctttatcgattgcatgttgaatgtgcgctgcagtttcagggtaacgatcagcagggaaggtaattacttcatcgtaggaggtattcgttgaagagttctgctctaacggatttccttcaatcataacaataacggctaatactaaaattaaaataccagaaacaatttttttcaatctgtaaaactcctttataaaacgtttatcacttttattttaaagtaataagaaaaaaatgtaaaaacatataatggaactagctagaattcataagacagccataagctcacgtacagccgctgaacgtaagcttatggctaatgatgagagtgatgatgatgcgtttcgttttcaggtggctgcagtgaacgtaactcttcttttgataatttgcctactgcgacttgctgagtaggaaggatgtgttcattgcgcgcgttaatatcggttttaatataataaataccatcttctttaaaggttgctttggctttatacatactgccgtcataatgcgcttttactgtttcaactttacggggggcatcttttttccacactttaaactgaacgctttttgcatcatccaccgttttattttcttgcattacatgcacttctaacacctgtgtgctctgtggctctatattttcaggaagcatcacatgcgcagacagaggctttggctgcttgtagagcttgtctgcgttactgtttacagagcacgcggaaagtaaaatcgtactgagtatgatcaatccgggcattttccatttgttcattgttactgcacctcacatcgtttcatgcatcatgcgtttaaaaaccgcttcaatgctggaatttgtttgatgacaaagaaatctaaaagccacacgataactaaggacagtccaactaaaggaaaaaggataccaaacaccacgattatacacgtcacaattcgcattgcatttccttcaggaactttaggagcccctatgtttttagctggttttcgtttccaccacagtaaggctccgctgatggcgataccagcaattccgatacaaataataaggctcataagctgattcataaatccaaactgggtgcctttatgaagggtaataccaagtgcaatcattttgcccataaatccatagttgccgtaccggtaatcagctaaaacagctccggtatattgatcaaggtgaatggttgcttcatcctgagctcttggtgaaaaaacagagagcgtatacacaccttgaggttcttgcggaatggaaatggtgtagccatcgtgcatatgctgttctcttgcaatggcaacaatgtcatcaagcgatacttttgtatattgctgagctgtggagcttggaacttctaacgtttcagctccccaaggcacgtccgctacatcttttgtttgcacggtggacgtaggtgcactgcctacccaaatagacggagggtacccaactcctgcgtttgtggcgatttgctgaaacgcattgccccacagtcctgaccacggaaggcctgttagtacgagaaaaagcataccggctgaaatccaaaaggccagtaccgcatgaaggtctcgtgcaagcacgtttttaccttttgaaaaacgaggaatcagtacgccttttattttgtcttttttgcgcggccaccataaaaaagcaccggttacaattaagacaatcgcccagcaggccgcaagttctacgatacgatcaccggctgttcctgccattagctctccgtgaaattcttcaatttgattcattaagcgactcgaatcatctaattttcctatgatgtgaccattgtgaggattaacgaaaatcgtatatgtatggtcttttaatgagattcctacttctgaagaacgagtggagcgatcactgggcctatacgtcaacacgtcagcgcctggatacttttcctttacagtctgtacttgtgctgaaggagatacggactgtgactgatcttgtacacgatacaagttgtggtacagtctttcttcaatttgaggcttgaataaatacatgcctccagtaacagctaatatcagaagaaacggagtaaacactaaacccgcataaaagtgccagcgccatatagctttgtatagaccttgagaacgcgccgtgctttttttagttgtactcgttgtttcttcgcgcttttcctgcatcattttttcctcctttttactaactaacgtgcttttattatagaaggaaagggaggattagccatcactcctgagagtgattgttgggacttataagaggaaggtgctaataaaaaaacagctcgtgaaagctgttagttcattaagccattttgaaacgcatagcttgtcagctgcacgcgattttctaaatgaagcttgcctaaaatgttttttaaatggctttttaccgtatgttcagaaataaataactgcgcggagatatcgcggtttgacaggcctttagccactaattgaagcacttcaagctctcgtgctgaaaggggagtgtcgggttttgtaatggacgtttcctgaggaaactcttttaaaatttgaaacgcaatttcttttgacataggaacttcatctaaagcgaacgcacgcaaataatcgtaccacacttcagactgcagattttttaacaaatagccctgtgcgcctttcttcagcgcatcaaataaatccgtaatatcgtctgaaaccgtgataaccacaattttaacgtacggaaaccgaagcttaatttgtttagttgcttctaaaccgtccatcacaggcattccaatatccattaacacgatatcgggcattaatttttcggtcagttcaatggcttcttgcccgttggttccttcgccaacaataataaaatcttcatattcttctaaaatatcgcgaatgccttctctcgcatgagcatgatcatctacaattaaaatacgaaacggctgcatttacgtaacctcctttttaatactaacagtcgtttggttctgttttcgctgaatagaaaagtcccagttcatatcctttgcacgatctttcataatttgtaaaccaagcccgtccttgagagattcggaagtaaaacctataccgaaatctgtaatttcacaaatccatccgccagccgtttcactggctgtaatccagattttatttgtttttgcatgtttaatgacgttcatagcagcttctttcacacaggcaaacagctcatttttttcttttctcgacagcgttgtttctgacagtctccaatctaaatttacatctagtaaatgagtatgtgttaaatcatcgacgtattgatgaatgctttcggtccagctttctgaagagtctgaaggagagtgctttaaatttgttattgcttggcgcgtatcgtcatgaacatgctgcagggtttgtttcattcgtataaaatcaggatcctgctctaatttgttttttcttccgaacttgttcattttaacagataggagaaacagcgactgcgcaatgccgtcatgcagttctctcgctaatttttcacgttcaatgagcgctgctttcttttctttttcctgtcttaattccgcctgtattttttctaaaacagaaaataaatagcgaacaaatacaagtgttacaaagaagacaagcagcggagacagaacatttcccatgtccattgaaatatatggaagcaaaaaggcatggcgaacatactcccaaagcgcgatggtcagagttggaagaagcaaaatcagccatttaatttgtctatatttcatggtatcccttctttcgtccataaaatgtgtctatattttatcatttgagcggaaaattactagaggaaagaagagaaatcactcttaagagtgattagtaccacccgtagctaaacggataaaagtaatggaaaaaagtcttatctgcaatatcatacaagaaaaattttcgagtgaatggtatggttaaaaagcttagtatgtgacaaggaggggtcgattgatgacaaaagaaattcgcacggcgcacgttgacgccgatttgcatattgaagcttaccgttttaaagggattatgcaaaagtttcctgctcattttcacgagtattatgtgattggatttattgaagaaggccagcgtcatttaatttgccaaggcaaagaatacatcattaatccaggagatttgctgctgtttaatccgtatgatgtccatagctgtgaacaaatagacggcaaaacgcttgattatcgctgtattaatgtgacgccagaagtgatgaaaaaagctgtttttgacattaacggcagtgaaagtcttccgcgttttaacagcagcgtggtgcaaagaagtgatgctgtctctagtttaaaagagcttcatttgcaaattttaaatggtgagcatgagttcaaaaaagaagagttatttttatatttgctagaagaactcatgcaggatcattcaaatctttcttttctttcgtcagccgttgacacgtcccatgaaatcacaacgatctgcagctatttggaagacacctatacaaacaagatcacgttgaatgagttaagtcagctaattggatggagcaaataccggctgctgcgctcttttacaaagcaaaaaggaatctctccatacagctacttggaaacaatacgaatcaatcaggctaaaaagctgctagagcaaggaaaaaaaccgattgacgtatcttttttgacgggattcagtgatcaaagtcatttgactaaattttttaagagtcaggttgggttaacaccaaaacaatacatgcaaatttttgaaagtgaaaagaaaacaggatgctaataatagcttagaagggagagaagagctgtggatcatttagctgcttacatgctgatggcattggtcatgtccatgatacctggtgctgatacaattcttatcatgaaaaatacgcttcattacggagcaaaagcaggacgttttaccatactcggcatggctacaggcctcacgttttggacgttaattgctgtgcttggcttgtctgttgctattgcgcagtcggtgtatctgtttaacacgattaaatacataggggcagcgtacttattttacttaggcatcagaatatttctgacaaaaaatacgctctcattggaggccatttcagaagaaacaaaaactgtaaagtcttcatttaatcgctgctataaagaatcatatatgcaaggggctcttagtaattttcttaatcctaaaacggtattagtttatattacgtttatgccacagtttattaacttggatgcgcacacaaatcaacagctgctgatacttggttttattctgacgcttatagcggtagggtggtttttaatcttggtatatgtaatagattacgtgaaaaaatggcttaaaaaaccggtatttcaaaaagcctttcaacgatgcagcggagtgctgctgattggttttgggataaaaacaatagtgtaatagtggttagtaagcaaaaaagaggctgggataaaaatatattagttgaaggaagacccgaacgaatttgattcttgattgagaatcaaactcgttcggattttttattagtatggtgaacattgctttcatatatttattcagttatgtctagctggtgattggagagcaaggcgaagactcccgcggaaaaagttgtattgatttggctatgtctcaatctcttttcttaacgtttaaaaacacgtaaacgaaacaatttgtcgtgtatccacaccgaaaatggtccaaaaacgtccgttccacctaaaccctgcaaccgatcgcgggcctacaaaaataggaaaataccagaagttcgagccgtttctaagccatatgaacgtattgcggaatagacatagagaaatggctcctggatcaacggcaaatggagttgccgtttgttgagcaggaataaatgccggcggaggggaagttggggcttgctgcgggctaggtgtaggtaaaccgcctggtggtctaggtggaccgggcgggagctgagctccaggaaatcttgtcgggtacaaataaaaatccatgtagttaatgcccattttttaatcacctctattttttatcactattttataaagtatgagaaagctgcctaaagggattgggcaattatagcgttttttacataggtcttttttatgaagaaaagtttggttcctaagtccgaagtaaattccttcatgaactcgataaaagctgaataggataaaacagagtgtgtttttagaggaggacttttcatggataacaatccaaaaaagatgtttacaccggttaagacctatcaacctttccacagtatctatgatccttgccggccgataggagtgaaatattattctacgccgcctcaattatacatgggatttcagccgccgaacctgcagcagttttcaccgaaagaagcgctaaaaaaaggaacgctgtggccggctttttgggactactatgaaaatccatacaaagataagaagagggatgaagaatgaaaaatctatctccggagtactatcaggatttagaagaaatacaggctattgattttgcactggtagaattaacgctgtatttagatacccatccaaatgaccagcaggctatgcagcagtttaacgaatacgcgcagcaggctatgcagttaaaaagaaactttgaaacaaagcacgggccgctccagcaatatggaaacagctataccgacggaaagtggagctggggaacaagcccttggccatggcaaatataagcagataaaggcgggaactatatgtgggtgtatgaaaagaaattgcagtatccagtgaaagtaagcacgtgtaatccaacgcttgccaaatatttaatggaacaatacgggggagcggatggagagcttgcggcagcacttcggtatttgaatcagcgctatacaattcccgataaagttgttggactgctaaacgatattgggacagaagagtttgctcatcttgaaatgattgctacgatgatttataagctaacaaaagatgcaacgccggagcagctgaaggcagcgggattagcagaacattatgtgaaccatgatagtgcactttattacaataatgctgctggggttccgtttacagctacttatatacaggcaaaaggagatccgattgcagatctttatgaagatatagctgcagaagaaaaagcaagagctacatatcaatggttaattgatatatcagatgatcctgatttaaacgacagcttaagatttttacgagaaagagagattgttcactcacagcggttccgcgaggcggttgagattttaaaagatgacagagacaggaagaaaatcttttaactagcagaaaaacatcccccttggcgaatgcaaacgaaaggagggatgttttttattgtggctgcgttgattatgctctagaactgcagtgacaagaaacaacctttaatttcccttcaacatctttccaaactcgtgtaaagctgtattcgcctccgatcgattcaccggttgccagcgccccatttaacgctacttttgtaacggtaacggcaagttcttgaaacagtttaatttcttgttccaacacttcgattcccgctatatcaagacttttcgaacgatgagcatttatatcttgctcttttgacaaccattccccaaggtgattcacaaaaataagttcatctgaaagtaattcttctaatagctctacgttattagaaagcatggctgaacgaagcatttcttcgtattctataactcttgcttggttcattttttatcctcctttacgccttgtgtaactcttttctatttccacgttgcttttcctttaaacttctgcccttaataaaatatgttaatttatgttaatagagggggtgagtggactaattttctgtaagcacaaaagattctgaaagactcggttaattacctttaaatggtataaaattagaatgaaagaaccttttctttccacttttccagttatctttttactattaagatgcagttttttatacttgtaattgtagcggaatgaacgttcattccgctttttggaaagaggtgataaagtggaatctactccaacaaaacaaaaagcgattttttctgcttcgcttctgctgtttgcagaaagaggatttgatgcaacaacgatgccaatgattgcagagaatgccaaagtaggagcaggaacaatttatcgctactttaaaaataaagaaagtcttgtaaatgaattatttcagcagcatgtgaacgagtttttacagtgcattgaaagcggtctggcaaacgaaagagatggataccgagatgggtttcatcatatctttgaaggtatggtgacatttactaaaaaccatcctcgtgctcttggatttattaaaactcatagtcaaggagcttttttaacggaagagagccgcttagcatatcaaaagctggtggaatttgtttgcacgttctttagagaaggacaaaagcaaggtgtgattagaaatcttcctgaaaatgcgctaattgctattttatttggaagtttcatggaagtatatgaaatgattgaaaatgactacttatctttaactgatgaacttcttaccggtgtagaagagagtctgtgggcagcacttagcagacaatcatgaaacttaacaagtgaaagagggataacatgacaattaaagaaatgcctcagccaaaaacgtttggagagcttaaaaatttaccgttattaaacacagataaaccagttcaagctttgatgaaaattgcgggtgaattaggagaaatctttaaattcgaagcgcctggccgtgtaacgcgttacttatcaagtcagcgtctaattaaagaagcatgcgatgaatcacgctttgataaaaacttaagtcaagcgcttaaatttgtacgtgattttgcaggagacgggttatttacaagctggacgcacgaaaaaaattggaaaaaagcgcataatatcttacttccaagcttcagtcagcaggcaatgaaaggctatcatgcgatgatggtcgatatcgccgtgcagcttattcaaaagtgggagcgtctaaatgcagatgagcatattgaagtaccggaagatatgacgcgcttaacgcttgatacaatcggtctttgcggctttaactaccgctttaacagcttttatcgagatcagcctcatccgtttattacaagcatggtgcgtgcactagatgaagcaatgaacaagctgcagcgagcaaatccggatgatccagcttacgatgaaaataagcgtcagtttcaagaagatatcaaggtgatgaacgatctagtagataaaattattgcagaccgtaaagcaagcggtgaacaaagcgatgatttattaacgcatatgctaaacggaaaagacccagaaacaggcgaaccgctagatgacgaaaatattcgctatcaaattattacgttcttaattgcgggacatgaaacaacaagcggtcttttatcatttgcgctgtatttcttagtcaaaaacccacatgtattacgaaaagcagcagaagaagcagcacgagttctagtagatcctgttccaagctacaaacaagtcaaacagcttaaatatgtaggcatggtcttaaacgaagcgctgcgcttatggccgacggctcctgcgttttccctatatgcaaaagaagatacggtgcttggaggagaatatcctttagaaaaaggcgatgaactgatggttctgattcctcagcttcaccgtgataaaacgatttggggagacgatgtagaagagttccgtccagagcgttttgaaaacccaagcgcaattccgcagcatgcgtttaaaccgtttggaaacggtcagcgtgcgtgtatcggtcagcagttcgctcttcatgaagcaacgcttgtacttggtatgatgctaaaacattttgattttgaagatcatacaaactacgagctggatattaaagaaaccttaacgttaaaacctgaaggctttgttgtaaaagcaaaatcgaaaaaaattccgcttggcggcattctttcacctagcactgaacagtctgctaaaaaagtacgcaaaaaggtagaaaatgctcataatacgccgctgcttgtgctatacggttcgaacatgggaacagctgaaggaacagcgcgtgacttagctgatattgcgatgagcaaaggattcgcaccgcaagtcgcaacgcttgattcccacgcaggaaatcttccgcgtgaaggagctgttttaattgtaacggcttcttataacggacacccgcctgataacgcaaagcaatttgtcgagtggttagaccaagcgcctgctgatgaagtaaaaggcgttcgctactccgtatttggatgcggcgataaaaactgggctactacgtatcaaaaagtgcctgcttttatcgatgaaacgcttgccgctaaaggggcagaaaacatagctgaacgcggtgaagcagatgcaagcgacgactttgaaggcacatatgaagaatggcgtgaacatatgtggaatgatgtagcagcctactttaacttagacattgaaaacagtgaagataataaatttacgctttcacttcaatttgtcgacagcgccgcagacatgccgcttgcgaaaatgcacggtgcgttttcagcgaacgtcgtagcaagcaaagaacttcaacagccaggcagtgaacgaagcacgcgacaccttgaaattgaacttccaaaagaagcttcttatcaagaaggagatcatttaggtgttattcctcgcaactatgaaggaatagtaaaccgtgtaacagcaaggttcggcctagatgaatcacagcaaatccgtctggaagcagaagaagaaaaattagcgcatttgccactcggtaaaacagtatcagtagaagagcttctgcaatacgtggagcttcaagatcctgttacgcgcacgcagcttcgcgcaatggctgctaaaacggtctgtccgccgcataaagtagagcttgaagccttgcttgaaaagcaagcctacaaagaacaagtgctggcaaaacgtttaacaatgcttgaactgcttgaaaaatatccggcgtgtgaaatggaattcagcgaatttatcgcctttctgccaagcatacgcccgcgctattactcaatttcttcatcacctcgtgtcgatgaaaaacaagcaagcatcacggtcagcgttgtctcaggagaagcgtggagcggatatggagaatataaaggaattgcgtcgaactatcttgccgagctgcaagaaggagatacgattacgtgctttatttccacaccgcagtcaggatttacgctgccaaaagaccctgaaacgccacttatcatggtcggaccgggaacaggcgttgcaccgtttagaggctttgtgcaggctcgcaagcagttaaaagaacaaggacagtcacttggagaagctcatttatactttggctgtcgttcacctcatgaagactatctgtatcaagaagagcttgaaagcgcccaaaatgaaggcatcattatgcttcataccgctttttctcgcgtgccaaatcagccgaaaacatacgttcagcacgtgatggaacaagacggcaagaaattgattgaacttcttgatcaaggagcgcacttctatatttgcggagacggaagccaaatggcacctgacgttgaagcaacgcttatgaaaagctatgctgaagttcatgaagtgagtgaagcagacgctcgcttatggctgcagcagctagaagaaaagggccgatacgcaaaagacgtgtgggctgggtaaattaaaaagaggctaggatacaagtagtttagttggttgaaggaagatccgaacgatgaatcgttcggatctttttattgatatggtgaacgtagatttcatctatttagtggcttctagcggttgattagagggcaaggctcaccggccgcccgcggaaagcgaagtcttgcacggaaaccaaccgcggtgcctaaagcgatttatacgagttcattcctcccatttattcgtcttttgtccccacttcatttttatagcgccttaacgtttcttctgcgtgacagcagattttttcaattagctcttgaggttcttcaataaaagcatgagcccctaaggtgtagaaaaaagaagccatgtagtttaattcatttccatcagttattgtatcgatatagccatttccatcacgcgccaccttcacatgattttcaagccacggaacgcctttacactgacgaacgccttcatgcgtcaaggttacttttaacgaaatcggctgtgagtttaccggttctgtttcaagccattcctttaacgtaagagacatattttcatctttttctaaaacctttaacgagtgaatacgatccgctcgaaacaataatactttttgcttatcgtaagaataggcagggcagtaccataaaccgttatgagcataaatcccaaggggtttgacttcttttcttgtttgacccgcctttgaatcgtaaagaaattcaatatattttcctgcaaggcttgcttctaacagctcttttaaataaggagtatctaggtttcttttaggattccaaaacgcaatatgagcactcattttatctacttttttctttgtttcctcagacaggtacacataaaatttttgaagagccgcatgaatttctgcatcaaacggaaggtcatgataatactgcagagcttgataagaaaaaaagatagaaatagcttcttcttccgtaaacaaaataggaggaagaatacgattttttaacactctgtaaccgccgctccgtcctttttcactgtaaagaggcagtcctaattcacttaagtccagtaaatagcgctggacggtccgcacggaaagaccaaattcctccgctagttcttttgccgtaaacgttctttttatattaataaacatgagcatatcaacaagtcgtctagacttggccatttattttcacctttttcttttaatatgacaaaaagtgtcgtattaagatgatatcatacagaaacagtaaagttgaaaggagaaaagggaatgaagaaaaaaatcgtcgtatatattgcggcaagcttagacgggtatattgcaagagaaaacggagagattgactggctggaaagcgtagaaggagagggagacaatggctacgaagcgttttatcaaacgtgtgatgcggtcgttatgggaaaagctacgtacgatcacgtgctgaagctcacacctgagtttccgtacctccataaaaaatgctacgtgtttagccgctcagctcaaggaaaagatcagtatgcagagtttataaacgaaagcgtggcgtcatttctcaacaacctcagtcaagaaactaaaaaaatatggctggtgggaggcgctgatattctcgctgatttcttaaaagcaaagagagtggatgaatttattatatcggtcattcccgttttgcttggggctggtattccgctgtttaaacgaggaattcccgaaatgaacttgaagcttaccgatataaaacagtacgggcaaattgctcagctttattatgaaaaagaataagcttttcgtaataaaaactctttctgtagtgtcagtgtgctcatcgtgtatttaacatccagctattgttattttagggacagtgacatcaagagcgtccttttttcatagtatattttggggtgaaaaaatgccaagagtaaattatcgagattcagacgttgctttaatggcaaggatgatgagagcagaagctgaaggcgaaggaaaacaaggaatgctgtatgttggaaatgtcattgtaaatcgtcttaaagcaaactgtttagatttcaagaatttaagatccgttccgcaagttatttatcaggtgcaaggaggcaactattcgttcgaggctgttcaaaaaggaaacgtattttatcaaagagcaagaggtgttgaaaaaaggttagccaaaaagaatttggattattggagagaacacccggggaaatatgcactgtggtactttaatccatccgctccatgccctccaacctggtatggtcaacccgcttctggtcaatacaaaaatcactgttactacgagccaaagcccggaacatgcgctagcgtttataacggatagatagcttagaaaatatactgcattctgaaagtctggcctcaaatccaaacctttagctgcaggtgacaaggtagtcgttcttcatataataagagaaagccctcttttaataaagggggcttttgctaattgtacattccttattttgcttcaaattccatgttttcaccggcaccgaattccgcttgcgccttcgtttttgtatcctttaatacccaagacgtcttcggtactgcagccacctaaaatgaacagcgttaaaagagcatagactactccaaatgcttttttattcatgctcgttctcctttgtaattgatagataatggtactcactcgctatgttcattgtatttacctccatttgtttcaatgtcatgattaataaggaaaagtgtaaaaacattaaaaagagaaatgccgcggcatttctcttttggtcctatgaatctggattaagtgaagtatgcgtatactccggcatacgctcttctttttccgttagctgagtatcggggctttgctgctcttgtgaaataggagacagtgtagatttttgttcatgattcatgtttgttattcctccttatataaagtgagctgttaatcaagcgaaagcaaatcatcttgaattcgctgcgttaaagatgccacttgctgcgttaaactgtcattttccgactggagcttttgataagactgatttgcttttgaacataggtaagggtctgtttcccaccagtccatgccaatttcttttgctttatcaatagaagccacaagcagccggatttttattgttaagagttcaacatcagcaatttgcactttaatatctccagcaataacaagacctttatctaatactttttccaatacttctacaatggtgcccagctgcccgttatgttccgccgccattttttcactccttgttataaagcttttcctaggggacctagatcaatatttaaatcttcatttgtaaagttaaagactgattttagctcctccattttgttctctaacttcatcaacgccacgcccaggtcttcgatttgagcgtccgtcaggtttccgctgtcgactcgacgaatcgcatgtttttcaatgagctgccgcaataattcaatgacggttaaaacaagctgcgctaggccttgttcagcattttccgcactcagctcaatgcggctgtttcgtttagggctattttccatttcgcaacgcctccgtttcctgttcaaactgctgagaaaaaatgatttgacgatcatgagagcctatcagcgtttctacagatgaaatcaatacccgcaaatcaagatagactaaatcaattccagcaattgaaatcaataaatcacctttaatggcaattcctttatcgaggatcacatctaatatatcgatgagggcgatgtctttttgctcgagcgtttgttttcgcagcgatgtcatcccgcatctttctccgagcgcagagtgtcgatatgataagcaggccatggtcctgttacttcgatgttcagtcccatttcactataaaacgtttgcttatcgctaatggcttttaaaaacgattctacattgttctttgaaagaaggtagatgctgttccagcacatgctgtagctttcgcccgttattttttgactccagttatttttgattgtgtggtaagcggcgtaggggcttatctcactgtgcaagtgatcacaaagcgaaagctgttctttttctgtttcttcttcaatcagcctttccatctttttacgttcgaaaaactgcctgcccggaggcagcatagttatttcttcttttttcttttggatcgtttcattgttcgttagcagatacttctttaaagaattcgtatgggcatacacttttatattccattcttcagatcttttcaaaagctgaagagaagagagggttttttctttgttatcagcaatacttttgtgacagctatccttgcttttatataccgtacaaaatttcattggaagaagcgtgtagcggctatgtaaaaaaagaagcgtttcatggtgatgcatggctttgtcctgcagccatttcatatcgttctctattttttctttcagcacttcttctgaatactgagcgcttggcaagtcgcatacaaacgcggtaatgtcatcaaagcaaagagcatagataggattgttctcatccatgccttcaagtgaaggaaagggcatttccttagcttcttcggttggaactagaccatataaataaatgagcttttccatcttttaacctcacttttgtttcttcgtcattgattcccatctttttaattcatattcttttgctgcttcatacctcagcagcagttctttttctttttccatatatgcatcttctggtatttctccaagctcatacatcatttgaagatgaacgattttttgctgaataaaagagacatcgtaaagttctttatccgcttcttccttgattttctgtccgacttttacaatgagcgtaacaggagacagcagcagtttatgaatcatacattctcttctacttttagttggatattaataaagttataagcagcccacggtccggagtatttaaaatctgctttgtgcttccatttttcatatagatcgtttacacgttcatcaaactgcgcttctttttttcgatcaattaaaaaagaagcgttcaaaagcatcgtttcaacaataggagggtttagcctagacgcttcagccatcggttctaactgttcatacagttcgtttttacagtcgtgctgcagctttaaaaagaatttctgagctgtttctccgtgggcaatttgtttataaaaatcagtactggcagaacgcgggtttcgcacttgctgcaaagaagaatcttgattcactttttgtttcagccagtccggtttcccaattacttttagtccgacttctatttttccttttaactgtgggaaaagggaggcgaactgtggatataaattttctaacagcatttcaacatcttgttgactatgaaacacgttgccaaagctgattggaatgaccgaatcatgctcattcattactttggaaatcacctgctggtgcgctgtgacgttctcttttgtaggatgataaattttaagaggaaaggcagcagccacgatagctgcatctcggtaatgaatggtaaaagtagctctttcttgatgatcaatcgtgacgctgccaaacgcatgcgcctcggtggcgggaatactgcaaaaaacataaatgcccgtttcttcactcatcgatttctgtttcattcctttccattaaaataatcagcttacttctctgctggagagcttcgatagcgcaggctggtgcgtgaaaaagacgtaatgttatgctgcttattgaccagcacttcatagataccaagcagttcatcttttgcatagcgcctcatatactcctgttcttcaaatgcttcaagtgttattttccatcctccattttgaatcgattcatacgaaataattcggtgaggaggagcaacgtgttctttaaaaaaatcagtcacggattccatgatttcggctactttcacttctctaatccacctttatgagtttataaatctaaatcttgtaaaaggtttagctgttcaagtttttttccgccgttattcgaagaaagaaaatcttctctttcattatgaagcagccgaactgcctcggcatacctcagccatgtgtccacactggcaataacgattcgagcttcgatggtaattaattcaataccaataacggaaatacgcgcgaatacgtcgattaccacgcctttatctaagatgcggtcaactacttcagctagactagaacaatcgtttgatttgtgaatcgtcatgatgaaattcctctcatgttgcatagtagaatagatacgtttgctaatcttgctattaatgtgcgtgatattgtaaaaaatatacaaatgaaacgtgcataaattaaaaaatagtataaaataccatgattatttttgttttaatacgggtagagttaagtacattacttttatccattgatgaatgaaaacacatacataaaaaacaaaaggagtggagaaagatgagaaaagaagagcagccggtattatctgattttattgaaaaggaccaatttgagttaaattcatatttaacctctttacttgaaacgacaagtgaaaagaaagaaaatcaaagttgatgaattgaaaacataaagggctactttccatgtggaaagtagttttttcatttgcgaacttgatatacttattggacaaagaggtgagaaagatgaacaaaagagacgtggtttcgagaagtattttaacaaaagcgaccggctttttggcatctggttatactcatagtttaaatacgtatgccggatgtgcattttcctgcaaattttgctacgtgcgagagctgccaattcagcgttttaaagagatggagtgggggacctggatagagcttaaagtcaacgcagctgaagtctatcaaaaagaaatacaaaaactgcgaaaaaaagagcagccggtgcgcatctttatgtcttcagcgacagatccctatcagccggctgagcgtaaagcgggcatcacgcgtacccttttagaaacgatgatcaatcatccgccggattttttattgattcaaacaaggtcgccccttgtgacgagggatattgatttgcttttagagcttcaagaagtatgtaaccttcgcgtatcgatgacagtcgaaacggaccgagaagatgtaaaacaaattttttctccttatgctccagggatgaaacttcgtatgaacgcattaaaacaagtaaaagaaagcggaatttccacgcaggtaacgattgctccaatgcttccttttacgcctgaattccctgaaaaaatagaaggaatgatggacaggatttgtatagatacgatgtacttaggagacggttccttaggtaaaacgtctaaaaggctagggatgccggaactatttgaggagcacggtttcctagactggtatgacaaagacattcatatcaaagccattcgttattttgaaaaattttatccttcttcaatgatttatctttctcaagagggatttgccccataaaaaaaagaagggctaaaagagcccttctttttttatattagtttttatacgtatcaaacatgtttgtatcgtcaggtacgttttctaaatagctgattttcccgttttcatctagcttagcaatatcttttcccgtttgagtaaatacgttgccagatgcacgttttccgcatactgcccaaggcgtttcaaacttatctgtaccttcaactgctttccagccttcgaacatatgcttaatatcagcattttctttaaacaccattttcacaaacagcttccagttttcaatgccttgcttttcgtggccgtttaagacaaatacgatatcgtctgaaaaaagccttactaattcttcaaatgcttgttcgcttgtacgtgattgatcgaataaatcaaaatatctatttaagttttccatgatgatctcctttgggtgctacagcaccattttttcttctactgttgcttttaacatgtccaggttttctttcggacattttttgttaatttcatttgtgagcgtagcaatggtttgccgttttaagatagactgccacgaagattcggcttcttccattaaatcggataataagcaaatatctttgtcttttaagttaagcatatcgtgaaaaataccgcttgatgagtaaagagactgcttaccttcaatggctacgtatacgtcataaatacgaatttcttccggcgttttgtttaagcgaaatccacctttgctaccaggaacggaagcaagtaaatcagcgctaaccagcttgcgaagaagcttttgaaaatacgtaggcgaacccccaagctgagtgctgatgacatctcctggcaacacagctttttcaggtaaaaacgtaagcagcaaaatggcatacaccgattgctcaacgcctgttttcatatgcaaaaacatcatctcctgctttatgtgtacaatgtggataatgattatccacttttaagttatcataccgcttatgaatcaaaaagtaaagcagttacttaatatgcacgcgatattcgtgtatactgtgaaagaagcagcaacaaaatacggagatgagagaatgacaactattgcagatatcgctcagcttgcaggagtagcaaaaagcactgtatcccgctaccttaacggagggtctgtgagcgatgcgacgaaacgaaaaatcgaagagattataaaagaaacaaactatagcccaaatgcttttgctcaaagcttaaaagcgaaaaaaacaaatatcattggtgtaattgttccgcgcatgggttcttttgcgacttcccgcacattagatggtattgaccaagaacttagagaccaccactatcaaatgattatttccaattctaatcaagatttagaaagagaaatcgaaaatatctatacgctggctaagcagaaggtagcaggtattattcttcttgctgttcaaatcacaaaagctcatttggaagcgttccgcacgatttcaattcccgttttgctaattggacagcagcatgaagaagtccacagtttaattcaccaagactacgaggctgcatgtgacgtcggaaggtacataggagaaaaaggacataaaaaaatcgcttttttaggcgtaactgaaaaagacatagctgtaggtgtaaagcgaaaagaaggcgtaaaggaaggtcttaaagacagagattgcgagatccgctgttatcaaacaagctttaacatgagcgatgcaatcggggccgctacggctgtgatgaaagaatttaatccgtccattattgtatgtgcgaccgataacattgcgcttggcacagtaaaggcagcttatttaaacggactgcgcgttcctgaagatgtatctattaccggctttggaggctatgaaattacaggtgtgattcatcccagcttaacgaccgtaaaatattactataaagaagcgggacaaatgggggcacagcgaatcattaagctagtcaacggagaacaagtcgaaaagcttacactttcaaattatgaattgattgagagagaaagcgttgacaatcgctttgcataaaaaaacgattgacagaatgtaggagatgctatagtataagtggtgtaaatacaaacaaataattgaacgtatctcctaaaggggagtagctttaacagcaaagtcgtcattacagagattatctctcggctttgttggcgacattatgttgttagcaagacctttaccgcttatttggtaagggtcttttttgtattcaattataaaaagggaggaaaaggctcggacatttagaggagaaacgttacataaaaagagaaggtggaggtaactatggaggaactaattggcgtatcagtgcaaggtttgctgcaaattatttttcttgatttaattttaagcggggataacgcaattgttattgcaatggcggctcgcaacgtaccaaaagatttacaaaaaagagcgattttaattggaacaggcggtgcgattggtcttcgattattatttgcggctattattgtccctttattgaaaataccattaatcggagcggtcggcggtttgatgctagtatggattgcatataaattattagcggacaatcacgatcacggcgacaatcctcaaggtggagcaacggtatggagcgcggttaaaacgatcattatcgcagatgcggtcatgtcattagataacgtattagctctagctggtgtagctcacgaatttgtcccgattatgattggtgtattaatttcaattccgattattatttggggaagcagctttattatgaaagcaatggaaaaatttccgattatcatttacgctggagcagcgatgcttgcatggtctgctggaaaaatgattgttgaagataaaattatcggcggatttgttccaagtacagctttacatctcgctgttcaagttatcttaaccattgcggttgtaggcattgggtacatgaaaaacaaaaaaatgaaaaaagaacaagcccacgcagcttaaaaaaagagcgtacggatcatccgtacgctctttttttatgattcggggtagtgcataagcaaaaaaaagcttgcttcttcttcagaagaatttatatagctgtgagaggtatttcctgaaaaatgcagagcgtctcctgagactaattcatgttcttcgctttcaaaacgaaccgttaattctccttttttaataagtaagtattcatctcctaaatgagttttcgcttcatgcacgcatccaggctttaacgtgacgatgtaaatttcaaactttttttccggatgataaggaaaaaaagaatacactaagtaatcacctttgttgtccgtgatgggatctagctgttttatgcttactttctgtacatctggggtgtcttctttcataaatacggaaaaagagacttgaagaccgttggcgattttccaaagcgtagtaaccgtcgggctggatttacctttttcaatttgtgcaagcattgctttactaacacccgttaattcggaaacttgatcaagcgtcaaatttcgattttttcgtaatttaacaagatttttagcaataatatcttgaattgcgtccattgttgttctcctttaactattataaagatagtataacatactgttgtttaatataacgtatagatgtataatatagcagaaaaggagggagtacggtgatcgcagaaaaaacagtacagcaaagagaaaaaatggatttaacgttcagacaaggggctaaggattgtatccccacgctattaggttacataagtatagggcttgccgctggagttgttggagtatcctcgcatctttctgttatggaagtcgctttattatcagcgctcgtgtatgccggggcagcacagtttattatttgtgcgctaatggttgctaacagctctatttcagctattattcttacaacatttattgtaaacttacgacactttcttttgagcgctacgatcgcgcctgaatttataaaatattcgttattaaaaaacgtcggaatcggagtccttctaacggatgaatcatttggggtgtcttcaagtaaaattgcaaaaggtgagccaattaatgaccgctggatgaacggattaaatataacggcttacgtcagctggattatcgcctgtacgacaggagctatttttggtcatatgctatcgaacccggaagcctttgggtttgattttgccttaacagctatgtttttagctctgcttgttttacaaatcgaaagcgtgttaccttcaaagcttaatcattacttacgtttgattctttatatggcgattactatgattgtgctgtcttttttcgtaccttcacatgtggctgtattgatttcaacgattattgtagcgacaattggggtggtgacggataaatgagtatctactttccaacactcatcgttattttagggtgtgcccttgttaccgtagttcctcgcattgttccgtttttagttgtacgtaacatcgcgctgccagaacccgtattaaaatggctatcctatattcctatttgtattttaaccgcgcttgttgtagaaaactttatcattcaaacaaatgacagcgtaaaagttaattggcccgtcataacagtagtcattccaaccttactgattgcgctgaaaacaaaaagtttatccatcaccgttattagcggagttggaatgatggcgctgtttcgtttttttcttttgtcatgaaagctcaagttatgctcttgagcttttttactgtctcctttacgtacgctttttcatatagtatgataagagtgtaaattagaagccaatgaaaacaaaaatatagatgaggtgcttttatgagcggagtagtatctaaataggaacaattgaatgaaataaattgaataagcaagatgggtatttttagaaaatagaggtaccctttatttgcttatggatttatttcactgcctatgaagatacctacaatgctttataaagggttcggcatttgtcgtgagagacgcgtctgtttttacagagctttcttttgtgatacgtgctctagacaccttatgaacgcaaaaagctgtgggatcaccacagctttttttcgtttacctttttcattgccttctaataaataggtatcttcatatgtgatgacaaatcatagtgaggagaaaaaccatgaatacgatgacatttgaaaaattgcagtatcatgaattaaaagaaatcgtaaaatctcactgcgtaagtgagctgggaaaacaattaatggataaacttcagccgagcacatctctaaaaacagtaaaaaaccgactcaaagaaacaacagaagcacgaagacttctagatgctgagaaatcacttccgctatcgggtgtctcaggtataggaagagtcatcgaaaagcttgaaaaaggcatgattttagagcccgaagagttaatgcgagtatccgatttcttaaaaggctgcagaaaagtaaaacaatatatggtggataaagaattttttgcttcgctcttaagttcctattcccattcgatgaaagaactgacaaatatagaagaggaaattaattttgctatcaaagccggaaaagtagacgctgcggcaagcaaagagcttaagcgtatcagaagacatatggaaggaacggaagctaagatttcagaacagcttgcgaaatttttacgaaacagtaaaaacaaagagtatattcaagacttcttcatcagtaaaaaaggagaccgctatacgattccaattaaggcctcctataaaaatcacgttggaggaacaattgttgaaacatcctctaaagggtcaacagtgttcatagagcctgcatctgttacaaagctgaatgcagaactagcgattttaaaagcagaagaagaggtagaagaatatcaaattttagcgtctttaacaggatttgtgttagagaagctagctgatattcatattaatttagagctaattagccaatacgacatggtgtttgccaaagcaaaatacagtaaacaggcagatggaatcgaacctaaaattaatgattatggatatatccatttaaaaggcgcatatcacccgctgttaacgggtgaaattgttccgcttcaattcgaaattggtcagaattatcgaagcttaattattacggggcctaacgcaggaggaaaaaccgttgtcttaaaaacgattggactactgacgctcgctacaatgttaggatttcatattacagcggatgaaggaacagaaattgcattgtttgagcatatttttgtcgatatcggcgacaaccaaagtattgaaaatgcgctgagcaccttttcctcgcacatgaagaatatatcggctattttgcaaaaagcaacgaacaatacgctgctcctattcgatgaaattggcagcggcaccgaaccgaatgaaggagctgcacttgcgattgcgattttagaaaagttttatcatatgggctgcataacggtcgcgaccacgcattacggagaaattaagcgtttctcagaaattcatcctgactttatgaatgccgcgatgcagttcaacagtaaaacattagaaccgctgtatcaactgttaattggaacatctggagaaagcaatgcgctttggatttcaaagaagatgaaggtagaagaagagattttacaaaaagcaaagttctatatggaaagcaaatcgtatgatacagaagtcgtcaaagaaaataaaataaaaaaaccaactattttgaaggaaaagaaaaaagaccgtgttgaataccaaatgggagatcgagtcaaactgttagattatgaaaatcatgcgattgtttataagtctaaagacaacacaaacaatatagtcgtactctatcagaatgagttaattgaagtaaacgttaagcgagtagctcttgaaatcaaagctgctgaattatatcccgaaggatatgacctcgattcgttatttattagctataaagatcgaaaagagcagcatgatctgcagcgaggatcaaaaaaagcattgcggaaaattgaaaaagatatacgcgaaaatagataaagcagaaacccagcacttataagaaagtgctgggtttctgctttatgtagcttctcaaaaatacgtagagcaaatcttcagataaattttaaagaaatttacatcaattttataattgtttattgttgtggttttatgttgttttgatatgttataatataaaaaaagaagaaaaacaataaaaaacaacacctaaagcactttcattttgttaagtgtaaaaaatagcttcagagataagtgcactcattatttttaccgctttcgttcatcgtaggaattctctacgaataagaaaactatttatcaaagatattgtaaatggcaaattaaataacgaaaggaaagagggaaaatggaaaaaattgaagctgtagtatttgactgggctggaacaatgattgattacggatgttttgctccgcttgaggcgtttttagaggtatttaaaagacaagaggtagaaattacaattgaagaagctagagagccaatgggcatgctgaaaattgaacatatccgagcgcttcttaagatgccgcgtattcagcaggagtggaaaaaagcacacggatcaatgccaaccgaacaagatgttgcaaaactgaatgatgaatttgaagcaagcttattttatattttagaagacttcaccacgcctattcctggagccgttgagcttacagagcgtttgcgaaacagaaatattaaaataggctctacgacggggtatacgaaaaaaatgatggagattgttgcgcccaaagcaaaagaaaaaggatattcaccggactgttatttcacagcagatgatgtaaaagcaggcaggccgtatccatggatgtgttaccgtaatgccatggagttagatgtctttcctatgaatcgtatcataaaagtaggagacaccgtaacagatatgcaagaaggaaaaaatgccgggatgtggacagtaggcgtgattttaggaagcagtgagatgggactttctgaagaagcagaaaagaatatggatcaaaaagaattaaaaataaaaatggaaaaagcgcgaagccgtttagaagaagccggggcaaatttcgtagttgatcgtatatctgatcttgatcaagtgattaatcaactggaacaacaataaaaaggaggattatcatgaaaaacccatatttgcttctaactccaggtccattatctacgacagcttcgattcgcgaaacgatgctgaaagattggtgtacatgggatgatgaatataataatcttgtccaagatataagaaagcgcttagtcaagctggcaacgtcatcttctttatacactgctgtgttaatgcaaggaagcggtacgttttgtgtagaagcagccataggaacattcataccgaggaataaagggaaaatcctaatagcagcaaatggtgtttacggcttaagaatggttcagatgtgtgaagcaatcggaattaataacactgtatataaagtaaatgaaactgagtctcttgatacagatgtgattgaacgaatgcttcaagaagacgaagacatcactcatgtagctgtcgttcactgtgaaacgacaacaggaattctaaatcctattgaaaaagtatgtggtattgctaagcgctataataaaatgactattgtagatgccatgagcagttttggcggtataccaatgaatatagagcagctgcaaattgatttgcttatcagcagttcgaataaatgcattcaaggcgttcctggattcggatttgtcattgctaaaacagatgagctcaaaaaatgtaaaggaaatgcccgttccctttcactcgacctttatgatcaatataaaacgatggaaaaggataaagggaaatggcgctttacctccccaactcatgtggttcgggcattttatcaggcgctactcgaacttgaagaagaaggaggagtccaagctcgctttaagcggtatcgagaaaatcagcacttgctagtgacaggaatgaggaaactagggtttaatacgctgctgcagtcaaaaaagcagtcacccattattacatcctttctttaccctaacgattctctttttacatttcaaggattttatcaatctttaaaaaaacaaggtttcgtcatttacccaggaaaagtttctcaagttgacacctttagaattggaaacattggagacgtacataaacaagatatcgaaaggttgctagaagcgattcattcgacagtgaggcggaaggagattcagcaatgaaagtattattttgtttaggtggtgcccgcaatatttttcgcgaatcagtattaaatttagcggagtactatttttcaagaggtaaagaagcaaggtctcactaggcgtgaagaaagaaaatatcacctttacatgagcaaattttttcgtagagttaggagtgcaataatgtgtctttattggcagaacaacgtaaaaaaacaattttagatatgattgaacatcaagggcaagtcaaagtaaacgacttagcacacgcttttaatgtatcgactgagactattcgccgttatctagaagaattagaaggggaaaaaaagttgaaaaaagtgtatggcggggccgtgaaaatagaaacagaaattactgagccgcctatgtttgagcgagaagtcataagaagcaaagaaaagaaaaaaatagggagtaaagcaactgagttgatagaggaaggcaacgttatttttatagatgaaggcagcacgaccatgcaaatggtttcgtcacttgtcaatatttctaatataacggttattacaaattcctttcctcttgtgactatgctaattgactaccaaaacaagcaggttttcagcggagaaattatttttctaggaggtcatgtaagaagcaaacattttcgggcttctggatccctagcagaaagggctgcaaaagaattttatgtagataaagcctttatttcaattgacggtcttcatcccgaagctgggattacgagctttgatttagaaaagtgcctgctgtctaaagtcttcatcgccaatgcaaatcagaccattgtattgactgatcattccaagctagaagtgaaggcgaactacaaaatagattctttaaagcacattgattatattttatgcactgctcctcttccggaaacttggggagatttggacgcaagctggattaaatgttaaaaataacaaaaggtaaggaggtttttttagctacattaataatctataggtacaaaaaaacatctttcaccgctctaatgcactcgagagatgcgtttaataaattattcgttcgttggcacaggaagacttttgagcattgtaaaacaaaaagccattttttttgcaaaatgtaaaggaggctctacagattgaatatgaagatacataaggaccggttctgtaaaaagccaatggttatgcaaagcgcttacgataagaccttgccgcgcagcagcttctgtaaaacgagggatttcttcttgtaaaatagcaatctcagccaagtttaacgcgtttccctgtgcgtctatcgcctcaaatgatacaccaacaggaacgacagagctgcttttccgcccttgaacatgagcttgaaagcttcttttaagcgacactgagcatcctgttggactaactttgcttttagcgtttaaaatctggccaaactgctgacaaatttcacttgtagtatacatataagctcctgcctttcttttatactcttagtaagctttatgacataagagcttcacttatgcaaacagtgttcttataaaaaaatccccttcacgatgaagaggatttttttattattcagcatgcgatgagcgttcgtttaacaaattttcataaaaacgggcaagtgaagcagaaaggtatggaatagaccataaaaagccgattcctagtgtaataatacttaataaaaaccagccaagaaagcttagcagcagcaggaagtactgtcctttgtaaccattcatcaacctgcggctttcggtaatcgcttgattcatcgagtaagtaggattgtctttacaaatatagtacgtttgtgaatatgccagtgctttaataattccaggaatcagtaaaagcagtgaccacagcatcacataaagagtcataagtacataaattcctagtgactttacataaagaccgaagtcttggaatgttttaaacaagtgtcccaattgaacagattcacctcgtgctaaacctaaaaacgcccagtaattcgccatcagaagaggcgagaagacaatagcaaaggcagttgaaatccatgaggccgaatcagattcatctttcatccaattgtcatagccgccgcttgccacaatttcaaatggaataggcagaagcgtatatactccgtacgtcaccaccgttagtaaaatcgcaagtccccagcgattctttaaagaagctttagcttctcttttaatcgtaccgatgttcatgttgttcctcctttaatgttgcaaaacagtatctttttgcttgtattaacatgtcaaccatgcacaattgttaattttgtatgaaatgaaaataatagtcaataggttctgagatgaaaagcaaagcttctgcgaaaaatttttactagacagatagaaaccactaaataggtacaagccgcttttaaagaagctgcctgtaagaaaggaaagccctatgcgtgatttggcatttttgtatgaagtgaaaccctcatggaaagaatttctaagataggaaggatttctatgtttgaaatgatcaaaatgatgcaacaagtcttaaatgaaaaggaattttcttattgggttcatcaagacctttttagttttcaatggtggctcatagtggtgataaacgctctttttctgctgcttttttacttttttattgataggcagcgcttcttttttctgctgcttgttttttttatcagctttgacatagtcggtttggtagatgaattcgggaaattttttaacctgtggtgctaccctcaccagatgcttccatttacagattgcttcaatacggttgactttgctattattccggtaagtatcacactcgtctaccaattttttagcaaatggaaatttttcttcatagcacatgccgttaattctgccattattgcttttataggtattccgctatttagagcgctgcatttatatgaattgctgaactggacaattttttattcttttctcacagtatttatcataggacttgtggtgaaaatcattagcgattggatggaaggtaagaatagacgctatagcgtcagctgaacaaaccatactcatatctatacgggatatgagtatggtttgtttgtgtgaaaataacgcgttatttctttataataggcgcaagaggagatgaataaaaaatggagaacgctacccaaatattttatgaattagaatgcatgcacttaaaatcagaagtacgaacctctgctaaagagctttcaaacattcttgcaggtgattacgtggagtttggaagctcaggcagggtatggaaacgaaaagattacaataacaatcatgtactctcgccagatgtattcgaaatctctcattttcatatagacgtattgtctcctgactgcgtattaactacctatcatcttatgaaccatacggcagaaaaaaagacgcttcgcagttctatttggcgaaaaagagaagaaaagtggcgtttgtttttccatcaaggcacagtgacaaacggtgatcaataaataagattattcggttattattatactttccctctatttgatgctatgatgaaagtatattttgacgtaagggatgttttgagatgagcaaaaataacgtaaaaaaagaagtgttttcatggattaagtccattattattgcattggttattgtagtgggagttcgccattttttatttgcgccaactacggttcacggggaatcgatgtatccaacgtttgaagattcaaaccgcgttattttaaataaaatcagtgatgttgatcgctttgatatgattgtatttcatgcaccggatgcagatgaaaattatattaaacgtgtaattggactgccaggagatacggtagaaatgaaaaacgacgttctatatattaacggaaaagcttataaagagccgtatttaaaaaaatctaaaaaatctcttgcacctaatgaaaaattcacggaagattttacgcttcaaacgctgcctgcaactgatggcaaagtgaaggtaccgaaaaattcactgtttgtaatgggggacaaccgtcctgtaagtcatgatggacgagcatttggcttcattccacaaaaatcagttattggaaaagtgcagtttcgatactatccgttaaatgaagtaggcgaaccgaaataaaaaaagggaaaaaggctggcggaatttaattcgccagtcttttttattgggttaaaagaactgatttaaaaaacgatttgctttatgcgagttaaatatcttctaaagaattagtaaattagacctggtttttttctttgtttaggaaatcataagggtgtttaaaaagggacttctaggtacctatgttacttcaaagtaagagctggtactggtaggtaagtagtttatatgggtatacagatatatgaagataaagaaacaaggattttggaaaggagcaggtcagcatgaaaaacgtattaatcattaatggacacgagtattataaaaaatcaaaaggcgagttaaatcagacgatttttaacgaaatgcagcatttactcactggtcaatttgacattaaaacaacggtggttgataaaggctacgaagtaaacgaagaaattgaaaagtggctatgggctgatgttgtgattatgcagacccctatttactggttcagcattcccggaaagtttaagcaatatattgatcacgtgtatatggataacattttctttaaaggctccaatcaatacgggcgaggcggcttattaacggggaaaaaatacatgttttctctcacgtggaatgcgccggaagctattttcgacaatggcgaagctttctatgaaggaaaaagtttagacgaagccattatgcatttgcataaaatgaatcagtacgtcggtatgagtccacttccaacttattctattcatgatgtagtcaaacatccaaacattgatcactacaagcataaattagaaaatcatgtagcagaagtatttggaataggagagcaccaataaaagtatagccgttcgttttctgagagtatccttaggttttacagctagtaaaagaaaaaaacataaaaaagctgctttctatacattacatgtatagaaagcagcttttttacgtgacagtttcaaacttcagggtgtgaggtgggatagtttttatttacccgtctatatctaaataaaacaatctaaatgataatgaagtagaaattatttattccgtttgtttataaattgtttaaatataagatgaagcagtttagctttggaaaataagggaagaagcatactaacttgcctgtgtatatttagaaaaggagggataaagatgtcgttagctcattttgatgatatttcagaaatttgctatgcatgtgaaaaacagcctcttgggaaaagacaaaaacgcattggcgtatggacggaaaaagaaatgagaaagcctgctgaagaaagagtagaaagtcagaaggtggtcgcactttctcgttaatgtaaaaaagcctttagctcatctaaaggcttttttacgtattggcgtttggacatgtgtgaaaggtcatagaagaatcgttataaatcttctagtctttgaacttttttaccttctattttatgctgttccatcgtttcttttaactccttgttcgccgttgtcatcgtcgtttcatttgttacgcccataaatgaccagccgtgagattcaagccagtacttgaattctcgcaaaaactcttcctgcgttcctcccgtatgataaaaagctccttgaattgtaatagccggtttctccgtgttatacgtcacatacattttatttgcacacatccaaatagacctcctttattaataaacaaacgtaaattgacaaagaagcgctgaatcattcctcaatagttacactatttctctatttgactgctgttttcctttttatctctgcgattaatcataataaaatcaagttttttacagaaagaggaatgtaagtaaatagataaaaagctcgtttcgcaatgaaatcgtcatatttctacatattctttaaggggcatgtaaaagttgtaacataatgaatggcactgtaagaaacttaatccaattagaacaaatgttactgttttttttaatgaaaaggcgaatctatgtgctaaggtaataacaggttcaaattttaggaggtagtttttgtgagtaaaaaacgtgtaaaaaaatgggcagttgcttctgcagcgtctgtagcatttctagcaagtcaaggaacagcatcagcagcagcttcgcacaaagtcgtaaaaggagataccttgtgggggcttggccaacaaaatggggttacggtagatgaactgaaaggtgctaataaccgccaaaacgacatgatttacgttggagaaacattaacgattcctgaccagggacaagcacaacctgccgctagtccggcaacatctgtacatacagtagcacaaggcgaaacgttatatcatattgcaacacaaaacggcatgactgtggatcagttaaaagctgttaacggtttacaaagtgatattattaccatcggacaaacattaaaacttcaaggagaagcaccggcgccggcacaaactgctccgtctacatcggtttctgcacaagaacaagatttactagcaagattagtagaggcagaagcaaaaggtgagccgtaccaaggaaaagtagcggtagcaattgtggtattaaaccgtgtagcttcaccggaattcccaaataacattcacgacgttatttatcagcagctaggaaacggcgtatatcaattttcaccagtagcaaacggagcaattaatcagcctgcatcagaagaatcaaaacgagcggtaagcgaagcattgacaaatccgcatgaaaacgatgcgctgtttttctataatccgaaaatcgctgaaagccaatgggttgcaacgcagcaagtaacggcagttatcggaaaccatgtatttgcaaaataagtagatttctttcaaatataaacatatatttcatatatatgtaatattgatacagagaggctgccacaaaagtattttgcttaaagttaaatccgaaccattaatagttattatattaatggttcggatttttttgttgttatagtaaacgcagatttcatatatgtagttacttcgagctgttgattagagaacaaggcgaagactcctgcgaaaaaagcggaaagcgagaagccttgcacgggaatcaacagcggcgtataagcgatccatactagctcatgtatccaattaactcgtcttcagattggattaatgcaattatgtctcaatccttttttatatgaagagagaaatagctatttttaagtctaattgaaccttgaaataccttaacagatccatctgttaaggtatttttttgcttaaattttgagaaaaccattgattatttagagaataatgatatgataaagaaagtcaattgataatgataatcatttacacatgatgaaggaggagataactagacttatagagggaagaaaggagtaaggaaagttgaagttttatcagttaattcttatatttgctgtactatcggttttgtctctttttgtaggagtacaagatctgtcagcgatggatctgtttcatttaacaaaagaagaaagccaaacgctgttttttagtcgttttccaaggcttttgagcattattatggcgggaatgagccttagtatttgcggattaattatgcagcaaattacgcgaaataagtttgtatctccaacaactgcaggaacgatggactgggcaagacttggtgtgttaatttctctactagtatttgcttcagcaagtcctctattaaaaatgaccattgctttcattttctcacttgcaggtaatttattgtttatgagaatactagacagaattaaatttaacgataccatttatattccactagtcggtttaatgcttgggagtattgtaagttctctagccacattcattgcctacaaatatgatttgattcaaaacctttcttcatggctgcaaggcgacttttcccttgtcgttaaagggagatatgaacttttatacctgagtataccgctcttaataattgcttatctttacgcagataagttcacggttgctggtatgggagaaagcttttcaatcaatttaggcgtgaaatataaacaaatcgttaacattggactagttattgtttcgcttattacgtcgattacgattttgaccgttggcatgctgccttttttagggttgattattccaaatatcgtatcgatgtaccgtggagatcatttacgaaaaagcctgcctcatacagcgctgcttggagctgtgttcgtacttgcgtgcgatattttaggcagaattattattttcccttatgaaatttccattgggttaatggtaggtgtaataggaagtgcgatctttctttttatgctgataaggagaggtcgttatgcataacaaatataaaatcatcattcttgccgcgctggccgttttatcagctgcactgtttattagctgcgatttaggctactggcagtacaccctgccgcgaagaattgaaaaagtcgctgcgattgttttaaccggaggagctattgcgttttcatccgttatctttcaaacgattacaaataatcgaatcttaactcctagtattctaggactggattcactgtatttatttctgcaaacgtttattgtgtacatctttggctcgacgaatattatcatcatgaacaaaaatcttaattttcttgtttgcgtatcgctcatgattatcttttcggtcttgctttacatactgatgttcaaaaaaaccggtaagaatattttctttattttactggttggaattgtgttcggcaccttatttaaaagcatgtcttcatttatggaaatgctaattgatccgaatgaatttcaagttgtacaggataaatcatttgcaagctttaacaatgttaataccgatttgctatacatagcagccgttatttttattctacttggcatttacgtgtggcgctttacatccatttttgatgtactgtcgctaggaagagaacatgcggtgaatttaggtattgattatgataagctcgtcaaaaaaatgctgattgtgattgccatttttgtctcagtggctacagctttagttggaccgattacatttcttggactgcttgttgtgaaccttgcgagagagctgttcaaaacgtacaagcacacctatctaatgatgggatcactgctgcttagtgttattgccctcgtcggaggagaatttatcgttgaaaaagtgttcaccttcagcaccacgctgagcgtcatcattgactttgccggcggaatttactttatttatttgctgctaaaggagaataaatcatggtagaagtaacaaatgtcagtaaaacatacggagaaaaaaccgtattagaaaaaacatccgtcgtgattccaaaaggaaaaatcacgtcatttataggcccgaacggagcggggaaaagtacgctgctttcaattatgagccgtctcattaaagctgactcagggtcaatatctatagaaggaaaaaatatagagaatattgacagttcagatttagccaaaaaaatgagcattttaaaacagtccaatcagctgaatatcaggcttagcgtacgtgaacttgtaaatttcggccggtttccttattcaaaaggccggttaacaaaaagcgatgaacaagcggttgatcaggcgctgagttatatgaagcttgaaagtattcaagataaatacttggatgaactgagcgggggacagtgtcagcgagcttttatcgctatggtcatcgcacaggacacggagtatatcttcttagatgaaccgctcaataacttagatatgaagcattctgttgaaattatgaagctgttgaaacgtctcgtagaagacttaggcaaaaccattgtgattgtcattcacgatattaattttgcgtctgtttattccgattatattgtagcgcttaaaaacggtgaagtgatccgtgaaggcccaacagaaaccatcattcaaacgtctgtattaagggatatatacgatatggatattccaatcgaaacggttggcggacagcgtatttgcgtgtatttttcataaaatttattcatgaggtgacgaaagtgaaaaaagtgttagtaatgtttgtagcagtcttaactgcgattgttgtagctgcttgcggtaatcaaggagcaaaagaaacaacaggtggagaaagtaaacaaaaagagacggtaacagtaaccgatcagttcaataaagacggaattaaaattaagaaaaaccctaaaaaagttgtagtattcagcatgggtgcacttgatacactagataaactaggggctgaagtagcgggcttgccaaaacaagcgattcctgagtatttatcaaagtatcaagatgataagtatgctaatgtaggtggattaaaagaacctgatttcgaaaaaattgcagaattaaagccagacttaattattattcaaggccgccaagcagattcatttgatgaattttcaaaaattgccccgacgatctatatcgatacagacaaccaacattatatgaagtcatttaaagaaaatacaaaagtactaggacaaatttttgataaagaagatcaagcgaaaaaagagctagcagcgattgataagcaaattgcagatttgaaaaaacaagcggacaaactagataaaaaagcgcttgtaatgatggcaaacgatagcaaaatgacagcgtttggtccgggttctaaatacggattaatccacgacgtattcggtattaaagcagcagacgacagcctagatccatcggctaagcacggtcaaagcattgcatatgaatatttagttaagcaaaacccagactacttattcgtggttgaccgcggcgcagcaattggtgaaaaatcatccgctaaacaaattgttgaaaatgagtacgtaaaagaagtcaatgcagtgaaaaacaatcacgttgtgtatcttgattcaggcctttggtatttatctggaggaggccttgagtcaatggctggcatgattaaagaaatcaaagcagggatagagaagtaatagagaaaagagagactgggacaaaagtattttagttgaaagtaaatccgaatgattaatcaaatcattcggattttttattgtcgtggaaagaatataggtttcacatctgtagctgcttctagctgttgattgaagtgattagttatgtctcattctcattttttagtgaacatttttctgtttggcagtggttttaactataaaactttataaactgaacgaatactaaagagcaaagcgcaggtatttccttctctttaggtgtctttttacttattaaattaagtttattaataggtgattttatccatcttcgttccggaaggaaaaagatacaagtttagtgattaattgaataggaagagggaacggaaaaaagaggaaaaaatctctaaaaggaatttattatattaaaggaggagttaacatgtttcgtcatcaaaaagaactgcaatttgaagtcaaagtagatcgccccgatccgatgcttgctcgccagattcaagaagtactaggtggacaattcggtgaaatgacggtaatgatgcaatacctctttcaaggatttaactgtcgaggagaagagaaatataaagatatgctgatggatataggtacagaagaaattggacacgtagagatgctttgttcacttattagtcaattacttgatggagcatctccagaagatcaagcagaagctgcgaaagatcctgcaacagcagctatcatgggaggaattaatcctcagcatttattagtgagcgggcttggtggtttgcctactaattcaaatggagttccatggaacggttcatatatcgtagcaagcggtaatttattagcagacatgcgttcgaacttgcatgcagaaagccaaggtagacttcaagtagcgaggttataccatatgacaaaagatgaaggtgtacgcgcgacattccgcaaaatgctagcgcgtgatcgctatcaccagtatcagtggatggaagcgataaacgaactagaagaaaaaaatggagtagttgttcctgcatctttccctcctgaggctgaaaaagaatcacagccagaagcttatgagttttggaacctctcagaaggcgctgaatcagaagagggaccgtgggctactggaagtgccccagacggaagcggtgaatatgtatatatcaaagaccctgtagcaaaaggacaagttcccaatccggaaattcctgatacttcgttgcatcatgatttaactcgtaaaaaagtttcctctaaataaaagaaagaaaggccctcgatatgtgcgagaggtcttttttttgcctataacaaagggtgttatccacgtgtttcaattaagttaccttttaatatctagaataaaaaagccgcatatggaaacagtaggtatgagcatacgttagaaaggtcacacactagtatgagcatgagcatgttaaagaggataatttgaaataaaagaaggtacttctacttattatgggataccttttttgcttcagaataaaaggagtgtttgatatgtattattacaaagaaggattaatcaatggcattaaaccggataagcccgatccagcagccgcgaaggtactgcaagaagccttaggcggtcagtttggtgaaatgcggacgatgatgcaatatttctttcaaagctctaacttcagaggaaaagaaacgcagtatcgcgatttaatgaaaggtgtttttttagaagaaatagctcacgtagaactcgttcaaaataccattaatgcattgttagatgaatctggcggagccggggtaggaagtcaaggttcagatcaggctcctcttgatgaagccgtaaaacatgctaatcctcatcactatattatgggcgctcaaagctcactgccagtggatgcgggcggaaatccatggaacggctcgtgggtttataatcatggaaatctagtggctgatttgctgaataacgttgtattagaatcaaccggcgttttacaaaaaacaagaatatatgaaatgagttctaaccaaacgttaagagaaacgctaggtttcttaattgttcgagataatgctcatcaaaatgcgtttgcaaaagctcttgaaacattaggcgtggactggggaaagctatttcctgtaccaaattatgatattaacaaataccctgaatgcagaaaatttgtcgagatggggtatcataacacgcaatttgattttaggttagatccgcaccgaatgggagaaatattccaagggcagacgccaagcagaaatggcggagacttgagcgtaacgcctccaccggaagcttttccagtccctcatttatctgaaatgccaaatgagcatgctccaggtttaggagacatgaatgcataaaagtatgtgaatcgactttaattaaacaaagctaaaacaaataaaaaaacattgactgagagctagtagtcaatgtttttttatttgttttaacgaaattctttcatttgtctagcgcaaagcacatctcgccatttctgtaagcgcatgataaagggcttttttacatctgtttgtgaatttatttgttttttacaagaagaaaagggaatactttctttaatcgcttgtgatagaaagctaataaggggtatactgctatgagtaaccaaaaagatgaatttttatttaaacgagagctctatcgcttagtacaagaatacaaacgctgtaaagttgaagaaattagatgggcaattaaaaaggatattcttcttttgaagaaggttataaataactaaaatagataaacaccggcaaaaaagctcatgttagttaataaatgagctttttttgctgctttaaacttgttcaaacgaatgagtatgtctataaatagtcttaggaagattatggaccatgttaaacagagctaacgcagttgtttctggttcttcataacgataaatgatatcgttttcaatatcgcaaatttgaaaactgtttaattgttttgaataacttagtgtaaacctattgccaagagtatgagtaatgtcgctatctctataatttactaaatttgctatcatgtgcttaatttcagttaggttcattcaccaagtcaccctttcatgttattgaagttatcataccatgtacaggtagtttgaatgcttttttttacaatttgtaacaacaattttcaaaatgaaacataaaggtaataaaaagttaaaacgagcagcttaacgcaggctggacatttattatgagggggtaggattttctttgcagtaggtcaactccaactttttatctgcgatttgttttagcccaatacgaatcataccgaatactaaaatccataatataaccgttaaaattgtatgtccagcgggcaaaatacctagtataggtgagtcccaaagagcgtgcataaaaacgacaagcaaaaatacaccgagaaattttggttttatcaacatgctccactgaaattccttatttccttggacgatgcagacggcagctccagtcaaggcagcccaagctacatgtcctccaggagcaaaaatactgcgccaaagtattgtagaataaagcatgtgaaagctgccggaaagaagtgcccgtaaagcatagccagcggtttcaaaagcagcaaaaccagctcctattgcagctcccaagaggagtccgttaaggatatatctatatttaagattgcgcacaaaataaataaccgcgataactttagccagttcctcgcatattccaatcacgatcacatttgtgttatttccaagaatatcataaaacacaagtgctaataaaagtgaaaggattccgccaataaaaacgacataaacaattttgtaaatagcaatattctgcggagcgttcatttcccaaaagaaaataagcgtagtaaatggcactgcaaaagcaccgactacaataagaccgggtatgaagttgatgttttcgaacaagcttacgcctagatatagccctaagtatgcgacaagcgcaataagaaagactcttgcaaaaagccaaggctttggccatgtatttacaacttcttctattttaggagtcgtaagccctgttcctacaataaaaagccgttcagcttccatttcactgtgctgtcggaagactcgagagaatatatttcgaaatttaggttcaaccgaacgttcacttcttgggattttatcaacacgatgggcaaacaagtagaatatgctgtagttttcgtcgtgttccacgatttcatggccgcaatttaagcagaattttaccccttccggattagaataagcgcaatgggggcatttcatttatcttcctcctttttctagatacaaatcgtttgagcttgtcttatgacatcttctacatatattatgtgaactgatgaaaaaagcataagagggtttgataggtaatttgcttaaataatggaatggtatgtatataaaagacagaagctattgctaaaagagacctcatgaaaccaaaaaaaggctgcgtcataagccgaacattcgacttacagcacagccctttatatgattgaaaatgtggatttaagcctgttttctttacaatgctactacgcaataaaaaagcttcctgaaataaaaacgatgacaccaatgaccatcattaatgtttcgcggtctttttttcctggttttttattagcaggaagcagcgattttgaaagaggtttggcaaaaattatgacaagcatgcaaacagcagcaaagatgccaagcgccacctgaaaattaccttcaataaagacgcatgccattaaaagtacaagacttatttttagaaaaatttttgataggttcactatcaacactcctttagaacacttaatacgaaagacttagtgatttttttatgtgcctgttgttttctacggcttgaaggagaaaatgagcgacgtcagaacggctgatgttgcgtccgttttctggtatgctagcttctcctatacgataatacgtagttaatggaccgctcgttaaccccattggccgagcaacagtccagtcgagcccgcttaccttcaagagcttcacggcttcgtgatgatcgctcagcacattttttaaaatgcgctgagcaagccagcctgtcatgcctggaatttctccgtcgattccggcagaagccgtataggcgatacgttgaattccattttcgttcatacattgaatcaacagattggtcgtttctactaaaagggtagaatgccccaaattttcagttccaagacaagaaatcactgcatcagatcctcgcatggcctgacatacttcataataatcaagcacgtcgccttgtatgacgtgtacgttcgcatgcgttaccttaagcttagctggatttcgcacaaaagcttttacataatgttcatttttaatcgcttgtttgattaattcctgtccggtcctgccgcttgcgccaatcaaaaaaatgttcatacgatcaaccctttcgtttcaatgtaggtagtaaaaacgaaattttcttttaccataacacatttttctcgatttagcttgtcaaaacataaaagctgcttacgagtttcatcaaagtaagaggtatcctctgttcttttttaaaacttatgtcatagactgtctagaaaacaaagaaatgtacgaacggtttataaaggggtttaatgctatagaagcgaaagggtattataagaataagggacgaacaaaaggggcgatgcactatgaaaaaatcggtaagccgagcacgtgttatcatagtactgataggctttccgctcatctttctcattatggcgcttgtgacgggtgagtggcgatatatgacttggaccataccgcctgcgctgatgtcatgttggacggcactctttgtattaagaaagcaagaagaaagataacaggaaatttgaactattgcatcgaatttatagagaaagtataaaatgatagaaagctatagtaagaaaatttaatgaaggacggtgtgaagatgaacggacaacagttattgtatgggttgcttacgtctaaagacgatatcctaagagctgcttatgtgttatgtgaccaccgcatttatacggaaatgtcagcgcagtatcagcagacggagcatacggattttcaagcatcattgatggaagaaatgaaattgcttgaaaagcagcctgaagtagacatgcatctgcatattttgcttgaaatggcgaagttttttgaacttcctgtttctcatgctacaacaaatggcgagctgtatgagttaagcgataacattggaaatttgcttgtatctaaatacaatgagctgttttcaattgcacgctgtcatacgttagaagacgtaatgcgccatcaaatccgactgttctttcatctaattgattcgcaatacatgattgctacaaatcgccagcaagctgtgtttcagcagcagctgatgaattggattgaacagctgccccctatgtatcaggaaagaatgattgatgcattaggagaatatcagcaggaagcacttgtgaaactgctgcaaaaaaaagggacaatcgagctatacaaacagcttcctccgcacgcataccctgctatttcaggccttatggcaaccgtaatgagtatctttattcccgttaattacccgccagcactgctatttagtatgaatgcgccgctgtttttaatggcgagctttgaaagtcatgaaattattgcaaaacgcaaagaagctggaacttttttaccgctgttattggtagttgttcagctgatgtggacgtacaagcttgagcatcaggatgagctgttgaattatcagtctctgctgatcaagtggtcgtctgtacacacagcatatcaagattatatgaaaaagaaagagcagtcactgtttgaccgtgaacggttagacagctttatttataaaacagagcagtatgttaagcagctccgcgctacggagaaaaagacggtgaagcaaattgaaacgctcaaaacagccatccgccatcagcttgatgaaatggagctcacatcgttaaacggagggcttgtgcttcaaaaaatgattgaagagcatgaatcattaaaacaggatgtagaagaactgcagcgcaagctttcgatcaaaggtgacttcttctctaaagtaaggctgacgttccgttctgcagaacgggccgtcaaaagcaaagtgaaagaggtagagcgtaaaaaagtgcttatgcaaatgacggactttattttggcaaatcgcttgcccgtatgcgtggatattcaaaatgaaatttatgattatcaagacgagctgacgacgactatttttcaaattaatcagcaggtcgagctgcttgaagaaacaaaacaaagccgccagctagccgatgcaaaagtacgccgctatgatcaagaaataaagcgatttgaacggaactattatggcttaaaagaaggaaccgttgaagagatggcacagtgaaactgggacaaacatattttatccgaacgagtttgattctccatcaagaatcaaactcgttcggatttttttatggtgattgtgaacataggttttatgtatgtagctgcttctagctgttgataggagagcaaagccctgcacggaaatcaacagcggtgtaacaagcgatccatacgaactcattcaccccatttgtctgcctttagattggcgtaatttagttatgtctcaatctcattctctgtctgtaggagcggacagatgatctttatactcatctacatagagcatgccgtttgttgacacaactgcatacagcacttggttcaactgaagctgacgatttgaaagctcaaggttgatccactgttcggtatattgagatgttaaatttttatgaataatttctccgtccatgatgagttctaccggtaaattcatttctttaaacggcttagacaaaacgtcctgtttggcaatgttttgataagcagttttctttaatactgacagttttccgcttacttctaaaacagcaaattctacttcagcaatgttgaacgttcctagttctcgtaaatgctgattcaagtcgtcaatagaatatttgacttttttcatatttgcttcaagaagctttcctttttccataataaccgtcgggcgccctgtaatccattttcgcaagcgtctgctttttagagctgttgatgctaaaagaaaatgaatggccacaagaaaaacaaaagaagcgaacatcggcagaaattttaattttaaatcaaatcccatatttgcgatgaacgacccaataatgatggacattgcaaatgtaaaatgattattatgcgtattaatttgttttccaatcaggaaagttgtaatgcttaagataatgaaagaaacaaaggttctaagaagggacatgagaatgtcttccataggttgtgatgtcacctgctttctcataaatagaaagagtatctatctctatagcgttatccgtttaaaggatcgttatacaagaaaaaacatcaagaagtagggcggataatgtgttcacattcgactgcttaaaaaggggcggaaaggctgtaggtaagggatcaaagcaaacaaaaagaatgtgcaaattcctttgaaattttttggaggatttgttacaataaaggtgcttatttttgttcggtaaggatagttcgaagtgttcgtcttgacttattgtaagagcaggaatagagtaatacacaatgtgtggattgtcacacaaggaggaaaagagatatgttacaaggtaaagtaaaatggttcaacgctgaaaaaggtttcggtttcatcgaagtagaaggacaagacgatgtattcgttcatttctctgctatccaaggcgaaggtttcaaaactttagaagaaggtcaagaagttacatttgaaatcgttgaaggcaaccgtggaccacaagctgctaacgttcaaaagtaattttttttataaagtttaagccgatcagcagaacgtttctctggtcgttcgttaaactaaactgggagaaggccccttttataaaaggggtcttttcttgttcgctttttacaccttgttgacgatttctttgattttgtagaagtattcaaatatgaaaaaaactagtcacgcagtataaaaaaagcgtataatgaaatgatgaaaataggaattgtagagcagaaaggattttaaaacgtatgagcaaccaacttcaagaaacgatggtcgattcacgtcgtacattcgccattatttctcacccggatgccgggaaaacaacgttaacagaaaaaatgctgttactgggcggaatgattcgttcagccggaacggttaaaggaaaaaaatcaggcaagtttgctacatctgactggatggaaatcgaaaaacaacgtggaatttcggttacatcaagtgttatgcagtttgagtataaagatcactttattaacatcttggatacaccaggacatgaagacttcagtgaggatacgtatcgtaccttaacggctgtagacagtgcggtcatggttattgacggaacaaaagggattgaagcacaaacgcttaaactttttaaagtttgccgtatgcgcggtattcccatcctaacatttatcaataaattagaccgtgaaggaaaagagccgcttgagctgcttgaagaaattgaagatgtactcggtattgaatcataccctgtaacgtggccaattggcatggggaaacgattccaaggaacgtatgaccgtttttcaaaacaaattgaagtataccaaggaaacaaagagtcatattttgcagactttgacggtgaaaatatcgatgatgaaattaaaaaacacgttgatgaaatgtatttaccaggcttagtggatgatttatctctattagacgaagcaggtaatgatttttcaattgaaaaagtaaagcaaggcctattaacacctgttttcttcggaagtgcgattgcaaactttggtgtacagtctttctttaattcatttttacaattaacatcaccgccacagcctcgtgaatcaacgaatggcaccgttcagcctacggatgaaaacttctcaggtttcatctttaaaattcaagcgaacatgaacccagctcaccgcgaccgcattgcgttcgtacgcgtatgttcagggaaatttgagcgtggaatgaacgtgacgctagcaagaacgaatcgtaaaatgaagcttgcgcagtctcatcagttcttggcatcaagccgtgaaacagtagacacagcgtaccctggagatatcattggcttgtatgattcaggcacgtatcaaattggtgacaccattgtaggagagggaaaagtattcgaatttgatgctcttccaaagttcccgcctgaactgtttgtaaaagttcgtgcgaaaaatgcaatgaaatctaagcacttcgaaaaagggattaatcagcttgtacaagaaggagccgtacagctttaccgtacgccgttctttggagattatattttaggagcagtcggtgaacttcagttccaagtgtttgaacaccgtatgaaaggtgagtacaatgtcgatcttgaattcacgcgcatgtctcataacattgcaaaatgggtagacaaatcaacaattgaagatcgcatgctagattctcgcgtgatgctagtagaagatcgtgataagcattccgttcttatgtttgaaaacgattttgtatggcgtttgttccaggacaaatatccatctgttaaattcctagatccgtttaatctataaaagagtataaaaaaaggaaaacgatacatactactttcataagtagacagtcgattttcctcctttgcttaagagtcagtatttactggctctttttttagtgagccactgattttaaatttaaaagaatgactcctgcaatgattaatacgatgccaaataccatcgtgagactgccgctttctttccaaatgactacgccaatcacagctgtcacagcagttcctacgccagaccaaatggcatacgcaacgctgagtggaatgtgctgaagcgatgtggaaagcgcatagaaagcaagaccaaaccctaataaaacaccaagactaggccaaaattttgtaaatccgtttgatgcttttaacatagatgtaccaaataactctgaactaatggcaatcgctaaaaataaataggctttcatcgaaaaccctcctctgttaatttccgaagttgttgttgaatcagtttttgcatgtctggatccacgggtgcgagcccaaacatttgactgaaccataatccgtcagctgctaggcgcacaatggtagcaaggactggatcaatgtcgtcttgttcaatatgcttttgccacttttcgtattgcttttgaaagtgctgcaggagttcaggattggttgcaatacatgcaagtaaccccgcgctcatcacttgttcacgctgcagatcatcaagcgtctcagcgagataagcccggctccatttgccaggagaatcgtcatgttcaacttgcacgtttagtccgtcatcatatttctttgtgactgaatacagcatttgcttaatcaattcatcttttgaagagaagtgatacaacaaaccgcctttactgacgccggcttcttttgctactttttcaagcgttaaatttccaacgccgtcgcgctgtacaacctgcgtagctgcaagcaatatatcatcaaatgtagacacatgaatttcctcctttttgattttccctagaatactttaccgtctggacggtttgtttggcaatacttttatttcgaatttcaaaaaaaaattttgtgcacactaaaatataaagtataaaaacaaaaataaacgagtaaacaaaaggttaatacctttactatatgaagaaaaagaaaaaataaagcctgggtatatgaaagataaaagaaaggtgtgaagaaacagatgagggatgtgtatcaaagttttcaagagctatctcagtgcgaacgagcgggggttgattacgaaatagaatgtgtcattcgtcggagagaaattgtcgtgcttgctattcacggaggaacgatggaaattgggacagaagaagtagccgaaaaaatagcagaaaagctgaacgcaacggtgtacgtatttaaaacgctgaaaacagaaaatccgtttgaattgcatgttacgtctgcaaactacgatgaagaaatggcgcgtcatctcgttaaaaaatcagcggtcacgatttctcttcacggtgcctatagcgatgtctgcacaacttatatcggaggaagagacgaagggttagaaaaagcggtgcgtcaagcgctttcgaattttccgattagtgaaacgcccgtccatttaaaaggcgtttcacctcgaaatatcgccaacggcaatcggcggcataaaggactgcagcttgaaataaccactccgcagtatgaacaattattacagaatgatcagctgtttaacgagtatgtgaatgcggtagtatcggctgtgaactcagtgatgtaaagataaattcaacagcttcccgtatattggctgcaataaagactacttgtacatcagcccatttttcccgtgcatgtaacgtgtcgtgcccagcccctgttaacactaaaatacattgagcccctgctgcccgggccgctacgaggtctttccaccggtcgccaatcacgatgcagttagccaaatttaagctgtgctcctcggctgcttttaacagcatgcccggccttggtttgcggcacgaacaattgtccgaatcttcatgaggacaaaggtaaacatcatcaaatccaaaagctaaaagctcagagataaagtctgatttctttacctttccttttgcaacatcgggctgattcgtaaaggaaaacagcggaatgtcttgtttctttatgtctataatcgcttgctttgcttggggaaacagctgaaaatcacctggatattgtatttcattactgccgccaattgttccgtctcggtctaaaaatattgcttcaatcatattcttcacctctttttctatcataatataaaacaggattaatttggtaaaaactttgtttttttgaaaaaaatcaaagaaatatgactgtctttttacttctcgtcatatggataagttaaatagaaatggtgaggaggggaagacaagtgaacgaagaatcgttttattcaccatttataagcgaagatggaaagaaaaaaacaattggagaaattgagttttcagatgtgcagcgcatgatggaaaaacatttagaagaaggctatcagcttgagttcaagcgcgaagtaagctcaacggtcaaacggaaaatcccaaatatcatcgcttcgtttgccaatgaaaaaggagggtggcttatttttggcatagatgaagacgaccattccattaacctgctcgagcgcaaggaatatgagctgtttattaataatatgcttaaagatgtcaccaatcccattcctcgtatcgttacgcgttttttatcacctgaagatcaccccgggcaaggtgtttttgttatttggattcccgaaggtccgaaccctccgtacatgtcttacgggaaaatttacagaagaattggaagcggcacatctcccgttacggaaatcgatgatcgctatcatttagatcgactctatcaaaaatccgaggatcaaacacagcgaatagaggaattttgcacaaaagaactgtctatctataacagaaaatggccgatgcacgggaaaagctatattcattacgggatgtgtaatatgtacgtgctgccactatatgatttgtatttagttgaacaaatggaagaagaacggttaaagcaatatattttaagcaagtctagcgaaccaaaatactatcgtttggacgaggaaagtacggtgatgctgcatacgccgtttgttaaagcctcttattcagcggaatccatcatttttcgaagcacagatgttattgatgcgtatgataaaacaattgcgtgggagcagttttataacggatcagctaagtttcatattcctattccgtacatggaagaatcaaaacaaattcatgacgtattaaagtcaaggatttcaagctacatcgatgagacgatttttgagcagtttcaatatataaacggacccttttttctcacatctttaatcagctgcatcggcggatacatcgattgtatgatggaattaaaagcagagctggaagatatgattattgtgattgacttagagaacgttcgaaacgatgtgctttactttccgcatgagcaatttcaaacatttctagaagaagaagggctcgtcttttcagataaaaagcaatatcgatttaatcgatcatttaaaacgacaaaattaggaggtaatttggagcttcttgcctacgttgattatatcgtgacagcgtttggcctttcaaaaaaccagtccattgactttcttaaacactcattaactcaaggataaaatatacaattttttgacaataactaaaaaaatgacaaaagtgaaaaaaagtatgataatatctttcgtaagtaatgagcaagtaaagaagagaaaggggactcttttttacggatgccgttgctaggtagggttaaacataaggggagaaaaggcaatgaaaaaagcgacatccatacttctaattgtcctagcactggctgggttaggaggagtatgcgctgcttattaccatctggagcagcaaaagcaaacggaagaaatgacgtatgaacagaagtacataactgtaagaaatgcatgaaaaaaccagccgatcggctggttttttttggtttcaagtcatagtaagtaaaataaagattttgcttgttcagtttttttaaataactccaatgatgtatagacgcaaaatagaaagccaacgcttgaaaaaacaaaaaacaagcggagaaaagggcgttttttttgaatgcgaaagtatgtaaaaacaacgagtgaacatacaagcagtacgctcatagcagcaaatcgaagcgcgaggtctgctaaatcatcaaccgtacgctgaaacaattttagcgtttcatcgttcaaatccgtctcaggaatgttcgttttgtcttgctgatttaacacccctacatcccatttttctcgactataatcatgagaaaccgtgtagtaaaacggaccaagctttttttcatctgcaccttcgtcagcaagtgctgaagctggatgcatgaatgctagaacaaaaaataaaaagctccactttctcattaccaaagcctctttctaactcagactatctcccattataaaccaaaaatttttatgtttccatcatccctctttcctatttccatttctatatataaagtgaaagggggaataaaagatggcagaaaaaattcagcattcaagccagcttcgcttagtattagaacaaggaataaaagaggatggaaaacccgatttaaagacaaaatcctatatgaacattcagcctggaagttctgcagatgcactcattacagcaagcgaaaccattgccagcctgcagtcgctgccgcttgttgaaatcaacgaagttgtcacgttttcacttttaaaataagaaaagaggtagagtatgaaaactttaacgatgcagtttttaaatgagtcacaaaaagcagtaagcctatcgattgaatcaccaaaagatacgttagacgcggcagccattacagcagcaatgaatgcactgatcgcaagcgatgtctttacttcaagcggcggagcgctcgttgccagaaaaggcgctcaaatcgtcgagcgaaatgtaaccgaatttacgatttgaaaatgaaagtccttccacttcggtgcgaagggcttttttaaaaggagagaggaagatgacagagtggtttacgcttgtctcagacgttggttttcccgttgtggtgacgctttatttacttcaccgaatcgaagccaagctcgatacagttgtgctatccattcagcatttaaccgatgaagtaaaaaagtgattatgacaattgtaaggcagttgtcatggaaaagttgacggattcgacacctcacactacaattagtagtgtgaggtgtcgaatatgaaaattgaaaaattcaaatttaacgaaaccggccttaatcgcttttttggcccgcttgaagcaaaaattatgacggctttatggaacgaaagtgaaatgtccattaaagatgtgcagcacgtgcttgagaaagaaaaagcagttaacttcaacaccgttatgaccgttatgaatcgattggtggaaaaaggcgtgttgcaaaagcgtttaaaaggacgtacgtcgatgtatcagccgattctttctaaagaggaatttatcgacgctcagtcgaaagagttaacgcatgaattgatcgacgaatttggatcgcttgctgttactcatatgcttgatgcgttagaagaagtcgatgattcactgttaagcatgctcgaatcaaaagtcaaacagttaaaaaaggatgaataatcaatgaatcaaggaatactaaagcgttctaagcttattttcaacctgtgcttttttattgccgtgacgttgcttatgcaaatgggcatgtatgtgctgcatttgctgtttggatggaatttatcatttaacttaattttactttgtaacaaagtagcccactttttcggcttgttttttattgaatacatgctgaatgcggttatttttcatacgatgtttgtactgctcattaaagctgtaaagcaagtgattcaaatgcggaaagtccgtaaaatgattacgaagctgcgaaatgaaacaacaacggctcacctgcaaaaagcgtacggaaaggatttaacagtcttaacaacagatcagcccattgcattaacaatggggttgtttacaccgcacatcgttctgtctacagggttgctctcagtgcttgatgaaaatgaactagaagctgttatttaccatgagcagtcacacgttgtaaacagagatccgctcaaaacatttttactaagcacgcttgcttctgcattatggtatattccgttcattaaatggagccataaacgtttcaaagtcatgcgtgaagtgctggctgatcaagatgccattgtgaaaaatggcacatctgctcacatcggcagcgcccttttaaaaatggttaaaacgggacagacaagtctctcgtgtgcgcacgtatcgtttgctgatacgtcggttaattatcgcattcaatatattttaaatccggaaacgaaaatgccgatgcagcctcctgttattttaacgctgacgtcgctatacgtgttttttattttgtgtgcgctaatttttacagctctaacagctctgtaagtttgtaagagagaaagaaaagaaggagatgagattgtgtcaaaagcaaagaaaaagaaaaaagtaacgcccaatcagcaaaggtcttcgagcaagtggattttttgggtgattggaattattgcggtctgtattttagggttaatcgtcctttctaatatgtcaaagggaggaggagatgaaaaggccgctcttacatatgataatcagccgtatcttggaaaagagtcagctccggtagaagtggtagagtttggagattacaaatgcccggcttgtaaaaacttcacggaatcctttttcccgctgattcaaaaagattatgtagatacaggcaaagtcaaattctactttatgaactatgcgtttatcaacaatgactcatctcgtgcagcagagtttgctgagacggtatataaagagcttggaaacgatacattttggaagttccatgaacttctttataaaaagcaaaacgcagcggacgaaaagaaagatgtcttaacagaatcttacttagaagatacgctgaaagaagtagctagcgatgccgatgcaaaaaaagtagcgagtgcatttaaagacggaaaaggaaaagatgcgtttgatcaagatatgaagacagccaatgacttaggcattacgggtacaccaaccatttatgtaggcggcaaaaaattcgaaggaaaaacaatcgatgactttgatcaaatggtcaaagatgcggctaaggagaacaaataatgaacaagtctttggttttcgggtggattacagcgcttatcgcgatgcttggaagcttgacgtttagtgaagttcttcactttatcccgtgtgaactttgctggtatcagcgaattttaatgtatccgctcgcgattgtgctaggtgtagccgtgtatcggaacgatacgttcatctacaaatacgtcctgccgttttctgtgattggtatggcgctttcaggctatcattattgcctgcagaagataccggcccttaaagcatttgaaacgtgtacaagcggtgttccttgctcaggtcaatatattaactggcttggatttattaccattccttttttagcgtttattgcgtttgccattattacgattatgatgctggttcttcgcaagcagacgaaaaaagcttaacctacgggttaagcttttttgtatgaaaacaaaaaaagtcccgcttacaagaagcgggtgcaaatagggtacatctatgaaaaatgatgaaattgttttgacaagaacagtatataaaagaaaagtgaaaaaacggtgaaaagagaaaagcttttttgaaaaataaggggaaaaatatgcttttcttataaaaaaagccccgctcacaaaaagcggggaataaataggggtcatttatgaaaaatgatgaaattgctttgacaaacttagtatacaaaagaaaagtgaaaaaacggtgaaaagatggaagcttttagaaaaaataaaaaaagacctgttttggggaaacaggtcactagaaagggagtaaaactatgaaaaaatatgctaattggctttacacatactatcttaccgcctaatagtgaaaaaacagtgaaaagaaacatcaaataaaaaaagacctgctctggggaagcaggtcttcacaaaggagtaaaactatgaaaaaaatatgctaattggcttcgcaagtactatcctatacctttatggtgaaaaaatggtgaaaagagaagcggaatataaaaaagacctgctctggggaagcagatcttcaaaaggagtaaaactatgaaaaaaatatgctaattggcttcgcaagtactatcctatacctttatggtgaaaaaatggtgaaaagagaagcggaatataaaaatgacctgctttggggaaacaggtcattagaaagggagtaaaactatgaaaaaaatatgctaattggcttcgcaaatactatcctatacctttatggtgaaaagatagtgaaaacgatattaggatatagctcctatttttccatattatagattcatttctctttaatagggtatacgttcattagaatcgatataagcttaaagaactgccagggaggtatatatatggaaaagaaacacgaagcaactgcaaatcagcgcgtggttcatcgcactcgaaatagctggtcaggctttttgtttggcgtagggttagttgcttttattgatgaagcagtgtttcatcagctgcttcattggcatcatttttatgataagtccacaacggccgctggtttagtgtcggacggtttgtttcatgcattcagctggttcgctacaattgcatcactttttatggtggcagatctaaggcgccggggcggctggtgggtgaaaaggtggataggaggagtattgcttggagccggggcgtttcagctttatgacgggaccgtgcagcataagcttatgggacttcatcaaatccggtacggagtgaagattgcaccttacgatattacgtggaatgtacttgcatgtttgatgctgcttattggcatcattttaacatggtttacacgtaaacaaggtgcacatcatgattaaatatgaagtattgtctcagcttttattagccctgccttttgccgctgccttttttttatacatgtgggctgtagcgtcttcgaatgcaacgtatagaaaatggtcattatataggacgtccagctggacacttggtattttatgcgccatatcttctgtagcaggaccgctcgcagcccgtgctcatatggactttactgcgcatatgacggggcatttgcttttaggtatgctagctccgcttttaatggcgttaggagcacctcttacgctgctgcttcgcacgcttccggttcatgtagccagaaaagtgtcaaaacttttaaaagggcggtttgttcggttcatcagcagtccggtgacagcttctgttcttaacgtaggaggactttggattctttatacaacaagtctgtatggcatgatgcatcactcttttttcgtgcatgtcgctgtacatattcacgtgtttttagccggctatttattcaccgtatcgatgatttcaatcgatccttcgccgcatcaaaaaacttttatgcaccgagcatccgtattggttcttgctcttgccgctcacggtattttatcaaaatatgtgtacgctcacccgcctacgcacgtctcggcggaaggggcgcagcaaggggctatgctgatgtattacggaggcgatttaatcgacttatgtttgattgtgcttctttgttatgaatggtttaagcgggttcaaaaagtatctcttatataaaaaaaacgcgcagaaagcatcatgctttctgcgcgtttttttagtgaatgtttcgttttttaaagcgtccgccgcggacttccgtaatatctgcaacggctaaaaaggcagtagggtcgaaatcttcaacaatggtttttagctttgattcttcaaggcgcgtaatgatgcagaaaattacttttttatcatcgcccgtataagcaccttcaccgtgcaaataggtaacgcctcgacctagacgcgcattaatcgcatcgccaatttcgtcggaatattcactaataatccaagctgattttgattcttccaatccttctacaaccgtatcaatggctttagctgcaatgatgtaagcaaggatggaatacatggcgcggtcccacgtgaacacaaatcccgctgctcctaaaatgaagaagttgaaaaacatcacaatttctcccacagaaaacggaatttttttactgattaaaatggcaagtatctccgtaccgtcaagcgctccgccgtagcgaattacgagtccaattccaattccgagaataattcctccaaaaacggtagcaaggagaacgtctgcggtaaacgcggggacttcatgaaacatagaagttaagatggatacaaccagtatgccaaaaatagtggaaagggcaaatgttttccccatttgcttgtacccgataaatacaaacggaagatttagtacaaaaagaaagattcctagatttactccagtaaggtgcgaaagcatgatggaaataccggtaattcctccgtcgacaacgtggtttgggacaaggaaaatttcaagtcctgtggccatgagcagcgcaccgatcgcaatggcgatggcccttccaaatacctgtcccttggacagctttcggtgctgaattttcgctttttcgagttctgtcatttgcatgtctcctttgatgtctcatatgtatttctcactttagaaaagtgaaactatctttaattataccttactatgcacaattagtggggatagacggcttaattacttgtttcaccatataaaaaaagcctgctttagagtcataagcaggctttttaaggagtaaaacgatgaaaaaagatagttggcttcagggctttaactatatagaaacttgatgaaaaaacagtgaaaacgccggcatgtgcggtaagaaaatcggggatactagttaaaaaagccaaaaggagatgacgaaatgagcgtgtggatgatgtataatcacttgatgcattcgcaaacctttttaagcagcgtattaattagcggtattcttcttgttagcggaggatttgtgtatggcagaataatgagcaaaaagtgaacctaatattgccacggataggttgttaatggaagatgctcaatagcagcttggttaatgttatacttgctccataagcttagcgtggaggtgtcagcatgagcaagcatcatgatctaacagcatcatacggagaatcgttagtgacgtgtgaacatcagtttgaagctagctattactatcatcaagtgcgggaacagtgcatgaatcacattcgtgaaataagcaaagcggtagatgaattcaccgttgattttacagatgaaagcttgaaaatattagagcttctttactatgatctagaagacagcaattgctttgactatttttcgatgacaaaagaagaattcgaagagtgtatgggcgtatactttggtgaaatggttacgtctactattgacgaagcgcgctgggttgtgaaagaatatccgcttatggaaaacaagtatgtgaccggaattgaaaaagggaatctttcactcatgtttccccatggcttttttaaccataaagagcgtcatccagagtgcgtttttactctttatcatttatataaacagctgcaaaaataggcaaaaggtgaacgtaagttcaccttttttattgtcccagctttatgggaatataaatatccatttcatatgtatcactatataaattgctgtgtatagctgtatttacaatttcaagagcaggaccttcaatcatgctgtaagaagagttcggcagccattcattccagatgctgttgtacgtcgacccgagcgatgtaatgggacctctgtgtttaaactgcaggtatgtaaacgaaggaaacgtatgaacgctcataccgtttggaatacaagccgtatcagccacttctgtacctgcaatataaaaataattttcttttttcggagccatgcaaatgcctgtaaccatatgaggttcttttgaagtgctaatcatttctttttctttaagtatttgcttcaaaagattctctttttgatactctccgttttttgctatgcctatcactgaaaatccttctttatatacaactttaccctgcataatccacctcgaatttttcaagctctagcttttattctatcaatcataaattactttaccgtgattgtaacataatcttaagtagatatcgatgcagaaaatggaacatgagcaaagcttcaaacacatgcttgagatactctaattattacataaaaacagcgcgggaattagcacgctgtttttacgaatgcaacactttatttatataacgtttatgaagagtaaatccgggaaactccttaatataagtcaaaatgatagctaaaccagtagtcgtcctgcacattctttgtgtttgaagcgacaatatgctcatgaccttgttcgtccgtggcaatccagttgtagttgatatccattttaatcggatacatattgccttttttaaacaaaataacggggggagttacttcaacaaactcgtttagttttttaacaacatcttctttacagcgaattagctccatgtttttttctccttcggtgttattgcacaatcatattttttgagttgtgcacaatatataatttaaaataacaaaggtaagtttagcacattttacaaaaaacagagaaataaaaaggagcgatatcgatgaatgaacaaattttattagcagaacgcccaaagggaatgccaacaaaagatacgtttaaatacgaaaaaattgaaatgcctacagcgaaagaaggcgaggtacttgttcaaacactatacctttctgttgatccgtatatgagaggacgcatgaacgatacaaaatcatatgttcctccatttgagcttaacgcaccgcttgcaggcggcattgtagcacgtgtaacggaatcaaaatcagatcgctttaaagaaggcgatctcgtgatgggtatgcttccttggaaacgctattcagctgcagaagcaaaaaacttacagaaagttgatccagagctagcgccaattacaacggctatcggagttcttggtatgcctggtctcacagcttactttggactgcttgaaatcggtcagccaaaagaaggcgaaacagtagtcgtttccggtgcagcaggtgctgttggatctgttgttggtcaaatcgctaaaattaaaggcgcacgtgttgtcggcatcgcaggttctgaagataaaattgcttatttaaaagatgagctcggatttgatgaagtgattaattataaaaaaggaaatgtgaaagaagcgttagaagaagcgtgtcctaatggcgttgatgtttactttgaaaacgtcggcggagagatttcagatgcagttgttagcttattaaataaatttgcgcgcattccgctttgcggccaaatttcactgtataacttagaaaaacaagatgttgggccacgtgttcaaacgccgctgttaattaacagtgcgttaatgaaaggctttatcgtagccgactatgcagacaaattccctgaaggcattaagcagttaggggaatgggtgcagcaaggaaaaatcaagtacagcgaaaacgttgtagaaggttttgaaaatgtacctgaagcgttccttggtttatttgaaggagcaaacttaggaaaacagcttgtaaaagtagcagaataagcataaaaaaccgtgcgagatcattcccgcacggttttttacatcgttgaagccgtttgttgttttgcttcttcttccatatgttcaccagttcgttcgattggcgagcgtttgtgatagcgtccaagcagtcctgtcatgatgaagataccgattaacgaataaagaacttgaactacgccgaataccactgttgcagagcctacaatcaacacatctgtcaaaagcattgttttacctggattaatgccaaagcgtttatcaagaaacacgcatagcatgttgattccgccaagagaagaaccatggcgaaacaaaaaaatcagtccaatgccgacaataacgcctcccacaaccgcagctacaagcggatgcggaagcgcaaaagaaaagttggcagctaataaatcggacatcactgacatcaggctaacgctgatgaagctttttatcgtaaactgaagtccaatttgtgtgagagccataaaataaaaaggtaaattgataataaagaacaataccccaaacgaaataccggttaaatgctgcaatacaatcccaagtcctgctgttccgccaataacgagattagaagcggttaaaaattgaattccgatggcaacgcataaacagccaaaagtaatccatccccattgttttacgtgattcatatctccatccccttttgtatatttatacaatactttcgatagaaaacaccgtcttttaattcacaaaatctattttactatatatctttttaaaaaaaagcacttttgtgagagaatctaacataagataaaaaagttagacaattcagatttatttagttttttgaggcaaatgagcgataaaccaatatgtttctaaaaaaagattacaaagaaagaatgagaaaaacggattttggaaaatgtataaacaaatatttggatagtggttaaaaaaagggagaaaacattagttaaaacgaacaattttaactaaaattaaaatataattcgtatttgtattgattttttgtttaattgaggtaatatataacattattggcatgaaaatatgtagagatggaagtggacgcgaaatgaataagaaattatcagcgttgacaggggtggctgtacttgctttttcgctgacagcatgtgcccctcagcatgaaaaagaagtgtctgctgagaaaaaagaacccgctcaacatctagctgatcagcaaatcatggccgacgcttggtaccaaacatccggcgaaatgaaggctttgtattaccaaggctataatactggaaagcttcgtttagatgaggcgcttgcaaaaagtaccgataaaaagcctgccattattttggatttagatgagaccgtgcttgataatagcccatttcaagcttcagcaatcaaaactggaaaaggatttccttataaatgggatgagtgggtgcaagcggcaaaagcgaaagcagtaccaggtgctgttgatttcttgacgtatgcggatcaaaaaggcgtagatatttactatatttcaggccgtacaacttctcagcttgaggcaacaattaaaaacctaaagaatttacatattcctcaagcaaccaaagaccatgtcctattaacgggtccaaaagatgaaggaaaagaaacgcgccgtcaaaaagtagcgacgaatcataatgtagtcctgctgtttggtgataatttatctgattttagcggctttgataaaaagtccattactgatcgaaataagcttgtagaagagcaaaaagaaacgtttggccaaaagctaatcgtatttccaaatccaatgtatggagattgggaaggagctatttataactacgactactcaatttcggacaaacaaaaagataagcttcgccgcgaacagcttcagtatttcaactaaaaaagagatgaaaacataacgaaatcgctccaatccaaagatgaacaaattggatacatgagctgaaccgcttgttacaccgctgttgatttccgtgcaagactgcgctctccaatcaacagctagaagcacctgcattgaaacctatgttcgccatcacaataaaaaatccgaacgaggttgattctccattaagaatcaacctcgttcggatttcccttcaactcacatattgttgtcccagcttcttttaatcttttcactattgcttgtttaaacgatagcttgtccaaatgatcctgctttttaagaaagaagccaaggggcataaggagcttgcttccactcatgttttaacatgccataaatcacaaggtcatggtagtgatcatataggtattcaccttctctgcaaatgccttcttctgtaaaacctagacgcgtagggatggctttacttttttcgttattaacgccgcagcgtatttcgactcgatgaaggtttaacgtattaaatgcatagtccaggcatccgtgtacggctcttgtcataataccttttccttgaaaatcatgtccaatccaatagccaagacttgtacttttgtttccccaattaattccgtgaaaaccaatcatccctgcgatttctccgtagtaccgaatgatggcctggaatccttggttattataatattgagctctccattcagggatgagttcatcatagtcagcaatactttgcatgctatctacccatgggagccattcttttaggtaaggtcttgactcgttaataagagaaagcaaggggaaagcgtcagttgattcaatcaaatgcaaactaacttcgtcatcaattttgtattcaaacatacgaaagcctcctgtgatgatgggcctgctgagataagcgtagcgtgtaggcagttctaacatctagtttttctttattctaccacaagtaacagaagggagaacgaggaagtttaggctaaaagtaaataacgcataaagtcgataggattttaatgattaaaaaaattaataattgaaagcacttttatcaatatttttacagaaaagaagcatatacagtgatacaatggaagaagagataaggcgttgtatttatacatactttgtaacaaacatgatattggattgataaaagcaggtggtaaaaacatggatgtacaactattaataacggtatttgcacttgggtttttcgggtcatttttagcaggtatgcttgggattggaggatcagttgttttgtacccgctgttgctatttgttccgcctcttgtaggagtgggaatgttcagcgcgcacgaagtagctggtataggagcggtacagtcgctgtttgcgtctgtttcaggagctcttgcttacaaaaagggcggctatttgaataaaccgttaattttatatatgggtatcagcgtcttagttggcagtctcattggttcaacactatcaaactcgttttcagaaggaatgatcaatttcatttacggcgtgatggcaacaattgctgcaggattaatgtttatgcctaaaaaaaataatccagcggccgattcattcgaagtgacgttttcaaaacctttggcagcagttctggcgtttttagttggaatttgcggagggattgtcggagcagggggcgcatttttacttgttcctattatgattaccgtgttaaaaattcctgtgcgcgtaacgattgcaagctcattagccgtgacgtttatttcatctatgggaacaacattcggtaaagtaatgacgcatcaagtccttatgcttccggcgctcatgattatcggagcaagcctgctagcagctccgatcggtgctttcgtagggcaaaagacgaaggtagcatcactgcaagttatcttagcgatcgttattacggcgacttcgttgaaaatatggtttgatttactgatgaaatccattcattaaaaaaagctgcctctttaagagcagctttttttacgttgttttggatgacacaaggtgagcgactaaaatatagcgttcaggtgccgagccaatgaaattaaaaggataacaggtactgacggttaaagtggctctaggcttgggtacaataacggtccggtcattcgcatccacaattcgtactttgttcactttgtatgtgaaggtgcctgctgccgtattcaccacgagcgaatcgccttcacctacgtcaccaagcttacgaaaaactgtatcgcgatgtcctgataaaacagaattgtcattttgaccaggcagcacgcttccagcaaaatgaccgacgcctttttctaattcatcttcgtttgtaccgtgataaatcggcagcttagcgtttaatttaggaatatataactctcccattaaatcaccgatttttggctgttttggataagaaacatttgacacttttggctttttttctgagttagcagtacgagagtgtaccgcttttttagcttcaacagaagaagcttcagcagaagagtctgctgttgaagcttccttgcttttagaaactgaagctgcggctggttcttctgtatccattgttttaaatgctaaatagcctcttgcaaatttataggcatttgttgttgtaaaccaaagaccaaagcaaatgacggcggctaaaagggaaagaacaatcaaccgctttttgcgattgattgttcttcttgtttttcttggttccattttatgcgcgtctcactttgcggaaaagaacaaagccagctgctacaagcactaatccaattaatgtattcgttacataattagaagccgtttccggaagttttgcacctttaacggttttttgtacagcgctgtttgtttgtttctttaccggttcttgcttcttttcaactgctggcttttgcgtttcagcaggttttactacagcttcagcagatttttctacttcttttcctgtgtctgtgatgatatcagaattgaacatatcgcctgtgatcaccatgtctgctaaaaatttaccgtctgtcgtataaagagaaatttttagacttgcattttttaattcttctaagttgattaaatcagtaagagaaagcggtttttcatttccgccttgtacaagtgaaaatttagcgtctaaatggaagattgatagcatttctttataaatagacattaattcggcgatttgatccgcagataattctgttgctgtatcaaaatcttcgaatgccgctaagcgctcgcctaattgatctaagcggttaagcgtcgcttcgtttgaaagctcatcttctaacgatgtaaaatgagcttcaattcgatctaattcttctgatgttaagccgaattcagactgtataaatgatagtaagcccgttaaatcttcttcgcttaattcatcatcgtaagaagtgtcttcttcgtcatatgattcatcatcttcataccagtcatcgccttctacatagaagccgacatcatcgtataaatcatctagatacacataatcatctaagctttggccgttctcttttaataacgcatttaagcttgttttgtctaagtcaaaatctccatacacatcttgcacgttatgtaagtcagctgcaattggttcacctaaaaaatcttctaaatctgcgattgtatcgtagttttcaagactatcgtcatacagtgaaagtgaatattcaacgtcgtctttggttacttcaaagcctcgcgtttggcttaccgattttaaatatttgttgaaatctgcgtcaaatgttgacgtcgctgcgaatgaagacgtaggaaatacgccaataaacagcagaaatgataataaaattgcccccagttttttcatcaattttctccttttttttacgttttctacaagattatatagtaagagttataaatttacaatatatacttatattatatataccttgaatatagtggtaattttaggtatttgtagaactatagattttaaaatcgccgtataaaagggagtggaaagacctagataaaaaaagaaaaagatttatgaaatatttttggtagaagcagaaatagaaaaagcatcaaaaaagaacggcattaatagccgttctttttgaaatgatatgtaagccgtagcatagatagttgaaattcgataccgttccgctttagaaaaaggtggttacgagttatgattttagtaaggataaagaagaaaagtgagagcgcggttttgtcagctctattttaattccttttagtcttaaacgttctacaaactgtttgcgtttttttcgcttttcatgcggggattgattcatatttgcctcatcctccatatatagtcaaatagctaacatatcattatcataatcaaaagacgacagttacacaataaacattctcaaatattcacaaagatttaaaatttgttacattgatagtgtacatgtacccgattctttttttttataacatctcgatgtgctgttttaaattgaaattttgcaattcctattatattatcaaaatttaattaaagtaagttgatttcataaagattcgtagaactactatttattttaagcagcatatgattgaacaagtaggtagctattaaaataaaaaagaaacccttattcattaagagtttccgcagctcttgcttattggcatcgaggccagtccttattttgctttattgatcttctggatctacttcaaggctttcaacttcgtcattcttttttacttctaatcgtacgattttatttttactatctcctgacatattatcattatctagctcaaagtctttcgcttttttataggtcttttctccgctagatacttttatggtgaggttcttatctgtttcattagttagttttccaattacgctgtaatctccatcagattctttttcatagataccgtttgaatcagcttttgctagaggcgttaattctaagctttcagcattttgatctttagcattaatttctacttttacctgttttccatcgatgttcttaggtgtatctttttctttctcaaacgaattcctcttaggtatcttcacccgtttatcatcaatgacaagcgttaactcatcgttcgtttctttgtctaaagttcctattaaatcaaaatcttcatcctgtttactgtcagggtctttagaatactgctgtaaatttgatttgttttcagaggagctgctttcattttgagatgtattttgagatgaattatcttgattggagcaacccgtcaaagatcctgcggctaaagctccagctaatgaaaaggatagcgttaacatttttttgttcatatggtttattcctccttttttacttatagttactattgcctttcttttatagaagtaaacaggtagaattttgacgaaatgtcttaccaaaatgaacacgcagacttttatattttgattcattgtgcttaaaagctatactagtagtgcgtatagaaaagaggaaaacgagattgtacatctcatctatccatatacaaaaaagaaagagggattttcatgaaaacagaacagcagtattttgaagaaggaaaatcaattcaaacatatatgaacgacatgagtacattaaaagaggaaagtttagctgtttatgaacaatttcagcttcctaaagatggactggctgagaaattaaaggctcacaagcttcacttcttagcgattactgaagattggtgcggagatgcgatgatgattaacccaatcattcgtaaagtagctgaagctgccggtattgaggtgcgcgttgcactgcgagatgcggacaccgaattaattgaccgtcacttaacaaacggagggcgtgccattccgattattttaatttttaataatgaagggacgttacttgggaagtggggcccccgtgctcccgaagttcagcaaatcgtcgatgagcttcgtgccacgcttccttcaaaagaagatccttcgtttgaagaaaaacaaaaagaagtcttttcttcgttacgaacaagatataaagaagaaccggctctttggtcgtatgtttataacagctttaaagaaacggtattagctgttgtgaaataacttaaaaaagcaagataaaatgaagcattcattttatcttgctttttttctggttatcccatcaaaatacgcttgtatatcactttaacggaaaggctgcttttaataatgtatgtgttcaaaacgcgcacttttaagtaagaaaatgtacaaaattctaaaaataaaaatattttttattcaaaacgcgtactttttaacttgatgatgatataataacaaataataaatgaagaaaggggacgcgtgaatgaatgtaaaagcttttggttagtacttttaagcagcatttttagagatcaaaatgaattttattttttaaatttaatgaaagcgcttaataactaacttatcagaaaatatagaagaaaggtgttagatacatgaataacttacatagaaaaatgggaacgttttctctcatgatggttggtcttggatctattattggatcaggatggctgtttggggcatggagagctgctcaaattgcaggtcccgcagcaattgcttcttggattattggaatggttgttattttatttatagctctttcttacagtgaactaggatcgatgtttccagaagcaggaggtatggttaagtatacgcaatactcgcacggctcatttctgggctttattgcggcttgggcaaactggattgcaatcgtatcggttattcctgttgaagccgttgcttctgttcagtatatgagttcatggccgtgggagtgggcgaaatggacaggcagtttagtagaaaacgggattcttaccggaaaaggcttggctattgctacaggactattaatcatttattttcttctaaattactggaccgtaggcttattttcgaaagctaattcacttattaccgtgttcaagattgtaattccagggcttacaattggtgctcttttatttgcaggatttcacggaggaaacttctcctctgcaggaggcgttgctccaaatggatgggcaagcgttttgacagctgttgctacgtctgggattgtgtttgcttttaacggttttcaaagccccattaatatggcgggagaagcgaaaaatccgggacgctctattccgattgcagtagtaggctccattttaattgcgaccgtgatctatgtattgcttcaaattgcgtttattggagcggtaaatccttcagaaatcgtaaaaggatggagtcatcttaactttaattcgccgtttgccgatctagcgattgcgttaaatattaactggcttgttattgttttatatgccgatgcttttgtatcgccatcaggaacaggtattacgtatacagctaccacgtcacgcatgatttatggtatggaaaaaaataaatatttgccgaatatattgggacgagttcatccgctttatggagttcctcgtcaagccatgttttttaatctatttgtctcattcatctttttatttttatttagaggctggggaattttagccgaaattatttctgtagctacgttaatttcatatcttactggtcctatcacagcaatgacgttaagaaaaacggggaccgagctttatagacctttacgtataaaagggttaaatgtaatagcgcctcttggcttcatctttgcttcacttactctttactgggcaagatggccgttaactggacaggtattatttattattttaatagggttaccgatttatttttactaccaagcaaaatcaaaatggaaaggctttggtcaaaacttccgagctggcgtttggatgattgtctacttattatgtatgatgacaatctcttggataggaagtgaaaagttcgggggactcaatattattaaatacggctgggatatgggtcttattgcaattgttgcacttttcttttatgcttgggcacttaaaagcggatacaaaacagagtatttaaaagaagcaatcgatgttaataatgaaatgaaagcagcggaagcacagactgcctcagctaaagaacaaatgatagaaaaacaaattaaataagtagtaaaaaagcagcctgaatagttgaggctgcttttttatgaatagattttatttttttgaatactagatagtaaaaaatgctataatgatgggcaaaatcatgcagggggagaacgacttatggatatcgtatcaatcacttcttttttaggcgtagccgctttgcttacggttatgcctggacctgataacttatttgttttagcacaaagcatatcaaacggtaaatatgcaggaatctcgacttcattagggctttgtacgggcctgcttggtcatatagctgcagcaacattgggtctatccgctgttatctatcaatcgactttagcgtttgctattgtaaaatacgctggagcagcttatttattatatctggcttataagacgtttacagcaaaagattcggctctcgctgttgaaaacaaagaagcggttgagtacaaggtgctatataaaaaaggagtgattatgaatctgctaaatccaaaagtttcgctcttttttcttgctcttttacctcagtttgttcatcattcaaccggacacgccacacagcaaatgcttgtttatggagctgtatttttagttcaagcgctgattattttcacgttaatcagtctatttgcagggaaagtaggggagtttttgcgaaaatctccagcgctgtctaagcggcttaatctcgtgcaaggctctatctttacgcttattggcttaaaaattgcttttagtgagaaatagaagaagataagacggtaaacctgctttttatctttattaaaaggcgtggacataggttagttaaagggagatccgaacgataaatccaattcgttcggattttttatgtctatagtaaaagtaggtttcatttatgtagttgcttctagctggtgattggagggcaaggcgaagactcctgcgggaaaagcgaaataggtgagaccccgcagaagcgcaagcgacgaggagtctcaccggccgcccgcggaaagcgaagtcttgcacggaaatcaacagcggtgtaacaagcagtccagctcatgtatcccatttgttcatctttattttgtgctttaaaacagcggagaatacctagcgaaatcctgctttcttgtgtgaattttttcgaatgttttaaggggacgaacccttcttgtccaatcacatatatatatagaatgagagataaaacatcaggcaaagccggtgttaatcacaagttctttcatattatgattgaaaggaaaggttcacatgaaaaaaatatggctagatgcaggacacggcggtacagattcaggcgctttaggaaataatttgcgtgaaaaagatattacgctgcagcttgtactacacgcgcgggcgtatttagaacataactattccgtagatgttcaagtaactcgttcaaccgatgtgttcgtttcattatcagatcgagcgaaccgggctaatgcatggggagcggatatttttgtttctatgcacattaatgctggcagcggtactggatttgaaacgtatcggtatccatcacaagagggaagtcaatcttctcttttacaaaaagagctgcatacggagattttaacaatcatgcggaaatttggaacgattgcagatcgcggtttaaaaacggccaattacgctgtactgcgtgaaacaaatatgccagctgttttaacagaaaacttgtttatcgatacgacagccgacgctgaaaaattaaaaagcgctacgtttcttcgagaagtgggagaagcgcacgcgcgtggaattgctaagtatttaaacttaccttctaatcaagttacattctataccattcaatctggagatacattttatagcattgcaaagaagtataatatcaccgttcagcagctgcagggtgcaaatcctggcgtagatcctacaaaactgcaaattggtcagcaaattgttcttcctgtcactacgtatactgtacaagcaggagatacgttctatagcattgcgaaaaaatatagcatgaccgttcagcagctgcaggatgcaaatcctgacgcagatcctgcaaacttacaaattggtcagcaaattatcattccagctgtttaatatctgtaaataaaaaagataacacggcagcgtgtcatcttttttatttattgaactaatcttacaagcatatgggcaaggtgatgctgctgttctttgtctccaaccttccacagttcgtgaagcaggttttcctctcgattgcgcggctcttcgtgcttagcaaggtaatcagctactttctgagctgttttagccagctgttcctcattcatccctaacttttcgccttttgagaccttgtcccctagataacttttaaatccttcgaagctagagagaatatcttcttttttctcctcgctcatagaattaattgctccttcaacttttgctgaatgatttgtttctacagaattactcatagtttttttctcctctcatggttatatttgggtgttagaaagcatattccctgaggattcagtaaataaacgtccaaatgtgttatttttacattatggcgttttacaaggacttaaaagctggggtcaaacgagattttatcaaccaataataaaatgataaaaagactttgaataaagaaatcaaagtcttttactaatttttatacttaagcatcatacttcgggcgtaggagtaggcgtagcatagccttccttatatttatcatcaatttcttgacgaatgtcttctatgcttttgcctttgctgtagtctactacagcttgagctgctatttctaaacagacgccgcattttgttccgtgatcatcccacgtcactgagccgttttccttgttttcgaagataaaacagtcgtagttgttttgatgattagcttcttctccacatccgcagtagcaaggaatgttttctagtaaggtttgatgcttagcagcagctgcataaataagctgcatgtcttcgggcttgtcactcagaaaagagggaagagtttcactattttttgtttcttctcgtttatcacctaatgtgtgctgctgatgttcttcatgttgtgttgcttcagtacgtttgctgcctgaactttctttactttcgtttccgcagccggagaccacgcttgctgcaaggacaactgttatgacctttgatttcatcatcaaaatattcatcctttcttcaattaaagatagacaataatatgtacatccatcctgttaaaaagacataattcgtctttgaagtcattcatcaactttctgcagaataattttccgatacatacctttcaacatgacgcttgaattttccttcaagataagctgatctcggcttgcttcaaacatatgttcaaaagagagtccaatatccgttcctagtaattttacgaaagggcggaatatttttttaggaaaagccgctgatttctttttggtttcaaatttatcaaaaatcaggatagtgcccttaggctttactactcttgtcatttcttttaaagcttgctccgcatcaggtactacgctaagaattaagcttgctacaaccacatcaaacgaaaaagagtcgaacgttagctgctgagcgtccatttggtggaaggttatagatggatttttgtatttatcttttgctttttgaagcatttcactggaatagtcgatggctgttacatttacttcatgaggaataaaagctaaatccgctcctgttccaacgcctacaaataaaatgcgctgttcagatgaaaagtggacgtcttgaaagactttttttctggctcgataaaacatcccgttattaaaaaacgcatcataaaaaggggcccaacacttataaataaattgattccagcggttattcacgtaaaccctcctagaaaataagctttccaacgcctgctggaaagcttatggattacatttattttttcattttgagtaagcgaaggctgtttaaaataacaagtagcgctgctcctgtatcgcttaagacggcaatccatagagtaagccaccctgggaagataaaggctaaggcgatgactttaacaataatagaaaaccaaatgttttgtttgatgacagctagtgctttgcggcttagcttcatcgtatgaggaagcttttctaaattatctgccatcaggacaatatcagctgtttccatggccgtatcagtaccagcaccgcccattgcaatgccaagatcagcagttgcgagggcaggggcgtcattaattccatctccaaccatagcggtttgatacccttcatgttgaagctgctgtatggcctttactttgtcttccggcagcaaatcagcgaaatatcggtctacccgagactcagaggcaatcattttagctgttccttcgttatcaccggtcaacatcacaatttgctgcattccgttttgtttgaggctttctaaagcagatacggttgtatgtctgatggtatcagctacgctaataatgcctagaacacttttagctgttccgacaataacaatcgttttaccttcgttttgaagcttttcaatatgagaccagcagtgggatagaggtgttcctaaatctgagaataattttgcattacctgcgtaataaaccgtttcttgaattgctgcctgcacgccttttcctgtaaggattttaaaatttaatccttgtaaagaaacgacttttttctcctctgcataatccacaatagcgcgggcaatggggtgattcgaataatcttcaagcgtttttgttattgctaagagctgattttcttcagcagcaagggaaacaacctctgaaacggctggtttgccttctgttagcgttcctgttttatcaaaagcaatcgcattgattgcacctgctttttctaaaaacgttccgcctttaatgagcacgccatttttcgccgcgtttccaatcgcagatacaatggcgacgggagtagaaatgactagcgcacatggacaagccacaactaataattcaagccccttgtaaaaccagtcactccatgcaccatcaaacaggggagggatgaccataatgaataaagctaaaataaagacgataggcgtgtaaatggttgcaaatttatcaacaaatgcttgagtcggtgcttttttctcctgtgcttcttccactaaatgaataattttagaaatcgtcgtatcttcgactagctttgttaccttaatttctaacgatccgttttcgttaatggtgcctgcataaacagcatcaccgattactttatcaactggaatagattcacctgtaataggagcttggttgatactggattcgccgcttataatttcaccatctagcggaattcggtctcctggctttacgacaatcgtagtgccgattgaaatatcttccgctgcttttttaatcagctggctgttttctttcacccatgcttcagaaggagctaaatccatcaaacctcgtatcgagtttcttgtttgttcaatcgaccttgtttgtagagcaacacctaaagcaaatagccaaacgaccgtagcaccttcaagccattcaccaataacagctgctccaagtgctgcaacggtcattaaaacattcatgtctaaagaacggcttttaatcccgtaataagcacttttagccggcttatatccgctaacaatcatggcaatagcgtagagtacagttgtcatataagaagcaattcctgtatgagaaccgataaaacctaatgcgatgagaatacccgaaaaaacaatcggtccattttggcctttatggtgccgcgactcagcagactgcctgctgctggttactaaagtagcggtatacccagctttagatacttctttaataatgtcatcagcttcgttatcgtgctcaatttgtgcttttcccgttgagaagttaacgcgtacatctttgacagcaggaactgtttttaaatgattcacaatcgtgttcgcacaagccgcacagtccattccttcaatcaaatacgttttcatttttttatttgattggataggctcaatgttaaaccctagtttttctactgaggttggaatgagtgacagagctgactcactcgccgccgccacttgaagctttcctgtattgtagttaatggctacatgttgaatatcgtttaatgtttttaaacttttttcaatcgtcgcggcgcaggaaggacaatccattccatatacgcggtattcagccgtttcttctatgtcaccgtcgcctggtactatgtcctgatcactacagcaagaatgctggcctttgtcggtcgttaacgaaatcgtatctgaacagcagctgtaactgtgttcatgactctttgtgccgcaggaagaaggctcttcagtagatgcggcttctgaagaagaggagcagcaggtcttgctttcaatttctggtgaagaagatccgctgcagcagtttccggtatgctgatgattttttttatcttcgtgtttcattgtgtcccactccctatacggtaagaaaaacttaaatggttacgtcttcttttttagcaaacatgatatcaattacttgtttaatatgtgcatctcttaaagaataaaaagctaactttccttctttgcgataattggcaattcctatatttcggagcagtcttaagtgatgagaagcagtggcaactgtagagcctacaatattggctacgtcacatacacataattcctcgcctttatacagagccaagacgattttaagcctcgtttcatctcctaacgctttgaacagggtagaaacaccttgaacagcttcggcatcgatagcaggcttaatacgattcactttttcttcattaaaacaataaatatcacagcggtcttttggcatgatttcctccttcattcaaacattcaaatgattgtttgtttataatatatgtcaattttaaaaaatgttcaaacatttattgatcattcggaatttttttctgagcaaaacataaatattaggaagaataaatatggaaagtatgcctattagtgtatgtactctgtactaaatggtgcgggcgaaaagagaatgactttacatgcaggccaaaaacaaaaagccacccttgtaggtagccttttaatgactttaaaaatgatagaaataatggaatataacttagactttgttcacttaattagtgttttaatcggttaaacaataaatctgctgcattatttaacaccttgtccgactcttttaatcgtttgtccgagttttctaaataggattgagcagataatacaacatctaacggatccttgacattcttcttttcggtacataccaaatgccctacaccatttttccaatgaatcgtgcatttaaaatttacaaatgtatcatcgctcgttctcaaacgcaaatgcctgatgatggggttagatgaggagtgctgtgacagcatccacattgcttgtttccggtcgtctttatgaataatgctccacagactggagactgacgaacaataagaatgtgcttgactagaaaaatgaaggatttcaccttcttgatttaattgaaagtaaggaacggggatccatttaagtatgttactttccatcatgcacctctcccaacttgagtaatctcttttaccatatcacaattacctaatatttgtatgatttttattattttccccatgcttttccccgttttaagctgtaaaagctaaagaattattcagtttaaaacacttgaaaaaagaacatacgttcgataaactaaaaattaaaggagcgaattctatgcgacagctacttcaagaaagctactcttcaaaacgacctgttgaaattatttatatggacgataaaggatgtttgacacagcgatttattattgtgtataaaatttatcctcagagcgtaaaagcttggtgcttactaaggaacgagaaacgaacgtttaaaatagagaatatcctttcatgcggattcagcaataaaaggaaaagcagttttaggcagaaagctcactcaatttaaaaggggctttttcatatcatttcctcttatggcgtgtgagttattttcatacactatatccaccagaaaggggaatgaacatgacattaaaccaaggaaataaaactaaacacatcgctaaagggagaacggaaaaagatgatataacaatgcagggtgagaaaaaacagcatgaagcacaaagtacctctttgtctcataataattgtcgggcaaatcttgatggagattaatctaaaaaaggaaagctttcgtttccgaagctttccttttttgtgtatatcgcatttttaagttaactcgtatttttaagttaactcgtatttttctgagccaatcacaatatagtctctctttcgatatacgaattttacggatttctcataaacgtcgtacgagtaattttctaaaacattgtttttttgattaatatattgcataaaagcgctttgaaaataaccgttctccacaaaaagttccccggttttgcacagcttttcatgtgcttcttccagccattttgcaatttggctgtcgttgttagcaaatgtaaggatgtgtgtatagtgatctgataaatctgtcatatcctctttatcctggtcaaaataaaacactttttctttttttgactgcagcctttgtttatgcaaagtgatattttttaacagttctttttcaacgtcttcttcgggacttatatagatggggcaggtgcctgctacctcaccttgatctgtaaataatacaacatagtacaaatcaaacattatatctctcccttcacgtgttcatactatcctatctcgcatccttcatttttagaatcatttttctgacgtttgtgcaacattggttctaatgtattactcataagcgaacctcagttttaacgggaaagaaaaggggaaatgaaaataaaaattctgcgtttcttcattataattagaaaaaacgatctgtttactagtatttaaatctttcgaaaaatcaaaataaataatgattgatttcgtcactttattgtggtttcataataaagtgtaaaaagaccatttttctttcagagagaaatgagatagagtacttctgtgttgattctttcttttgaatatagtatacatacaggggtatagaaattaattgggaggaaaacatggcgatactatatatgagcataggtattttacttttattaatttgttacagtttttataaacgctatgtgccggtgcagggaataaagaaagtgacgaccgtcgactgtgcttctacaacgatttcgtatgtagatgttcgtcattttcatgaaatgaaacaaaacccctgtcaaaaagcaatccatattccgcttccttatttagagagacagcatgcagaaattccatataaagaagtggtcgtaattgttcctgacagtatttcccgaaatttaagcattcggcagctcaaaaaacatgggtatcaggtcaaaggatacatgtgtgcggaaagatgtgtgtaataaaaagaacagcaaatgaccctttatagggtttccttttggaaagctgcgatatataagctaaaagatacctgtgtcaaaatgggtatctttttttgttatgaagataagaagggggcagggatcggtttcttttggttcaacagctactgagtcttttagcgtatttttatgacaaaaggtttgaaaaatcccttttgtggtaaaaaaaaacgtagttctcctagtgcatagacagaggtttaataggaagttataatttaggcaattacataaaaggggagtaagctaaggaaggtgaatagatgtgcgaaagataaagctgttgctatttctgttcatttgtatagcggttgtaattgttgcgtatgagatgattcgatatccgattgaaaacaatgctgcaagtgtgcagcagcatttgcgaaattgggagcataaagaaagcattgatggttctgcaaggattacgctgcaagattttaaacgggttgatcactctaatacatacatagccttattctccatacctggtgataaagaaggaatggccgtattgaagcaaggatggaacaaacgcctgcgtattgaagtcagtaccaaaatgagcaatttagtggattatgatgatatccatacaaataaagggacatatgcgctgtttacaggaacaaatagaagtaaacaaattgagcgagtaaaggcggctttggtgcacgatacatatacaattgatgccgcggtcccaaaaagtgattattttgtgctgtatgaaaagataccgagtcatattaaacatccgtttccagcaacgacaacgctgctagataaagcaggggatgatatcacggttaaagaatttatggatcaagagctgcgtgaataacacgcagcttttttctataataaaaagctttttaaaaaaattcacgttttgttcatattttcgaaagaaagaattttaagcaaaaaaatcaaatatttgctacaaagtaaaggggaattaacgggcaaaataagtttcatacaggacgtcacattttctttgaaaatttgtcacaaaatattcaattatgtcgatgtgtattgatatatcaatgttgaagcaaacatacaaagctaattttgcagttattcctaaagaaatagttaagaaatgggagctgaatccttttatttacatttattcataccaaattatgtgatagaatatcgcaaggttgaagcactctaaccccattggtacagtcactatattagaatgtttttaatataaaaaaataaagcaaaagggacgaaaaaaatgtcattttgtattacaatagtagtggcctacaaataagggggaagagagtctgtataaaaatgtcgttatctagcgaaagatagcgcattttgaatgttcatcaatataggcttcgcatcatgtgttgttagaaaggagagttttaagtgaaaccaaaaaaaggattttggaagctagtaggtttactatctgcgctttcactagtatttttgagcggttgttcaaagcttgctgtattgaacccgcaaggtcctgttgcaaaaacgcaatctgatttaatcatttggtctatgtggatgatgttgatcgtggttgttgtcgtatttgctatttttatatttgttcttgtcaaatatcgtgaaaaacctgaaaacatggactatgagccacctgagcaagaaggtaacttaaagatggaggttatttggacagcattcccaatcatcatcttaattctattagcagtgccaactgttaaagcgatctattctgcagaagaagtaccggcagaatcaaaggataaagatccaatcgtgattcacgttacatctgcaaactggaaatggattttcagttatccggaacaaaatatcgagacggttaactacgtaaacattccagcggatacgccagtgaaatttgagttgacagctcaagggcctatgaactcattctgggtaccagaacttggcggacaaaaatattcgatgaacaacatgtcaatgccattatacttagaagctgataagcctggttcttatatgggacgtagtgctaacttctctggtgaacatttcactcaaatgcagttcgaagttcaagctcaaacggacaaagacttcaaagagtgggttagtgacgtaaaaggcacagctggtaaattgactgaaaagaaatatgatcaaatcctaagcccaggcgttgttggtcgtcaaacttacaacggtacacatttaaaatggattgaccatgcaaaagatgtatacattcctggcaaagagctagaacgtggtacaggacatgatcacagcaagatgaaagaagacgaaaaaacgagtaatgaagaaatggaaaacatggatcactcaaatcatgaataacattcatttattacactaaataacgtaatgattgggggaagacataatgaagctagatgaatttttcgtcactggcgaacctatgatttacgctgctgatgcagcaatcgctatgacggtcatcggtatcgtttttgtcttaacatatttcaagaaatggaaatggttatggacagaatggttaacgacagttgaccataaaaaactcggtgtcatgtacatcctttcagctgtgttaatgcttttccgcggcggaatcgatggaatcatgatgcgtatgcagcttgcattcccgggtatgaacattttagatgaacatcactacaacggagtcttcacggctcacggtgttatcatgatcttattcatggcaatgccatttattatcggattaatgaacgtagttgtaccacttcaaattggtgcacgcgacgtagcatatccattcttaaacgcaattagtttctggacattctttatgggagcaatgctatttaacctttctttcgtaatcggaggagctcctgatgcaggttggacaagttacttcccgcttgcaggtaaagaatttagtgaaggtattggagataacttttatgccgtttcactacagattgccggtgctggtacattaatgactggtattaacttctttgtaacaatcttaaaaatgcgtgcccctggcatgacaatgatgaaaatgccaatgtttacttggtcaatcttcatcacatcaattattattatttttgcgttccctgtattaacagtggcgcttgcacttatgtcacttgaccgtatattcggaacagccttctttacaatggctaacggcggtcttccaatgatgtgggctaacttattctggatttggggtcaccctgaagtatatatcgttattttaccggtattcggtgtcttctcagaagttatcagtacacattctcgtaagaacttattcggttataaagcaatggtcgtatcaatggtcggtatcgcgttcttaagttaccttgtatgggtgcatcacttctttacaatgggtaactcgccgtcagttaactcgttcttctcaattacaacgatgttaattgccgtaccaactggagttaaaatctttaactggctctttacaatgtataaaggccgtatcaaatttacaactgcgatgctttggtcattagcgtttattccaaacttcgtaatcggtggggtaacaggggttatgcttgcgatggcatcagccgattatcaatatcataacagttatttcctaattgctcacttccactatgtattaatttctggtacagtgtttggctgtttcgcaggtttatactactggtatccaaaaattttcggtcacacgctgaacgaaaaattaggaaaaatttcattctggatttttgttgttggatttaacgtatgtttcttccctcaattcttcctaggtttagacggtatgactcgtcgtatgcaaacttatgcagacaaccttggctggaacggattaaacttagtttcaacaatcggtgcattcttaatgggtctgggcttcttcgtattagtagttaacttattatacagtgcatggaaaaacaaacgcgacactgcaaacgatccttgggatggccgtacacttgagtggtggactaaatcaccagttcaagcttacaactttgcagtaattcctcatgtgaaagaaatggatgcattctggcacatgaaaaaacataatgaaacagaaattaaagcagaagacttaaaaccaattcacttacctagcaactctggcgtgccgtttatctcaggtattttctggtttatcggtggatttggcttagtatttgaatggattccaatggcaatcttcggcttagcaggtatttttgcttgtatgtttattcgttcatttgattatgatccaggcttctatgtaaaagtagatgaaattaagaaggttgaaggaattacagggggtgacaaataatggcagggcatttagataaatcattgccgttagagtatcaagaagaacaaagtcgcctaaatatccttggattctggattttcttaggcgccgagatcgcgttgttctctacgctgttcgtaacgtacttaacgtatcatacgcgcacagcgggtggccctactgcagaagacttatttgtagttaaagattttatgattgaaacactgctactactattcagtagtttcacgatggggattgtagtatttaaaatgcgtaatagtgatttaaaaggacttttagtctggtttgttattacgcttctccttggtggaggattccttttctacgaaattcgtgagttttatatgtacgcagttcacgaaggtgcaacaatgcaaacaagcgccttcttatcaggattctttacactacttggaacacacggtcttcacgtaacagtcggtgtcttctgggcaatcagcattatcattcaattagtaagacgaggattaacacctgttactgctcgtaaagtatttattatcggtttatactggcatttccttgatgttgtatggatcttcatcttcacgcttgtatacttgaacggattggtgggataagacatggaaaataaacaaggccaaaaagcaggttttccgcttagtcatgtatttgggcttatcctttcactagccttaacattcgcagcgcttggtttagtagtgctagctgatctatcaagaagcattacaatgactcttatcatgatcctagcgttattacaagcagcaatgcagctagtaatgttcatgcacatgactgaaagtgaaaatggtaaagtacaggttgcaaacattctttacagtttctttattgccctttgtatcgtagttggtacactgtggattcttgcagcacactttaaccattaaaaataaaaccacttacttcggtaagtggtttattttttttcattcagcttatatttcaacgtttggtactctcccgtatgcactttttttactacttttcctttaccatcgctgtagacattcacttgctcgtacacttcaatacggtatccgccttttttttccgttttaacatgaacttctttaaccgacatatttagctgttccgcttcgtcttcatcagcagaggtttcaacagcacctccatcaagtgaaaggtgagctaagctgtcaaacgactgctgggaattgttatcaacatagcttgtcacgactaaaatgccggcaaaaaacaatactaaaaaaagcgtccggactttcatcttcatcttaaaacacccccgtaaactgacaaaccagcacgactacacctaatatccaaacgtaaattgcaaacgtttttaatgaatgatgctttaaataattaatcatccattttaccgctacataaccaaataaagcagatgaaagagtggcgacgaataaaaagaaaacggaaagctgctcgacttcacctgtgactacatcttttaactgaagtaacaccgctccgcaaatggccggagtcgacaataaaaatgaaaagtaagcggctgtttcacggtctaattttcgcattaacgcagctaccatcgttaagccagatcgagatacagcagggaatatcgcagctgcttgaaacgagccgataaaaaaggcatctccgtatgaaatatgatccatttttttatagccatttttcacggaatcaccaaaccataacagcagtcctgtcgcaagaaattcccagccgatcgttaagccagatttagaaatactgtcaaaatagtctttgaacaaaagaccaatcgcaactgcagggatcgttcctatcactaaaagccctgtgagcttgctaaatggatgacgaataatatgccatagttcacgcttataaaagacaaacacagcaagcagcgtgcccatgtgcagcatcgtatctaaatacaatcctgcatcgtctaagccaaataagtggcgccctaaatacaaatgccccgtgctgcttatcggtaaaaactctgtaagtccttgaatgattcccaaaataaatgcttcaaaccacgacatcttatcacctcatacagcgtgtccttattagtagtgtatagaggaagttctgtgaacatgacaaaaacatggaagtataggcattcatttagtgaaataaatatataaaaataggtcatagtataagaagagacgaccattcttatctccatctcatccacaatggaaagaggtgctgaaaatgatacgaaaatgggttgctgtatgcgtcgtattcgctggttttatttttccggaggcagtaagtgctgaacagccaaaagtagaggtatttcaaattgaaacgggcagagtcgttcgttcaacgtccaaacctccaagtgttcaaaaagaagccgaaaaaagtattgcgtccattactggtttatataaaaaggcaagtccgcttcctaaaaaaggctatcttgttaaagtacctcttgatccagccgtaaaaattgaaaatagtgcggtcaacacgctggcaagtgaagttatttttgttcttgagccaaaccaaaaaccaatcatgatggtatttgacaatgaaaatagaacctatttttttgaatttactcatgatttaactcttctcagaaaagcattacagctataagtcatcgaaatgatggcttttttttacatagacagttgacagtttattatgataaatgtaatatatttagaaaagtcagaaataataagggggagaattatgtgatagctctacgaccgttctccaaaaaagactttaaacagctaatggattggattccctccgagtcatttatggtgcaatggagcggctctagcttttcttttccgcttactcctagacagttaaaacactacattcgatatgcaaatgaagatggtgcttctacgtatgctttttctgtcatagatgacaatgaacagcttattgggcatatttctctggctcacattgattattatcataaaacaggaagaattggccgagtgctgcttggtgaaaagtatagaggaaaagggctttgctcgcacatgtttgaaaaagtgttagctttcggttttgaagaactgggtcttcaccgaatttcgctcggcgtctttgattttaacgagcgggcgattcagtcctatgaacgaattggctttacacgcgaaggccttcttcgagatgtccggcttgtagatggacagtactggagcttaattgaaatgagtatgttagaaagtgaatgggcacagcgtgatgtgcatcaaaaatcaggctgaaatctactagtgaaaagccagcttcccaacaagcaggcttttttgacgtgtgcttaaatttccctaagaaggtataaattttcattcattaaggcatatagagagtaagtgatgtgtaaaggagaccgtatgaatgaaaaaacacaaaatagggatcatagcggcatgtattttacttttaggaaccgctggatttggaattgtctatcaacagcaaacatctgctaaagagcagcctcacgcgtttaatgtgctagttatgggcgtagatgaaaggccaggagatacaggccgctcagatgtattaatggtggtcaacttagatacgagccacaataaagcaaaagttatgccgatccctagagatacgcgcgtgcacattgatggaaaaggaacggatgagaaaattaatcatgcttatcgatacggaggcattcctttaaccgtgcgcacggttgagaacttcttagatatcgatgtcgattattatgtgaaagtaaatatggaaggctttaaagatgtagtagatgaacttggcggagtgaacgttaagaacccgtttccttttgtgcttgattcatttatctttcctgaaggagaaaatgcgttgaacggcgaaaaagctcttgcctatgtgcggatgagacacgaagatccaaaaggagatttaggaagaaataatcgccagcgtcaagtagtcgaagctctattagataaaggaatgaacatgtcaacggtgaaaaacattccaagtctcctcacgcttgtaaagaagcatattcgaacgaatattgatgtcagcgatgcatttacgatgtataacatcattaagaatggccggcctgatttcgaaacggtaacggtaaaaggagaaggacaaatggtagatggtacatggtattatgttgtcaaaccatctgaaaaaaaacagctgagcgctatgtttcaacaaacccattaataaaagagagggctgaagaaattcagccctctttttattcaccaatttcttcttgacgctgcaagcaggaaatttgttttttctctggatggacaccaaatgtatagccccacgtttgcaatttatctagaatgatttcgtcttttttaaagccaaagatcatcactacatcttggttttcatctaaaagcaaatacttttcatctttgcgccacatcgttaagtttgacgcatagaaaagattccagccgttattcatgcgatgaccggttgcttggtttttatagttgacaatcatatttcttcctccattagtgaatctttctagaagtaaaacttcaaagaatattataaacgttctatccatagaaatctattatttatcccgttgaggggaacttgccgtgatgtttataaaatacatgtgataaaagatttagtatataaggatatatttgtataaattgatagtcaataagtaagaaaacggataaaagaagggtctaaaagcgtgtataattgaaaaaaatataagttatctagctttaaagacttaaaaacacgcttttcagaccatagacatgctttttcaaatttctacctacaagaaagaaggcagaagtgcgaaatgtgtaggtgaatctaaatgagtttacggtaaacatgaggccccaaaacgtggtacacgctagaaaagggggaaattcaacgatgtcaaaaaaaacgctatggattaaaaatgcttctcaagttgtaacggccaaagaaaataaaggtcctttagctggaaaagaaatgagaaacttaacggtgattgaaaatggctcagtctggatagaaggagatcaaattgtgaccgtaggtacaacaaaagagctagaacaaaaatatgaaagggaaagaaatgacgcaacgattattgatgcttcacataaaattgtgactcctggcctgattgatccccatacacacgctgtgtacgctggctcgcgtgaagaagaattttataggcggtttgaaaggccaacttcttacttggatttattagcagaaggtggaggtattcactccactgtcgttcaaacacaggaagagtatgcgtaccggatttatcagcagagctatgagcgtcttacgtcttttctagctcacggagtcacaactatagaagtgaaaagcgggtatggcttagaactagaaacagaactaaagcagctgcaaatcgctaaaatgctgaatgatacacactcagttgatgtagtaagtacctttttaggagcacacgtcgtacctcttatatataaaaaagatacgcagaaatacgtcaatttacttattcacgaaatgattcctcaaatttcttcttataagctcgcagcatttaatgatgctgtatgtcttccaaatgctttttcattcaaacaatgtcaagaaatactagaagccgggaaaagatatggcatgcttcctaaaatacatgccgacccctttgaatactgcagaggagcggagctcgcagcagaggtaggagcgatatcagcagattatcttttgtatgcttctgatgaaggattaaagaaactggctgaaaaacggatcgtagccacacttttacccgggaattccttatttgttggaatgaaatggccagatgctagaaaaatgatcgatttaggagttccggttaccctttctacagactgcaatccaggttcatctccaacgacttcacagcaatttgtaatgaatctggcatgtatgaatatgaacatgagtcctgaagaagtgcttgtagccacaaccattaatgcagctcatgctattaatcaaggagataagattgggagtattgaagccggaaaacaagcggacctcgccatttttaatgtttctagctatcgaacgcttcaatatcattatggcttaaatcatattgacagcgtagtgaaaaaaggagaagtagttgtagaaaacggaaaagttttgtaaaacaagtttatagaaaaagagaacagggtaaagaatagagaatttgtcacacatataaaggtagggaatttagatatgattacaaaacaaaatgttattccattactaaaagaagcttgcccgtcttttgagccaagcgaagagttcgatcctaataataaagaagagctgcagcatgaattaaaccgcgttgcggggcatttgatctctcttgaatataacggtcagctcgaacgtgaaccggatgtatttgaagcgattgaacagctatatatagaaggtgaatctgatgtgaaagaagctgttacaacggggatttttcaagcaatgcatgaaatgattatagatcagcaaatcagtccagaggaaattggcatgttattaaaacctaattcactgaagtggtggaaaacgattgaccactttagcgaaaacaatgcggaacagtaaggaaaaagaacgtcatggaaacatgatgtccgtgacgttcttttcttttactgttcttttttcagctggcgttctaaaataaaaggaccaaatggaatgactgacataagaaaggcaaataacgagcggccaattgaccacttatgcgcgaattttacatgaacgactgcaagtgcgtacagcacaaaaagtgccccgtgtgctgcgcctacaactgatacagcttctggcataccagctgcatattttagcggcatagcaataccaagcagcagtaaaaatgaaattccttctaaaattcctactaaacgcaggcgaccgattggtgatgtaagaaccatgttttctcctcccgtaacgacggaataaatttctgtatcaatgacaaaaatgtaccatagcgagctcttcatatacaagcatcatttgtatctgtcacaaaaaagtcgaaaacgctttaatttgctctatagaagtattttgtttaaaaaactgaatactcttgtgatgcaagggataaaagagcacgctacgtgttgacaagttattttaattattttatatgtatagtatcgaaaacgtatgagaggattttttaccatgacaaaccgaaaacagcagagagagaaaattttagatgctgcttttgaagtgttcggatccaaaggctactatgaagcaaaaatgattgatattgctaaactagcgggtgtatctaaaggaacgctttacttgtacttttcgtctaaagagtcgctttatatcgctgtgaacaatcgttcgtttgatgagtttttgtatcatgcaaagcgaagaacggatgaatgccaaacgtttcatgaaaagctgtattcgattgcgaagcatcacctgctctttttttatgaaacaaaaaaatatcccgactctttttggcaagcccctcaccaaatgccagaaatgatgggtcgtcttcatcaattttttgaggattatcacgggcttgttgctaaattgattgaagagcagaaaataaaaaatgcttttttacactcaaaagcgttttgcagcatgttaaatgggtataggatggatatcgtttccgatgatgatataacagaagaagatattatgaactatgcggagttcattgtgaacttatacattgaaggctgctattttgagacccaaaaatgactcgtcggtactggttgataatggagggatatgatgaataccagcagcacagtaattaatttttcatattttcaagaacaaaccgttaccaaggtgaacacagacaataccctgccgttttctcttggatttagtaaaggtggacttgtggcagaatgtccatggagactaaaaaacaaacgcagcatcttgcttggtcaagcggactggaaatcgctacattctgccgagcagcctcagcaagtcgaagcgctgctgcttggccagcacattatctctatacagtggtatgaagatatcggtatacttcgaattacgttttctaatgggtatgcgctagatatgtttcacgacagctctttttttgaaggttgggatttatatggtcaagatggcttttcctttatctcgctgccagggggagcgtgtgaccatcaaatttcagtttgtatagacagctcatcagcacatgaaaggaggtgagtttttttttgcgaaaaactgacccgtgggtactctaaaattgttgaaaaattaaaacgggtctgcagctattaaaggcgatgatgttcaagctgtgaccaaagatgttgtagatggagtgaaaaagttagacttgccaaaagatgtgagcttggacggtggaggcggcagcgacgagacagtggaagtcttccaatctctaggtctagctattttaacagcaatcggtcttgtgtatttaacgatgctcgttacgtttggaaaagcacgtattccatttatcattttatcgtcactcatttttgtgccaatcggttcgttagttggtctagtccttgcaaaagaaccgctgtctgtcagcgtcatgattggattcttaatgctgattggaattgttacaacaaacgcgattgtacttgtagatcgaattacccaaaatcgtgaacaaaaaggcatgacgatccgcgaatcccttattgaagctgggaaaacgcgcttgcgtccaattttaatgacggcatttgctaccattgctgcattaattccgctggcgcttactacatcaagcggaacgctgatttcaaaaggcttagctatcacagtaatcggagggcttacgtcatctacccttcttaccttaattattattccagtggtatacgaacttttcttcgcaaagcaagtgaaaagagaaaaacagctggaaaaagaaacgacataagaactattttctaatagaggaaaatatgaccatgtactatatgttataataaaagtacgttttaaccccttatattatagaaaaagaagcggcgctttcgagcggcgcttcttttttatgtgaaatcattatttacaaaaaacgattaaatgtcttgtatggagggaaagagtgttaacaggaagctttactatatcatcgtagagttatctaaaaaacatacaaagtacaggagtgtcgttttcgtgagttcaacaaagaaagttgtatttatcagttccattattttaaatgtccttttcctaggtgttcttgctttttatgcaacaagcagcagcgcgatgaaaaatccgctgtcatctaaggattcatctaagcaaagctatagagataatccttattacattgaacggaccactttgttcaagcaattaagtattcctaaagagtcaatcgtatttctcggtgatagcattacccagcgctctgaatggagcgaactttttcataataagcagattgtcaatcgaggcgtagccgatgatacaacagaaggggtattgcatcgtctaaaaagtattacagatgctaagccaagaaagattttcttaatgattggcattaacgatttaaatgagcaaaaatctgtaaaaaaaaccaaagccaattatgctgaaattcttgaacgtattcataaagaatcaccgaatacaaaagtctatattcaaagtgtactgcccgtgaacaataaaaaatgcggcgacgcagtggacaataaagatgttatcgcattaaataactatttagagcgtctagctaagaaacacaatgattcttacattgacctgtattcgaaagtatctacacataatcagttaaaaagtaatttcacggttgatggtcttcatttaaaaggccaaggctatgctatttggaaacaagaagttcaggcatacataaaccaataaaaaaagcgctccgaaaggagcgcttttttagataagctctggtaaatgttttttagcatcgtattcgacaagagcatctccgtttttgatgcgctgtaaataatcaggatttgaaataagcgggcggccaatagcagcaacgtcgatccagccggcttgcagcgctttttcagctgattcaggcgttaagtcgcctacaccgataatcggtccatcccagtacttacgcgcaatttcataaagattttgaccgttttgaacatcttcataaaaatccagcatagacggatgaatgatctcaattcctgtttctttaaatgcttctgtatacgtttgaatagctttttcagtgtcgtcccagcgatagtcgggtttatcaagcttatgaggagagaagcgaatcacgacgcgctcttttccaatggcgtcgataacagcggaaatcacttctttcataaacgttaaacgctgtgcaaggtcgcctccgtattcatcagtgcgtttattagaccaatccgaattaaactgatcgattaaatagccgtgagcaccgtgaatttcaacgccgtcaaatcctgcttcaatggcatttttagcggcttgagcgtactgtcctacaacttctttaatatcttcttttgacatttcttcaggctcttcgtagggcttgcggaaacggggcacttggccttgtgctgcaatagcggaaggagcctgaggcttatgcccattgattaacccggaatgactcaagcggccaacgtgccaaatttgagcgataatcgtgccgccttcttcatgaacagcttctgttacagacttccatgaatcaatttgttcttgggtatagataccgggaacgccaggatttccttttgcgcgttcgctgataacaattccttcactaataattaagccaataccatcctttgcgcggcggcggtagtagtctacaacgtcttgaccgactacgcctgtctctggatcagcaaagcatcttgtcatcggtgccattgctgtacgagtgtgtaaatcaaatgcttcaatgtttgttggttggaatagtttttcaaatttactcattttatattcagctccttaagaggaaagtatagctgcgaacgttttgcagcgggttcagtttattgtaacaggggatttgttttatcttcaaacatttcgacttccgaaaaagttcaaaaaaaaagccggctgtctttacagccaacttttacaatattaatgctgtttattaggaagttttttctcaggatgtccagtagcttgaccctgcttgtttttacgctgcttttcttgattatcgttcagcttttgaacaaattcatttgtgttgtccatattatctaaacctcctttatgagtctttccctgttactataacccattgcactcaaaaacatgacgccaatccgctaaaagccgctccatgtctacaccggtatatagaaattaacaggaaaatcgtgtatactgttgtaaaaataacgttaatgtttcgtgagtttataatttcttattcattcatgaacaagaaaaggtgttacgcaatgagtgatttttttagcgggaaagaaatgtcgtttattttgattttgacattcagcgtgtacatatttgtctggaatgtgccccttcaggcgacaaacgccatgatgatctactttatcctgctgtttttgtatacagtcagtaagctgcttttttctcctcagttccggcaatttccgcttgttaaggtgctattgtccattttattcgttcttatgctggctgaaataatcgttgcttacagcactcatagcataaagattacagatttaaatcatattttcgattatttcagtcatatggatttgtattcgtaagttttttagccgtcgttttgctaatcattggcgtatatacagtttgtacatagctggtttaatgaaaaaaggtgcacaaatgtgcaccttttctttatgaatgctgcttcactacgtgatttactattttttcggctgcagcggcggggccagctgcctgttcgaaacttacgttgatttcttttatccctttcttgtagtggtcgtcatgtatgacttcgtcaactgcattccttaaaagagaagcatttaccgtttcttttgctaagcgatacccggcgtttagttccacgagcctttgagcaacgagaggctggtctttcccatgaggtaaaacgactaacggtacgttaaaatgaatcccttcatttacgctgttcatacctccgtgcgtgataaaaacatcagcttcttttagcacgtcaagctgtggaacatagggcgaaataataaaatgctccggtgctttttttatttttttaaaatcagcccggtctcctgctgcaatcacaacttttccatcaaagtcgctaaatgcgtcgatgcaaaggttgaaaaagccttctacatcatgaagtaccgttcccattgaaatataaagaactttttcgtcttttagcttttctagagggaaatcatgagagccgtgacgctttggaaagcttggcccaataaataaacacgagtcatcaaaatgttcatgaagcggctgaaaaaagcggcttgtatatacgaccgttaattcgccttcattgttcataaattgaagcagatttttaggttctacgccaaactgcttttttagcaagctgagcccgtactgagctttttcgtcaggtttaaatggaacgcctgaatccggatgcagaggcatcattgctaagcgttcttttggcattaaaaaagaagcagaggatacaattccgggaatccgcaaataatcacgtactaattcgcctgctccaaacttgtcgtaaaacacaaagtcaaagtcaattttttttgatagtgtatgaacaagcttcagcgtatctaaagacgtttggatgtggatatttaaaaaagcgttgattccttgaggagtttcaggcttgatgggtacaccgcttaataagtctgggtgagtatgtacgatagctccggcgttttcaagacgctctttaaaacgatctgccgtaatataatggacggcatcacctcgatctgaaaaagcttttaccattccaattgtcgggtttacgtgaccttcagcgggaaagttaatcattaaaacgtttgccattttctcacttcactttcgataagatttcttcaagcgtaatcaaatataaggaagttgacaactaatttggttagcgtatttattttccaaagccctatatgtgtgtataaaatgtgaaaaaatataacttttttcctaaaaaataacatacttaatcaaagtttatgatagaattttgagagcagtagagagaaagaatcatttttggaggttgcttattttgagtacgttatcaacaaattcagaaccggttttaaagcctaaaaagaaaaaagcgttcacttacatcacgctgcttctatttattgtattgggctttggactgcaaatcatagcgggaatcggagtagctatttacgacgaggttacaggttcaaatataacaggaattttattagaaggaccatacgccttgctggtcgacacggcgttttttctaggcgtggcggcactatataaacccgttcgcagatttttaaagcctatgtggaacttctcagtattaaaagaaagaaaaacgtatgtatatattgtagtaggttttttaattgtagccgcggtgcagtacgtgatgctttcatttttaaacgtagaaagcgcagatcagcagcaaaaagatttaaatcaaggcagttttaatcaaacgctgctttcgagctggatattttttataagtgtagcagttgtcacgcctattaaagaagagctgctttatagaggtgttttatgtggtttcttaaccaaacgccaccacgtgcttgtgggcattttcgtttccgctcttgtattcggtcttttacatattggctttccgattacagctaccgtcatgggacttgtctttgctactatttattaccgaacaaaatctatttttccatctatgattttacatatgctgtggaatggattagtgagtataaccgtcttcttttaaaagccgcttaagcggcttttttatttggataaagacgcagaatgctttacgcgaattttcccaactattaataatccaagagggtaaaatagcccaaataacagactgtacggaatccacgtatctctgtcccacgtttgttcatatggaatgcttggatacacgataagtgaaaatgtaacggcaataatgcctagcggaaaagttaaaactcggtagttttttaattcaagaatttgagcgagtccagaaacggtcgcataatagtagagagatgttttaaaataaagagataaaaaccacataatagccataattacttcaatgttttttagaaaatccgcaacttcgatccgtcttgcaagctcatagcttggatataaagcaatacgtgtatacgtatttccaagtacaagaatgccaagcaataagataataagcataatgcctccgccgattaagcttcccgtaaaaaaagcgcggtttcgctggtctggttccgctacgtgagcagggaaaacggttagcaatacaataaaagtgagagacgtaatacttgtaaataccagaatagatctgataataggcttaacgcctacctctaacaaaggctgcaaattctcataatgaatttgagggaagatcgaaaaaactaagattaagaacggaataacaaaccaaggaaagagaatttcagcacagcgggcaatcgtttcaatgccaagccgaacgccgacaatcacaattcccataaacaaaatatgaacagcaagcataggtgtttgaataataatgcgagttgttagaaacgagcccacgtaaaacaaaacttgactgcaaaaaagaagagtagaagcgacaaataaaagagagacgaactttcctagccacttgcctaaaatggcttcgtttagttccatgagcgttttattaggataaaggctagaaagtttgatatacatccatacaagaaaaacccctacacctacgcctaaaatagctggaatccatgcctcttgtttagaatcagccgttaagcttccaggaacgactaaaatggtgtcgcctaaactataaaaaatgacgagtattcgaaactgtgctgcggataaattcatctgactatgcacgttgttcacttccttttatttcaaccgactgaacaaaaaatcactaaaaggttttaataaaaaagcaatgccgtctccggggttagggatctccacaccgccgtattttaaactaacaattaaaatacttattgtgaacaaactccaaaaaatttgcttttcttttttactgttcactttttttaaataaggtatttctactaaacaaacagctgcacaaagtaaaaaaatccctaaaaatataagcatgtatcaacctcaatagtaaccctttaaaaatgatgaagggaagttaaagacgcctgtgtttcaaagatagtatcacctaaaaaggcttggtttatgaaaagtaagactaaagccagggcaaaaccgtgttataatgaccaagttgagcgttataatagagaaaaaacagcatgactacaaacaagtagatacataacaaggtaaggatgggagagatatatatggcagatgagctcaaaaaaatgctagatgacaaagaaaaggtgcagcttattatcgccgctgttgtcatgcttggaggcctggtcgttttgttaaaaagtgttgcaacgggtcaggcaatgggccaaaaatggctagaaagtcaagggaacgcagacacagatctgtatcttgaaacgataaaaagctacatacatctgtatcaaattgtgggtggcgtcatgtttggaggaggcctcctcacgttacttcgtgctaagctaaagaaataaagcgactgaaaaataaaagatcatagtccaaaagaagtgtcatatctttttaataacttaaaaaatagtgaaaaggagttatgtatgaataatgaagaaaatacaccggcttatcatctgtttatgatgataggagcgcttgctatgctgatttttggtgttgtcggtttctttattcagtatcctgctacgttaagttttgtgatgtgtattggcggaagtattatatttttgctgcatttatttgaatatatgaaacctaaaaatgaactatagcatcttcaaacgaggaaatctagaagcaaaggaagatgagaaatgcggaaacaccgtacgtatgaaacgctagttgatctttatcaaaaaagcgccaaaattcattatgaaatcgattatcgaaataaaaaatctgtaaaaaaaggcaatcgagctgcagaagatttaaaaaaaattgcgcagctcattcatttatattatccaggcatgctgtttgaatttgcaacactgctgacgaatcctacttatcgaattgacttatgggctgcacatcatattttagaaatcatgagctattcaccaatgcttgaggacaacgcgctttccgtcattgaacgctacgccgacgaaaatgattttacagctttaggaaatcgcatgtggttagaccagtggaaagaaaaacagcgctaaaattgggctaagcaaacaagaataaccaaaaggaagataggtatatgagtctacgtatattaaagaacggtataggtgtcagcattcgagaagcagcaccgaaagacgcagagaaaatgattgctttttacaaccgggtaggaggagaaagcgattttctttcatttggagaaggtgagtttcttacacctctttcagagtacgaactgtttttagcttctgtaaaacaagagcaaaatgctcttatagttgtggctgaaaaagaagagaaaatcactagtatcgcatccatcacctcgtctcaaaaccctcgtaataagcatgtgggaaccctcggtattgtagtagagaaatcttatagcgggctagggttaggtagacagctaatgattgaactgattgaatgggcacgtacgaataaacaaacaaaaaaaatcgaacttgtgacgcgagaagataaccaaagagctatttctttatacagggagctagggtttcaaacagaaggattaaaagaaaaagacacctatataaatggcgtgtactataatacagtgcttatgggtcttcacttataaaagaggctgggacaaaagtatattaagtgaatgaaaatccgaacgatgaatcgttcggattttttcattgtggtgatgaacataggcttcctatagacaggtgcttctagcggttttggaggctcagcggcgcccgcggaacgcgaagccttggacggaaatcaacagcggcggaacaagcaggtcagatcatatatgctaattgttcgtctttagtttgaattgacgtagttatatctcagtctttttgtttattgttttttagcgtccgcaaatacactcatcgcctcgttcataaatttggctaatccttttccatagcggtcaatgttagttgtaaatcgctcatcttgcacatacatttttccaagaactttaaaggcttctaatgaatacgttccaaagttctcatttaaaaattgataccatgtcgcaatagctttttgagcttctgtagaggatggtgacagatcacgaagcgaagctaagtgagtgtagatactttcccattcgtttgacatgtgctgctgttcttcttgtgaaaagctttgtactttttcgttcgcttcatctacccgctggtttccccagcgcttccgtgcttcttcttcgtatggggtatgcgaaaaatccagtccgttaaaccgctctttttcgttcatttcaatcgctcctttttcatattgaatcgttttattaatggttacaatcatttgatcgagccgactgcgtttttcaatcagcatgtttttttgcaaaattaatgcttctgtgcgattaaacgtcgggtctgttataatctcgtgaatttgttttaaggggaagccaagttctttaaaaaataatatttgctgaagcatatcaaggttagccggtgaataaagccggtagccggattcactgacggcatcaggttttaataatccaatttcatcatagtgatgcagcgtgcggacgctgattcctactaagtcagcaacttcttttacttttctgttcattctttcatctcccttctgaaatctactataaaatataacgcagcgtaagggtcaatactaaaaaagaaataattgacttttagtttatatgcatttatatttaattagcattaactatttatgatatgaaataaataagcaagcctggaggaatagatgtgacaaaaagcaatcagtatcttggagagattcgttcgtcgcttcaagtgctatttgaaaaaatgcagcccgaaatgatggagagcctaaatgagcacgagatgactcctacgcaattatttgttctttcttatttaaagaaagtagggagcagtaaggtttctcaaattgcagaactcatggatgtcaaaccgagcgccgtgactcttttagtagatcgtcttgaacaacacaattttgttgtaagagaacataataaagaggacagacgagtcgttgatattaccttaactgagtttgggcatcgcaagcttgaagatgtgctgaatggtcgaaaagccattatagaccgctatcttttgcatttaacagaagaagagctttctatgatggcttctattacgaaaaagcttgcaacgtcagctgcttcttataaagataagcagcagtaacaaaaaagaggagagacacacgatggaaaatcaaaaaaattcaaagcgcacgcttttattaattgggttaattattgcgatgttcttttctgcacttgatggaaccattgtcggaacagctatgccaagaatcgtaggagatcttggtggtttaagcatgatgacatggctgacaacagcctatctattaacgtcgacaacggttgttccgattgcagggaagctcgctgatttagtaggacgcagagtaatttatgttacaggacttattatttttatggttgcctctgctctatgtggaatggcaaataacatgacagagcttattttattccgtgcattacaaggaattggcggcggcgttatgatgccgatggcaatgattgtaatcggtgatttatttacaggaaaagcacgagcaaaatttcaaggagtattcggaggaatttacggtcttgcttctgtcattggtccacaaattggcggatggattgttgattcactgaattggaaatgggtgttttacatcaacttgccggtagggatactcgctaccgtttttattgcactgggacttcaaggaaagaaacatacgggacctgtgaaattcgatgtagcgggtatgttcacaatggtaatcggagtagtgagcttgcttctggctctgagctttggaggaaaagactacgactggaactcttggcaaattgttagtctatttacactggctgttgttgggatcataagctttattattgtggaaacgaaagcgaaagagccgattcttccgatgtatttatttaagaaccgaacgtttacgcttttaaatatcattggcttttttatgagcatcggcatgttcggagccattacgtttgttccgttctttatgcaaggaatcgttggagtcagcgcctcggaatcaggtactattatgacgccgatgatgatttcaatgattgtaacaagtattattggaggacagcttgtttataaagttggaatcaagcctcaaattgttacgggtatgctcattatggcaggagggttctttttattaacaacattagaccttcacactagcaagcttgttgctacttcttatatggccataatcggtttaggaatgggtcttgtgatgccaattttaacacttgctcttcaagaaagcttttcaaaagaagagctcggtgtggttacatcatcaagtcaatttttccgttcaattggaggaacgttcggtattactatcttaggagcggtaatgaatgcaaaatcaggtacgcttcttactgacaaactcgttccatatttaaacacattgcctgcgcaagcaagtgcttttgcggacggatttaaaaaagcgattgatacgaatcctgaaagtgtgctgcagatgctgtttagccctcaagcgctaaagagtattccatctgcgctttcggacagcattgtgccaattttgaagacctcgctaatgagcgcattgcacagcgtctttttcatgggcttagcttttattattttaggagcggtatgcacattgttcttaaggcagatcaagctttcaaataaaaaagccgaagaaaaaccagaagaaggcattgctgaagtagagccatcacattaaaaaaagcgcacaaatttgtgcgcttttttctatattaactagttgtttcattaggcttacgaagaaaagtggattgtttagacgtgtcatacgaaatttgatcaagcaaatacgttaaatataagttcagttcaaaccgatcttccgacacaaaatctgtaagcgcttgcttattatctttccacatggtaattcctccttaattttacatactaatgaatggatttaatatcagaaagcaaaagggaaacaacggcttcattttcgtcttttacggatagaatttgctgatggagatttaagttgtgcacgcggcctttgcacgtttgcaacgtcccatctttatagtaagaaacagttatcgtcccgcttttcgttaattctcgtaaaaacattcaagaagcctccttaaaaaagattacctgatttaaaagccagtcctttcatttgagatgagcaaaagggaattgtatgtactgcaagcgtccctttatattcttcaatgtgtatgaatagatcgaataaaaggttgctagctcatctataaactgtcctaagtttcagaatatactgtcttttacgtatagtgttttttaaaaggattaatgttacatttattatgtaacattctgatgagaaagaaaaccgtttctacaaaacttctctaaaaattacaaaatattcatattcatgtgaaggatgtagaatgaacaaatatggaaggaaacgcgtttataaaa

SEQ ID NO: 12 - DNA, 125211 bp, Priestia aryabhattai
  source 1..125211: mol_type = genomic DNA
agtttccttttacctttataatagcttctccgtagcttgtcattgacgttttaaattcagttatgaactgttctatttttgaaatagattttttcatttcatcgtcccctttgcctcttctatagctctattatcaacaattgtctgctgtttgacaaagtcagtggaaacggaaacattccgcatgaaaacgtacgcatacctgttaaaagaggaaaatcttctcatttgcttagtatttcatcatttttctttgtttcttagggtctcttcttacgtgttttgctcatccaaaaaaaggatttaggagaactttcctttaaaagcggctttacacttcgttcacattccctcgtactaacagcaggatcactatgtgcattaacattaggcttaccttttcttccctttccactttttatccaaattacctcttgccttaaagttaactttaacgtttaagctagttttatagtttttaaaatacaaaaaaggggaaatacaatgctgattaaaagaatgacggtgcagctttctggaggacttcaagctagacatacagctttatttgcacgtgaagcttgttcatttcaaagtgacatttttattgcgaaagatggaaaatgtgtaagtggaaaaagcatcatgaagatcatggctttagctgttcaaaaaggagatgaaataacgttactgacaaatggagtggatgaacacgccgccgctcgcaacctcgaagaatttcttttaactaaacatagataaaaagctgctacactatcccttactctcctttttcataaaatcatagaaagtaaaaatttttttcaaaaaagggcttgctttaaagtcgactttaacgtttaagctagtgttgtagcttttaaatatatcgaatataggcagtgagtctaactgtgttaacaaactggttatgtttatgacgaaaggattgtgtttttacttatgtgtaatcaacatacaacaacatcacgtgttctaagtgcgccttatgcaaaggcaaaattcgagaacacgacaattgaacgcagagaactgcgagcagacgacgttttaattgacattaagtttagcggtatctgtcactctgatattcatagtgcatttgatgaatggggcggcgggatgttcccgatggttcctggccacgaaatcgcgggagtagttgaagcggttggagaaaacgtaacaaaatacgcagttggcgatcgcgtaggagttggatgtttcgttgactcttgcggagagtgcgagcactgtgtgaacggggacgagcaatactgtacaaaaggcgttgttcaaacgtataattcgttggattacgacggaaaccctacatacggcggctacagccaaaaaatcgtcgtaaaagaaggattcgttgttcgtattcctgataacttaagtatggatgcagcaagtccgcttctatgtgcaggaattacgacattttctccgttaaagcactggaatgctggtcctggcaaaaaagtggcgatcgtaggaatgggcggtcttggacatgtagcgattcaatttgcgcatgcaatgggtgctgaagtgacggtattgagccgttctaacaataaaaaagaagaagctctaagctttggcgcagatcattattttgcaacaagtgatgaagcgacatttactgaattagcgggtcgctttgaccttatcttaaacacggtatcggctaacctgaacgtggatcaatacttatccttacttcgtgtagatggaacgcttgttaacgttggtgcaccggctaacccagatcaatacagcgtattctcacttatcatgggacgtcgcagcattgctggttcacttgtaggcggcattcgtgaaacacaagaaatgcttgattttgcggctgaacacggagttgctcctatgattgaagtcatcgatgctaagcaagtagatgaagcgtacgagcgcgttcttcgcagcgatgttcgctatcgatttgttattgacatttctacactgtaaatttagagaaaagcgggcagctaattggattagctgcccgctttttatttctttataaaataagaaaacaaacggtaaattaggctttagatgaaagctcttcctgatacttttgttctaatttatcatagtagtcaattttcgtttccacttttctaaaagctgcgtccagctctctttgtttttccatcattttctctctatgcttttcaaatatctgcttgcgcaaaccgattgtatcatcgccttcttgtgttaattcaacaattttacgtaattctaaaagagcgatatccgtttttcgtaagcaaataataaattctagccactcgatatcggactcgctaaaaatacgatttccgttctcatctctttttataaaaggtaaaagcccttgctgttcgtagtatcgaagcgtatgcgtaggcagccctacctttgcagcggcctctttaatatgatattccattccactataccctccatcgccattcttagtacggcgtttgctttatgtatctaaggttcccttttcacgggtgctttcaactcattttctaggtttctactatacgatatatataatagattcctctattttctttgctatgatatgaggtaactgtataaatagtatcataaacattaaagtaaacgttaaggcaacttataaagagctgccgtgaagtcagcagctcttttcatttttatataaaatacaattaatctgcgaccatcactttacttagttcatttaacaaataatcaagggtttgactgattcgaactgtattacgacttgtaagaccttctgtaagtcctaacataaccatgtgctctcttgctgtttcgatttctgtcattaagacttgcatgacaacgcctttataccacttcacagctcatcacccctttttgctatacatatatctcatatgcggtaatcttaaacctatcatacaggtttttgggggtgaatagcgagttttagagcttaaacagttttattttttataaagtaaatatactaatatacttattgaactagaaagtatcactccactttctgttagaagttaagaaaaggcctcctaaatggaggccttttcttatttcttataaagcagtctaatacaaagccttagcctctaaaatattctctataatacgaacctttctcacactctatctcatagcgcagcctagtttgctttctgtaaagctcttcggacagctcattaaattcaccttctgtgatagatccatgaattaaattgttgaataaattattaagatgttcagttaattcttgaagttttttttctttcaatgaacgtcaccctttaaaataattttcatctcctaaaattatatcaaataaaacgttttcatacgatatatttttttaatgaattatcgtattaaagtgatgaaagtattttttaaccaccgcaacacaatcaaagagctcagataaatcattaatcacatgatttcagcaaaaaataagtggataaagaccgcggccaaaaaggcaaatggtatcaaccgttttaacaaaagcataggatgaaaagaaaaatcaaacgagaaaaggagaataagtatgcactatacaccttattatcatcagtggcagaccccagtgtactacagctggcagccatatagttattatgtgccgaatcactatcacaccagcgaacagtttcagcaaagaaacggtaaattaaaggactacggaccaagaccatttgttattaacattaatgaagcgtcaaagcaaaacaatacgtatcgcactgctttatggacgggaacacatttacaagtgacgttaatgagtcttaagcccggtgaagatatcggcttagaaatccaccctaacgttgatcaattcctgcgtattgaacaagggcaaggcattgttcaaatgggcaaaagtaaaaacaatctaacctttaaacgaaaagtctacgatgatgatgcgatatttatccctgccggaacgtggcatgatgtcaccaatacgggtaccactcccctaaagctttactccatatacgctcctccaaaccacccatttggcacggttcatgtaacaaaagcaaacgccctggctgaagaacattaaaaataagcagagcgttatgcaggattggaacgctttttcaggatcactactaagtaaatagatggatgttgactaaagaagctcgctagaaaatcgttgtactaccttttctagcaggctttttttaaacttgctatacataaagggttttatagccaaggaaagaattatacaataaaccaatctttttaaaccgcttaaaataactgaaaggcaaacaggcgatgaaattattttataaaattcccaaatcaaacgtaaatccttctcttaaactagcaagaaaaattctatatatatctgtagaagcagtcattatgaccatgcttgtgattaaatcttttactgtgacctatgaaaacgacataaatttaatattcaggcagctaaatgaactaaaagcttcgattggcggatttggcataaacgaattgttattttggtttatgataaagtgcagtatttgtaccatcgttacatttgatctttgcttatactttcaaaaaaagctaaaaagaaacaaaagagttttataattcataagctaaagcttttacattggtccattggttttcccatcaagaatctagattcatcgttcggaccttccttcacctaaaatacttttacctcggcctcattttaaatagaaaaataataaaagtagaggcatattacgcctctactttctgtttagaaatctacatcgatatcttcttgaatggttccggtcactttttcacttttaattaattgaccttctttaaatgtttcttcttcctcattcctaacgggtttcagctgcttataagaaggagctgacgcagagcccagctcttttttaagcaaatgaatttcgcctaacagctcggctcttaatgaatgaactaacgattgaaaatcttcttcccggctgtctttctgcccgttttgttccacaagcttcgctacataatcctgaagttcctttgcctgtttggactcatactcatcgcgatttgcagcaagacgtgaattcatttctttttttagcaagtcaatttcgcccaacagctcttttcgaagtgaatgaacgagcgtctccacttcattttctttgctcattttttgcaagtcttgctgtatgagtcttactatatagtcctgcagctcgcttgcctgctgtttttctttcagaaatgaagacacttctgacggaatgtcagcagtgtggattgtgaaatttgcacgttcatctctattacttacggtcttttcccttgctcccatcatatctgctgatagattgccagctgtcagaaacgcatttgatagtaagtaaaatggtgcagccatttgggagcttagctgaccgtaccaatcatctagtgcttccttaaggcgagtgttttgatgactcatatatgctccccctttttaaacgtgaactgcgtttgtttcatgtctgcttaaaatttcaagaccgtataaatttaatttgcgcgtctccggcaagaaaagatgattttcttctctgatttcttccccgtacatattatcaatctgctctgcaataaactgttgaaggataggagccagtcctccaatataaatatatttatagactttatcttttggcgatggaaatagattttcaactttcgttaataaaatttgcgtgtattctctaagcgaagcgtgaataggctccgtgagatctacttttttcccgctattgccgtctctttgctccatttttgctttatggatattggcaataataaattcttctaataaacgaacatcatcaaaatactccagcagcttttcatttcttagcttttcaatatgcttcaaatatgaaatatccgtaagacacttcagcgaatttctgcttttaggagcttgaagtcctgcaggaagcagtgctaggtcaaccgtgcctccgcccaaatctacaattagtgtttcaaaatgtttgaatgcatttgcttcttctctatcttgtaattcaaaatcttttttgattgcccagcgagcaacttcgctttcaatacggcatttgctcgtttcaatgttcacagtgaccgttttttctaatccaggagtcaataccgtcaccgtatgctctccttgaaaacgttcggccatcttctgctgcatttcactgaatttatttgttttcttaagcagccaaatcggaagcatagtcgagaaataattaatcgtcacatgattatcctctttgtcttttcctttaagtatgttgtaataagcaactgaagctaaaaacatcacataaggaatatcagattcagttttattatgtaacttattaatatggatattgcctagcacgtgtttctccgctgcgtctcctactaaataatacttttctactccttcaattgttgtagaaatcagtaaattttgaagaagtaattccgattcatttacacttgaaggaaaatgaccctctgcctgatcttttgtgatttctactacgtttgtaggaatttcatagtaataaccatccactagcgtttgaaaaattgagttaccaaaatcaacgttttgacgtttgatatccatccttgtttctcccctttatcttttcgtgacaacactaataagtatatattttcctcatttgtttgtctaagtatttaaataatttctgttattcgaaattgacaattaattaattttagacggttaatgtaattgaaaagcacttgaaatgcttctttttaccagtacccatttttacaaggaatgtaacatggcacgctgtgacttccccataaattttttgcaatataagccctccaatcaccagctcgaagcagccacatacatgaaacctacgtccaccataacaacaaaaaaacccaaaccatcaatcagattaatagttcggatttaacgtcaactaaaatatttttgtcccagcctctggttttttaaatttattaataacgccatttgtctttttttctttgtggattttctgacagtttactaaagcctatttcttcaagacctttttctaacgtcgctcttgttttgatggttccaaaatcgacgcctaaatccacaacggtttgcgcgatttccggacgtattccggtaatcatcgttttagtgccgataagctgtaaggcttttacaatttgaaaaatattgtccgctaccatcgtatcgacgataagaacacctgaaatatcaaatattaaataactcagctgcagctgagcgcttttttctaaagccgtttccataataagctgcgaacgatgcgtatcaatttgtccaacgattggcatcacagcgattccttcagaaagaggaacgatgggaactgataattcttctagcactgcataagcgcgttttatggtgtccgtattatattcttcatagatttcaacaaatatatgattaagctgatcaagcatcgggtcaatttttttacttacatcaagcatcgtaataggagcaaactgcttctgctgcagctcttctgtaaaaacaccccatatcactgttcgaaacagcgcgagcgattttaacgtttggctcaaagaaagtccgttttccacagccacttttcctatatctgtaccccactgaacgattttctttaaaacgaccgagtgctcttcgaataacgactcgcctaaatactcaatgagttctgctctccattttaaaacttcgctttcttcgtggtaaacaagcttccgcttatattcagagtccattagatcagaaaattgtatcgctaattcctgtttattatcgataattttattccctatatataacaactcatccctcatttttttctttatctcctttagttaacagaattaacgattacattttataacaatagttatatcacatacaatataaaaatataaccgaaatgaaaaaattgttaagccctccctatttacttttatttctactcttctaatcggtatacctaccataaaatgattgagatttcagcgtttgggtaaaaaactattaagaatttatttctatacttataagggggatttttcaatgagcaaacataaaggaaccgttaaatcattcaacgaatcaaaaggatctggatttatcacacccgaagacggatcaaaagaagtgttcgttcactccaatgcgatcgaccgtgaggaatataaaaacctggcagaaggacaaaaagtagagtttgaaatccaagaaggagctaaaggacccagcgctataaaagtacacccagttgactgatagagtgacatttacatacaggttatgggtagactgtcgaatcaaatacttttcgaatcaaaaaacacctcttcgacttttgttcgaaagaggtgttttttatatgatgcaaataattctacattcaaattgaggcataactaaatccatccaatctaaacacgaacaaatgggataaagcagctagtatgaatcacttgttccaacgctgttaatttctctgcaagacttcgctttctgcggggaggccgatgagccttgccctccagtcagcacttagaagccgctgcatatatgaaacctaccttcaccctgccaataaaaaaatccgaatacgtttgattctctatcaagaatcaaacgcgttcggatcttccttcaactaagatacttttattctagcctgttttttaaactacttaattccgtaatattcttcaagcgtaattcctttactcttaatcgcctgcgccactggttttcctacatatcgcaaatgccacggctcatatttatagccggttaccgcgtctttcccttttggataacgaatgataaatccgtattctgctgcgtgggcatcaagccaagttgcttctttagttccgccaaagcagtcttgagcagcacatgtaccgtctccttttgttacatcaattccaagacccgtttcatgttcactcgtgcctggcaatgcgctataagttgccgctttatcataaccgtctctttgaacataggaactaaaaagcgcactttgtgttgcatgtgaacggtaagctgatacgccgagaagggtaacgccttgttttttcgcacccgcaaataactgtgcaatagcagcggctgcttcactgcgcatttttttcttttccgtttgttctttgaatgtaaatggaatcgttgtatatactaaatctttcggaacgtagttttccggaagcttgttttgtttattcacaacaacttgtatgctttcagggttcgaaaccactttcataccagctaatgctcgtacgtattgaccgcttacatagccaaccttaccttgatacgtaattttcagccagccgtttgctgctttagccgttacgtctagctgtgtgcccgctttaagtgttgccatgacagcaccagaagttgaagcagttgttcgaacatttaaattcgccgttgccacatagacagaagccgccggagctggagccggttcagaagaacccgttgattcctttacgtactgcgtgctcacatagcccgttttgccttgatagctcacttttagccagccgttcgctgcttgttctgtcgacgttagctgcgtgccttgtttgaccgttacaacaatcgtgcttgacgtcgatgggccgcttcgaatatttaaatttgccgttgttacataggttttcgtcgttgaatttacatatttttccacatactggctgcttacgtagcccgttttgccttgatagcttactttcagccagccgcttgctgcttgtccaactaccgtcagctgcgtgccttgtttaactgtcgcaataatcgcgttagaagttgatgggccgcttcgaatatttaaattcgccgttgttgtgtacgtttctgccgctgcgcttgctacagttggctcacccgtaaaatttaaagaatgaagacctagagttcctgcccctacaagggtaaaagcaagacctgttaccgctaattttttgtaaaatctttgtttgttcacttctgtcattttttatacctcatttgcaaaatataatagaaatatatgctgctagtttaataggttaagtaaaaacaggatccgatgtttaagctcaaccttaactaaacaacattaagtaaaattattcgacgtctagaggcttaccattacttcgttccagctagcacgtacttttagaataccggataatcgtgtcaaaagtatatcaaaatatttcaaacttgtttccaaactgatacattttcaacaaaaatagaataatagagcagaaacagcaaaaaaacccttacgtttactctcaattgcttagggtaaaaaaataactaaaaacaaagattgagatggtgataaaatgaacacggcagcggatttttcctcaactgcgtttcgagaacctcacacattaaaacagcgtatttttgatacgcttcatttctactaccccgcttgtattgaccaaaaaaacggcgggtatatccatgaatactacgacgacggcaccgtcaaaaacacgcattcaaagcacttggtaagtacggcgcgctttatttatatcttcagtgtaggggctcttttagacgggccggattggtgcaaagaagcagctcagcacggcattcgttttctacaaaacagccattatgacagagagcacggcggatatttttttgaaatagccgatgacggagaagtaaaagatgattccaaacaagcatatggccacgcttttgctcttttagcttcttccatcgcatatcaagccggcattcaagaagcaaaagaaacaattgaacagatatatgacgtgatggaaaagtacttttgggaagatgcgcacagcttttaccgagacgaatgggacgcatcgtggtcggcttcttctttatatcgtggccaaaatgcaaatatgcatatgtgtgaagcgatgctttctgcctttgaagcaacaagagataaaaaatacttagaccgagcgtacacgcttgcaaaaggcgttactcagcagcttgctgaacgatctggcggcatgatttgggagcactatgatacagactggcagccagattgggactacaataaaaacaatacaaaagatgaatttcgtccgtacggctttataccaggacatcaatttgaatggagcaagctgcttttatggcttaatcggcaccgttcggaaaactggatgacagaacgtgcaaaagatttgtttgataagggctggaaccgaggctgggatgctaagtacggaggtctttactttgcgctgtctcctcaagaagaggtcattgatcgagataaaaactactgggtgatggccgaagccatttctgcggcttcactgctcggggtaaaaaccggagacagcggatattggaaagcatacgatgccctgttctcctactgtcagaaacactttatcgatcacacatatggaggctggtatcagctgttaaatcagcaaaacgaacgctacagctcgaaaaaaagcccggctcccaaagtcgattatcaccctgtggcagcttgctatcaaacgctgatagcactgaattatcgttaagataataatcataaagaaaccgttttcttccaaatgcgtttatttcttttatttaagggaatttacttactaacaatcaatgtttctacatttcagaaaaagcacgactatatatatgcaaggagtgaggacgatgtatttttacgcgttagcacaaggaacagattctggagacccagtaacactgcaccatgagaagaaattttcgaaaaaagaatttttagagatgtttaatgaggcattagatgagttggatacgcatccagctccaagcgatgtcggcgaatacctttgccgtgcgtacggatttcaagaaattgaaatcgagacgggtgttgtatgctactgcgctccttttagaaagctagacgactcggatattatagaagaccgtacgtacatggacgccacgaccggaacactaaaatacaactaatcaaaaagaaaggttggatacgtgtgaagaccgtacagaacatttatcgaacgagtgaagctgtaccagaatcgggcgcttacgtttgtgcggaaggtgaaattaaactctttcaaaaagatgatctttttacaccttgcccacacacacgtgaatcaacgacgtggaagcctgtagatgacgccttttcaaccggagaattggttccgcaaaccggtcgctataccgacgaaaacggcaatcaagtaaagctaaaagaaaacgatttatttccaagatgccttcgttcaggtgagcctacgacgtggaggcgcggataacagacaacaaagcagccgcttattaagcggctgcttttattaaaagcttatttaaaaaatgaattcttttttcttccttttagcagatcgcccgtccaccctttcattcgtagatagagataaatggcaacggtcgaaagaacaattaaaatgagcgcataaatatagccaaacttcaaatcaagctccggcatctctttaaagttcattccccaaagagctccaaaagccgttaaaggcgtgctgattgctgtcagcagcgttaaagctttcataatctcatttcctcgatgagtagacacaacttcttctaatttaattaacgcgtcaaattctttttgatattgttcaatcagcgttaagccaatttcaatttttttacacatccgctgatattcgaccgtttggttaatttttttatgaaacgcttcttctattcccatggtgacttcttgaacagaactgattaaatttgtccatataagcaggtcataccgcgctttgtgaatttcatctaacacgtcgatgttattattatggcgaacttcccacagaagctctctgaaatgactttcaaactgatcaaacccatttaagtgttttttcataatttcgcctaaaagaataaaaaaactttccgccgtgttagcagactgcttcatgcgttcaatcattcgttcatgattggtgttctcgaggatttttaaatcgattcctgccgttataataaactcctcggtaatataaaaatgaaacgaatcgtaatttttttggtcaaacgactccttatgataaatcagtgaaccataaatgagctcactttctcctattacatctacttgaatatgattagaatttttcttttgaagctgctgacaaaaccattcatctcttggatactgatagtctttgattatatcagctattccgtctgcttcttctaaatcaaactgataccatttccactgatcgctcgtcacggtattcatactttccctctttccccttttattaaaatttttccctatatacaatcatttaaaacctcacacgcaaaataaacatacatttcatatccatctttataaaaaaggtgctataataaatacgttgcgcacctgcgcgatgctttatcagtttgagaggagaataatagtgaagaaagatatcgctttacgttcttatctgctagaaagtgcaccaactatgacggaagaatggtatgaatctttggacaaaaaatcttctgaaggcgtatatacctctaatgaccctgacgtcattcaatgcttaaaagcgcaaaactatgaatttcatttatatattagcaacatctttatagaagatgaaaaaagcttttttgaatcttttaacacgtggctaaataaagttgccaaagaccagcagcatctcagaacccccattcaaagtattattaaggaatttatgaacgtccgcaaacaatactgtgagtatattcgccgatttgcagagcttcacgatgacatcgctcagcagcacctcgatgtgtggaatgaaaaagtaataagggtatttgatattattattttgaaattcattacagaagcgcaggaatatgcctcaaaccgcctccgctctcagcaggaaatgattcatgaattaagctcacctgttattgtgattaaaaaagacgttgctcttttaccgttagtcggcgatattgatacggcaagagccaaaatgatcctagaaagcacgttaaaacagtgtgcagagaagcaaatcgctcatttgtatattgatttgtcaggagttgtgatgatcgatacaatggtcgcgcacgagctgttccagctgataaatgcgcttgatttaatcggcgttaaatcgattttatcgggcattcgtcctgaattagctactactgcgatgcagcttggtttaagttttgaccatatacgaattaaatctaatcttgctcaagcactagaagatgattcaaaaattgtaattgcttctagcactcattaatatagggatacaaacaaaaaacagcccgagaaggctgttttttattttctatgatgaatgttttcagaacctgattcatctttcgttttcgttttatttttctcctctttttgttcaagtcttatatcttccaacggcataggatcaaccgtttcttcttctttgaaacgttcaaataacgtttcgtcttgatctgttacacgctgttccgtttcatctcttttttttggtgtatttgaaatagatcttttctggcgttctcccatcttttctcctcctttactataggtgaagcaattatgtgttcatgaaatctccgccgttgacatgaagcgtttgacccgtcatataagatgaatcatttgaagctagcagcacatagcagcccacgtgctccacaggatgcccaggtctgcccatcggcgtatctgtaccgaattctcctactttatcacttgagaaagtagacgggataagcggtgtccagattgggcctggcgctacagcattaacgcgaatcccgtctttgacaagcgcttgcgccatactgcgggtaaagccgttaattgctccttttgttgccgtataatcgatcagctgaggatttccgcggtaaggattaatcgacgttgtattaatgatcgcactgccttttcctaagtaatcaagcgcttttttcgtaaaataaaagtatgaataaaagttcgttttgaacgttcgttcaagctgttcactcgtaatgtctttaatgctttcttttggatgctgctctcctgcattgttcacaagaatatcaagctttccgagctcactcaccgttttttctaccgcttcgttacagaacgattcgtctcctacgtctcctgcaatcagcaagcatcttacaccttcttcttcgatgcgggcttttgtttcctcggcgtcgctatgttcgtttaagtaaacgatggctacgtccgctccttctttcgcataagcaatggatacagctcgtccaattccgctgtctcccccggtaactagcgctacttttccttttaattttcctgtaccaatgtaattgtcatcctcataaatagggagaggattcatctcgctttcgatacccggctggcggtcttgcgtttgttggggctgaccttgtgtttgttgatcttgtaaattcattttaatctcctcctatttttgatggaactttttagtatagtctaggtttagccttctgttttgaagttcaaacatcttttttaaaaaaattatgatgtttctattctcttttactatcttagaaaattcatagaaaacaagtttaaagttggaaacaaaggctacagaatgagtagaagatgtatttcagaaatatcttttatcaggaggtttggttggtgtatgaaacacattcaagtagcagaaaaccaagaggaggcagtctgcatcatccgttcttttttaaagaaaggatttacaagcaaagatatttatctgctggcctacgataaagaatgggctcagaatttaacggaggcaacacatacaaaaaagtacagaatggcagagcaaggtatgtttgaaacggcggtaaataaacttctttcaaagatggcttcgctgggcttatccaatcaagaagcaaaccggtataaagaagaaatgaaacaaggacatatcgtggttattggcgcacagagtcaatcaattccctactaaaacagcggaaacgttttttatcagcttataagggtatttagtaaaataaaccattgtctatcaagaaaggaagttataacgatgttaaattatttgggaattcagataggctctctttactttcctactagtgttttgcttatcacgtttcttgtattaatcagcttttttatttatttcctctctagaaggagaaaaaaccgccatgaatcacgtgagcaatcacgaggaaaataaaagagaatgtcaatttaaaagcccttcatgcagaagggctttttgtactataaaacaggcagatacttctcatagcgcgggtttacgtaaaaaggcggacgaggtcctaaaagcggcagcagaaaaggctgagagtcagagttatagattacttctaccgtcttatttgacccatccattagtaatagcttcacttcttcactgtagtaatatcgcaatgaacccaccttctttctcgcattctacactctttatacgtatgcatgagagatcgatctatgtcatagagtgaaagagtgatgctttttgaggaggttgttttatgtgtccaaacaatgaattttatcaggacaagcaagggtatccgatgcagccgaattatggaaaaattacgcgctatgaagatgttccgattacggtccctgaacagcgccagcttcgccagcccgggttagaaagtttgatggttccgcgtcccattatcgaaaatccgcattacaaaggaagcggcaagctaaaaggaaaagttgctctcattacaggcggtgacagcggaatcggagcagccgctgccattgccttcgctaaagaaggagcaaatgttgcgattgcttatttagatgaatatgaagacgcgaaccgtacgaaagcgcgcattgaagaactgagtcaaaaatgtgtgctgcttcccggcgatgtgcgggacaaacaccactgtaaagacatcgtcgaaagagcggtagaaacgttcggccagcttgatattttgtgcaataacgtaggcgttcagtttcagcagatgagtcttttagacatcaccgatgagcagtttgatcatacgtttaaagtgaatatctaatcgcacttttacacgacgcgtgccgctctgcctcatttaaaagccggcagctcaattattaatactgcttcaattgtgacgtataaaggctatgaacagttaattgactatacggcaacaaaaggagccattgttggtttcactcgtgcgctttccaatagcgtgattaaagacggcattcgcgtaaacgccgtagcgccggggcgcatttggacgccgctcattccagcaagcttttcagctgatcaagtaacgcaagtggacaatccgatggagcgccaagggcagccgtttgaacttgctccgacctacgtgtatctcgcaagcgacgactcacggtttgtcacggggcaaacgctgcatgtaaacggcggagagtggatttcttcttaaaaatctcaatataaaaagcgtgaagccaagctccacgctttttcattatttacgggattctttttgcaaaggtgatttttcaatggaacgcgtaaaccggtaaacatcaagctcttgtcctacttctgaaggcaaatacccaaacgttgtgaagctgtccacagattccggctcaagcgatagagacaataaattgttttgcggctgagatgttaaaaagacgtagcttccttttgggaacgtcaccgttttttgcttcacgattgtttgcacgtctacatttggtttgttttcgtaggcttcattttcaatgcggctgctgacattatacgcttctactgaaagagccgtttctttcgttaacttgaagccttttactccttgtccctgcagtttttctgctaactcttcatgtcctggttttaaaagataggcagtcggacgttcgcggacaagcgtcggcgttgctttctttgcactgtagtatgtcacaggaatttttttaacagacgcactttccacatcaaccatttctaacgtggaatttggtatttttttattttcactgtttacaacaattgggtcatggtcatttgcattttttccttttttgacaagcgccgctttttctttggcaatcagcgctttaatttgtttggcatgagcggctgtttgcgtaatgagcttttcttgcgtagcaatttgtgcactcactcgccgcggaaaatcttctcggccaatgccgattcctctgctttcaactaaaaacgaaaacgatggatacaagcctaatgagtttcggccaattcgcggttcaactgagccttcttccacttcaagctgcccttgtttattcacttgagacgtatagtatacttctcctgaatatccttgcttttcaattgctgtaagcgtactgttcacaaacagctcatcagacaccccgcgaatgttctgcggaatatttaagtttcgaccggactgcagtaaaatatcgtgatacttccacacgccttctttaccaatatttttaaatccgctgctgtaaggcgtatattcatgagcgtcaatgacgacttctggtgaaaaacggttaaattcagctcgtacgctctgtacttccgggctttcaagctttatgtagtcgcggtttccatctaaattatttgctagctgacgtttaaatgcataagatccgtctggattaatgcgcggcacaatgacaatgttcactttatttagcacatcttttccaaagtcttctgtcaaacgcgttgcaacagcgagtacggattcaccgcttgccggttcattaccatgaatttgactttgaagccaaatcgttggctttttggatgtctttccatccgcaaatttcttttcctttgaaaaatatagagctggaatgtctcgtccttgctgtgactttccgataatcttcagctttacgtacggacttttatgagcaagcttttggacatagctcatcatttcttcttgagtcgtaaatgcgtcttgtccttttataaatgccggcgttgcttcattcacctttatttccggataaagcgctttaattttttccggctggctatagtcttttccgtaataaggcatctcagcttgtaccgcaagcggagacagcaataatccaatcgacaaaagagccggcacggccgttcgttttacagtttttttcattcatttactcctccccatccccttggttagacattttaaatttttaaaatatttaaaatgttacataaataattataccgtttaaggaaataacttcaaggtcagggagctgaacctttttgactattttaatgtaggagacgagtgcggttttataacaaagagattgggacataacaaaatcaactcaatatgaagacgaccaatcaggataaatgatctggaccgcttttttcaccgcagttgatttccgtgcaagtctttgccttacccttcaatcaacagctagaagcagctacatacatgaggcctacgttcaccatcttaataaaaaaacacgaactattaatcaatttttgatagatagttcgtgtttaaattcacctacaataattttttcagtctctactctatcacaaagtccgcttctgcttttactactccgtttacaataacagaaagcgtatgcgtaccactgtaatgttttcttgtacttaaatctttaaacgcatgcttttttgtgactgtcagcgtttggcctgcttttgcttgaacattttttagcataaacactttttgactgcgatttccttttgcttttacgtaatgaattccgtactctatgcgaagcggcatgtttttttctactgataattggaaggaaaaatcaatgctgtcaccgattgtaatggtatgtggctgtaagctaagccctgtgacattcacaccagggtcatctccatagccaaaaagagaaagagcttctctgtctccttttttcagcagtgaacgacacgcatgtttgacgatccagtcagttttggcgtcctcaccgtgccaccttttcatcacatcaagcatccagtctttttctatataagaaatatcatttaaatgattggctacgcttttgcgaacataaagcgattcatctcgttttaactgttccaaaatcggcagcgtttgtttcggatcttgctttaacgcaggtactgattgtccccatggaagtctaggacggctcccttcgcttgctaatctgcgaatatgatgatttttgtcccctgtccactcaatcatttgcccaagcattcgatctttatcttgaattaaaaacggacgcactgcaaattctgacgtggaaaatggcgtaaaaaaagcaagtgcgtttattgaagcttcccaatcgttcagtccgtacaattcaacatagtctggaaaaatcgtgccttgaagtcctcctaccgttggagccactttatacaggatatgaagcgcttcttcataatccgccggcagcacttcatgcatggaaagcgtaattcttctcatgcgctctttcagccctaagccttcccaatcttgttgaaaaaccagcgcatgaaacgcttttttatcaaatgaactcatttcacgtgaaaaaacgtcgctcaagtgcgtaatcaactcttcattaaatacgcttttacgtaattcttcagccatatttatccctctcttccaggcagtattttattttcttttgaataaatcgcccgctcgtacatcccttttttaaaaatttgcatgaacagctgcttatttttaacttctttaaatccgtactgactgtacaaaccgtgagcatcttttgttgccaataaaatttttcgtacgtgttgaattggctcatagcgaatcatttcttgtaccaacgcttttccaagcccgttgcctcgcgcgtgcggaagaataaatacatccgccaaataagcaaaggtcgcaaaatcagaaataattcgtccaaaccctacttgtttatcgcactcatcatacatgccaaaacaaacggaatgttcaatagacgtttgaacaaggtgaagcggaattccttttgcccagtaagattcatgatgaaggtatgagtagatgacatctatatcaagcttttctttattcgtatgtatggtaaactgctgcttttctttcattctgtatcctccttgcttctctatcatagcacaaatgttcgtaacagaaaaaagccttttgcgttaaaaggcttttttggttaatatgatatttttttagaaacggaagaagtttttctatagcgtcttgcgactatgtaaataagcggactgccaataatcgtcggcaaaaaccaatatgaaaggtcgggaagcttgtttaacagcggaatactgtctccaatattcacaagcagcgcggtaacggctccgatataagaccccagcataccgcgaatatgatgttgaagccagttcttccatttttgcttgcgtgctacatagccgtagatcgctaatccgtatgaaaacacggcaatataaaataaataagcgatttcattccatttccaaatcgctaaaatgatagctgtggcagctagtgctgcataagcaccgtgatacacttctccccatttggtatgccgtccttttttcttagccgctagcatagacaccattcctgaaagcaaacaaatcatgccgagtccaatatgtatacttaatataactgcaaataaatccaacgcgctctctccttttacgtacttctctcttatatcttcggctagcgcacttaatttttaacaaaatatccctattccctttccaactctttacttacatgatgcatatactcgccgttgctggctttattcttatctttgtttccggccttattgattttacaagtctaaggccgattcttgaaaaaggcatcgctccggtgctgcgcattgcgtacagccaaacgctctatttttcttttggcgaagtaattgtatttgcaatgatctttccatacacaaaaaatgtgaaaaagaccgctctgattgtattcagcgcaattacgttaaacggtattaaccttatgattacaatgattgtgaatataggtgcgctgggcgttgccttaacatcgaggtctgcttttccacttttaagcacggttcaaagcattcgattcgcaggttttttagaacggcttgatgtgttttttatgctggctttaatcactggcggcttctttaaaatcggtttgtttttctatgccactgtgctgggcctttcacacgtgtttaaactaaaaaacccttcaccgcttgtatttccaatctgcttagtcgttttgttttattcattgtctcttgctcaaaactatttcgaacacgtatatgaagggttaaaaatcattccgttcactttacatcttccgtttcaaattgtcattcctgctcttttactcgtgatcgcatttttaagaaatcgaaaaaaatacagtccgtcactgtgaaaaatatcgcagaaaattcgtagtatgtccatttctctattggtttcaatctcctaaaattatacaatatagtcaagaacccaaaaggagaagcactatgattggattaattctttctattttagtatttaacgttctttcctttaaaatgaacaagcgcttaacagcaaatcaaattgttcacatttggatgttcaccattgctgctcagcatatctttgacgtttttattaattttaaatttcacggctactggtattttacacctgatacagactggcaaggtatttttgcctatactgttctcattccgccggtgaacatgctttttcttacctactatccttttggcggaaaactcacaaaaaaagccgcctatatcttcgtttggtcggttgctgttttactttacgaagtagttgcccttctccctgctccttgggggtattttcactatggatggtggacgtggtggtattcacttttcttaaaccccgtgcttttttggatggtggtacagtattaccggtgggtgtgtaaaatcgaaaaaaaagcaataacttaaaaatagaatagcctttggaccagcacatcatcattttcagcacgtgcaataaaacgaatgtctcttctccgctggctattctttttctgttaaaaaacgtctttggacaaggaaacttgcttttctttttcttttccaactaacgaaacaaggaatcctgctattccagctatacatagaaccaccaatagaccagtagtacctactaacaagctcaccgcagctgacgctaacattcctccaatataacgaaaagtggaataaatgcccgatgcagtgcctgattgctcttttttgacagattgaatattcatagcctgcatagatgaaacaccgatccctgctcccactcctcctactaataaagatacaatggtataagaaatggaggcattcgctaagtggaaataaagcatcgccgcaagcaatgaaataagaaacgataatcgtatcggatgttctttccctgccttttctgctaacaatcctcccacccaagaagaaatagacatggctaatgaaaaaaagaaaagaagcaaaccaattaaacgaatatcatactgcttctctagcaaaagcggaacaaacaaaatggtactatacatcataaaattactgcatagaatggaaagatttgaagaaaaaaagggccgaaccttaaaaagcttaaaatcaatcagcggctcttggaccttgcgttcttgcacaatgaaaagaacgatagacgctatgcatataaaaatagtccaagcattaaacaaatcacggtgcgtcagcattagcgtaaagctcgtcatgcttattccaagtaaaaaagcgccccctatatccagcatttttgctttttgttttacggtagacggcacgtatataaatgaacaaattaacgatagaacagcaaaaggaacgttaaaccaaaaaatcgacgtccacccaagatacttaattaaaaaggcacctaatacaggccctacagctgctcctagccccattgataatccaaataacccgagcgttcttccaagcttttcttttggtaaactgtgtctcataatggctgttgcgttaggcgtagctagtgcgcctcctaatgcttgcagcgttcgaaagaccgtgagtgaaagtaagttatatgaaaacacacaggcggcagatcccactagaaaaatacttattccagctacaaacatagttttatttccatataaatccccaagtttccccgcaataggttgagcaactgccatcacaattaaataaatagttaccactaccgatacatgtacgatggaaagatgaagcgctttggcaatagacggtaagcctaccgcaatcatagtggaattaacgggaattaaaaaagttcccgttaaaatagaaaagataatcaaagacggcttactgctgttcaatcgtcaccactccgttagttccgtctacggtaacaacatctccgtcttttagtagatccatagctacttttgtgccaagaaccgctggaagtttatattcacgagccactgttcctgcatgagataaaattcctcctgcattggttacaattgcgccagcaagcgaaaataacgtggtccaagcgggtgctgtggtttcacacacaagaacatctccttgttcaagtttagaaaattgacttggatctgaaatgatttttaccactcccgtataaacacctcttgaagcggcacttcctttaaagattttttgcgcttcatctacttctggagaccccatttttccgaatactcgctctaataaaggatcttctcctgtttgaggaggcgtgccataagcaggcggcgtttttttatgacgattctcttcaaactcctgctttctattgacgataagttcatgagatgccacgggcgtttttaatacttccagcaattcatcataataaaaatgaaaaatatcttgaggctgatgaatcacttggtgatcagctaaaagagttcctacattcagcaaaaacagtcttgctgtagcaggcagcatcgcatcgatataaaaatgatgatcttcatctaacccccatgcatctaatgcccagccgtaaaacagcttaaactgctctttttcttcgcactccggcatttttgcgagtacgtcacgatagctttcttctctcttttttacgacttcttcataatttttcttgaagtcgtaatctttacgcacatagccagcaataattgatagcgcatgtaaaggattctctacccacgtctcatcaataaactcgtgcgaatttgcagaacgatagccatactcattcaaaaagctttgtagattctttaaaaattctcttccttcagctgtgcctaatagatttgcttctatgtcttctgacttctgtgccgcaaaagcttgttttaattgattagaatctttgactttgtcagtgagttcccacagtgcttgatccgtttcaagtgacttgttcattacgccttccagcagatcatatacgtaagcggtattcacgtctccagtcaatgctccatatagctcttctaaaatcattcctaaatcacttcttggcatgacaatttcaaagtgaagctgccaagcttttttataaaaatcatgcagttcttttattttttcttctgcttcttttaaagataaaggacgttctgcatttctttttacttccgtataaaaaggtaaaaatacctcattaacgtactcgtataatctaggtttaagtcgaggcaacagcggttttactgcttcttggtgctcctttaagcgatcatttacgtcaccgggaaacgggatattttgctgatacatttttccatcagctaatttcactacaaattgatagataggcagttttaacgtttcaaaaccttgcttagttccatacgtcattgccggaagctgaaaggaagcgtataaaggacttagtgcatgtgcgatatgtaggttgtcttgtacccaaaagcccgtttgtttttcttcctcacttaaaaataggtcattttgaaatgcaggtaatacgttcatttgatttcccctttccttttcattatgtagtaacaggtctcacttgaagcaaataaatatgttcattctttatggcaaattcaatgtctacagcgtactgacaatactgctctacttgattcgttaaacgaagcagctgtagtgctgtttcatctgatatagaaaatttatttttttctttatctgttgtcacagcttttgttattcctgtaaagcctgacactagcttatactcttttaatcctagttctttcattatattttttgtctgtttatgaataataaataaatccggcgtaacaccacctgatacaattccctctcctaagccgtacgccacgttaatgactacttcatcttcactttctgtaataggatttacgctgaaaatcactccggatacatcggcttcaaccattccttgtacaaggacacccatctggggattagaaagcgaaatttctttatcttcggcgtacgcttgaacaacggatgaaaaataagaagcccagcatttttttatacttgtcaaaagttcttctctgtttcttacgtttaatatcgtttcatactgtccggcaaaagatgcattctccaaatcttcaagtgcggaagaagatctcacggctacggcttttacaccagcaccttgaatattggcatacgaagaaacaatttctttttgcagagctaaaggaaacgtgccgctttgaatcttcttttctatgacgctgctatcttctgcttttatctctatttggttaaacgttaaaaaggaatgtaatgcgtgagatgttaaaacaaatcctttagggatataagaaacgtgctgaatcatttttgagagattgtaagcttttgaacctactgcttgaagttctgcataacatgctttttctaaagagacgatgtgcaatcacttcacctcctttcatttatatcaaaaggcaatcaaataggtaaattccattaaaaaccattatatagttttatacaactacgtctatttttctaaaacttaacctaattttaaatatctttacaaaaaaatcacaaaccatattcactagaatatgatttgtgattttttttataactaatacatttgaaattcgtagcgttttgactaattaaactgtatctctatccttcttctccctcacaaactccaccacaggccccacaataatacaaatccctgcgataatcagccagccaaacgcaagatacgtccagcctttaaaaaaggaaagcgtgtattgatagcccgttaaaaacatcacgcctggaaacaagaggacaaacaaaaatgtaagtcccagcgcccagcgcgtacaaagcttttcgtctttatttaactgttgttgtggatccatacgccacttcctcccttaatggttcatctccatgttcatcaaagcttttgaatttgtcttttagttcatcaaagtcaaattcttttttagcaagcagaccgtgtccgattgatataactccgctgataataaaaacggtagaatttccaataagcattggatacagtccgccaagggcttctacatcaatgtgacctttaatcaagtaagcagacgtgttccatgcgacaacgccgccaatcattcctaaaagcgccccgtaaaatgcacctgtgttcgtcgcttttttccacatcagtccaagcgtaacgggaataacggctccgctgacgaaaatacccatggccatatacacaaacccaaggctaattcctaagtaaaacagtaaaatggaaaacacgcccatcgccagcccgaatccaagcgtcacttttcgcgacgtgctcaagatttttttactgcttgctttcgggttgatagaacgcaagtaaatgtccgttacgataatatttgtgatcgccgttaattcagccgctcctgtcgacattaccgccataaacagcatcgttaaaaacaaaatagaacctagatttccaagcacgtgtgatgccataacgggcgcgatagaatccggtgaatctacagcaattccaagcccagccgcacttacacctaggaaagtggcaacggcaaacggaatcgaaaaccaggcaattccgccgtaaatatatgcttttgaagcagcgctgtttttacttgcgatggcacgctgccagtatgcttgatccacaaagaccgtaccaaagttcccgataatattaatcatcccaaacaaaaggcccggcaccgacgccatcgtaagcatatgctgtgactgaggcagatttttcagcccttcatacacgcttgttacgccgaacttataatagacggcagcagcaaaaataaataaaataatgaaaataaaaacggtgttaaaataatcagcaacaaatgaggcttttaaaccgccaatcatggtgtagatggtaaacgtaagaggaattaaaaaagcggcaacaaaaatattcatcccggtaagagagtttaaagcaatggctcctcctaaaataaccatggcggtcacaataatatttgtcataagagcaaagccaagcattaaacgatgatttttcacgtcgaagcgctgtgcaataaattctaaaaacgtatgagcgttcggcgcttttttcttcaggttaatcgcgacaatggcaaacagcaaaatttgaatacttgctcccgctgcgtaccaatacggtccgctaatgccgtactgataccctgtggaagaagacatcattaacgtagcggcccatgtccatgcagcaataatggatgcactcgccagcccaacgcctacatttcttccggctgtactaaactgctcagccgtcatttcctttccttgacggcgctgcatcataattgtaacggccgtaaagcctcctccaaaaatcagtaaaatcaaatacccgacgcttgatgaaagcatcttatccctcctcttaatgttagatttactaacactaatatgtaaataaaagtaacatttgttaataaaataccacatcgtgaaattattaacaatactgtattttctgattattaaagagtataattagatgttttctccttttacacgcaaaaagccggcacatttgcaccggcttaagcgtaaattttcgttttcaacatctttttttcctcacatgaacgaaataataaaaaaaacgatagcccttgaggctatcgtttttttattattgagacaccattactttttggcgaacgtgctctaagtgatcacgaaccgcttctgctgcttcttctggctctccatttttaatcgcttcaaaaatacgctcatggtcggcatccgtttgcttgcgattttctttttggcttttatttaacgaataagcaagcgcttttcgatacaaatgacctaaatcttctacagcatgaagaaggaatgagttatgagcagcttttacaatatcatgatggaaacgatagtccgcttcatgtccaatttcttcactgttatgaaccgtctttttaaacgcttctaacgattctttaatttcaatcagctcttcatccgtacggcgcagcgcggctaagcttgctgcctgcgactcgatgataatacgcatttcaattaattcaagaacttgatctgcttcaaccatttcaaacgtcattggatcaagcatgccaactaagtttacacgttttacgtagcttcctccgccttgtcgtgattcaattaatccgctggcagaaagaacgcttagcgcttcacgaattggtgcgcggctcactccaaacattttggataactcatgttccgacggcaaacgagactctggcgggaacgttttctctttaatcatcttttttaattgatcaagcacttgactagatacttttttacgctcaataggtacaaacatacttttattcctcctccaagtaattatctctctctttttttagttttcatcggacccagattaactatgtgtattccgatttatgtaaacgcttcaatctttgtattacaagtatacattatttcaattcaaatgtgttgataaaattttactattattgttattataccatgaaaacaagttataaatgaataacgattcatgtttttttgacataatatcactatcttacatataatccgtatacaatcataatcgccgcgtccgccaatgcatgactaataattgccgcttcggcaccatatcgctcccttatacacgcccacattatacctgctaaaaaaacgcctgcagccgagatccaattaaaaggaaacgcaaaagcgggcagaataataaacaggtgataaagcgtataaaagcttgatgtaacaatggttgaagcaggtaaggacaaatccttcttcactttattctgtatatatactcgccaatacatttcttctaaataagggttaataaaaatcaaaatgacggctaaaatgataactttccatccgctaaatccccatatttgcaaaaccgcttgcatatcttctgcatgaaagattttaccagaaaaaaacaggctgcttccaattatcacagcggcacatagaactccgctcagagttcccacatacagagatttttttgtaagcgctaccttcaagttaattttattattcgcatataaaatcataaacatccagccgtaaaagcaaacaaatgttaccaacacattttggataagccacaaaccgaaaaaaacaaagattgttggcataaacagcaaaaacaaaaattttatcatgtttatggcgcaccttctttaagagcagcttttcttttacctagtaaacctttcgtattcaaaaggtttactatcttttatcttataaaagtccgggggtattttcaattattttttaattccctctccagcttacgaagactttcagcaagctttttcttttcttcttcaaagtgagcattgtctttaaaagcaggagctgaaggcgctgtctcttcattttcttttagccaatccggcgtcaattccttgcgaacaacgcgctttttattagcgtaggaaagcggctttccagtctgttggctcgctagcgtacgctgtgatgttacataatgcttatgaaaaagatgctgtttgatataggcaaatgcccgaatggtatcgccgctgtatttaggcttgtagagatcaaatgcttcatgcagtccagagagcgcatcttctacaggtatttcgctttttgcgacttcgtacatatgctttaaatcgctggctgaaggatacactcctcggtttcttctagcaataaaagcggcttctaacgtttgtacataagcgtcatgagcggcttcttctctttttatttgatttgtattttctgctgtagtctctgttaatgacgccttcactgtgactggctccgctgcttcaatttgactttctccttctgtcaaattgacatcttcgagctcttcaaattcatcgcttggcataagctcttctagtttcttataatcaatccggtaccagaccgtgttgttaaatttagagcgattgtactttccttttataatcaaaccttctttttcaagttttgaaatgatgcgttgaatcgttgaaagcgaccaaaacggaaactgctgcagccactgctgatttgtattataaacccacgtatatccgtcctgcacatttacgcttttttcaagccagtagtgaagctgctgaagaaacagcgctccgtttactcctactttaactgcaagcgccggcagtacgattaacggctgatcttttaataataatttactcattatatcatctcccttgttatgtaaaatagctactatatatatacaaagaaaacggaaaaatggggatacgtctttaaaattatgttaaaatatagaaaaaatgaggtgagcatatgatacgtcaaggcagaatcggcgatgaagcaggcatcgcgaatgtacacgtagagagctggaaatcgacttataaaggacttgttccggattcttttttagattctttgggcgctgaaaagcgaaaacctctttggaaaaagcagctggagtcaaattctattttcgttgcagaagaaaacggtcaaatcgtaggcttcgcttcttatggtaaagaaagaaccagcaagcatcctaactataccggagaactgtatgccatgtatttactcgcagagcatcagcgaaaaggaattggaaaagcgcttttgcataaaatagcgcaagagctggcaaaccaacatatacatacgatgctcacatgggcttttgaacaaaacggcgcctgtcagttttacgaagcgcttggcggaaaaagaatcgatcgtgctgaggttgttattgagggtacatctctatctgaagtggcttttgggtgggacacgcttaaaaatttgtaagacaactctctggacagatttttttcttcacggtaaactgtttggttggtataaaaagaaaggatgacttaccgtgacgaattctatttatcgaaacattattttgctggttctttgtgtcacagcgggtatcgtcgatgtgattggctacttaagccttggccatatctttaccgcaaacatgaccggaaacatcgtgctgctcgggctagcaatcggaaactctcttgaaacaactgtttttcattccctcacagctttaggaggttttattgtaggagttgtaggcgctgcaatccttgttggaaacaaagaaaaaacgttttggcctaaagccgtaacgatcgcgcttggaatagaaggattacttttacttgtttttgcacttttatcttcgttttctccttttttacacttaacttacttgtttattttcttattaagctcagcaatgggacttcaaacaacggctgctcgaaagcttggcgtagccggaatttcaacaaccgtattaacgggaacgcttgctaacttctttgaagacgtaacggcacgtttgcgcagccctcgctaccgcaaaacgtttacaaccgatgctattcttcgcgcgctgtctcttgtactttactgctttggcgctgttatcgccgcacttgcagagcctgcttataaatttgaaattatttggcttcccattgtgattttattagccattatcatttttgtcagcacgaagtttcgttctgattcagaaaaataataataaaaaaggctgggacaaaagtattttagtcaaaggaaaatccgaacaagtttgattcttgattgagaatcaaatttgttcggatttttattagtatagggaacgttcatatatgtagtggcttctagctgttgattggagggcacggctcacctagtctgcggaagcggaaagcgaagtattgcacggaaatcaacagcggtgtaacaagcgaacatactagatcatttatccaatatgttcgcctgtaggttatattgatttagttatgtctcaacctttttcattttcccgctagcgccgctaaaacgccaaaaataattgccgctacaggtcctacaatgaatagtccaattaaaatggatcgtatggcttcccataatgaccgcaaaggatcttgcttagactctgctttttccactctttcctctaggtgttcgactctttgctgaagcttcgctaattcctgcgtaacatctatttgttcgctcatcgctcaagctcctttttactctacattaccatatacttccttactaaaactactatttatttgtgattacttcaatgccgatttcgcggtaagcatttaacacggtttcgttcacatgttcttctgtaatgagccaatctagggagtttgctgagctgaacgtgtacgttgacgatgtattgagttttttagctgtcacaatagccgctacttcactcgcacttttaatcatttggcttttaatgtgcatttcttcaagcaaaggaatgctcatgccaattttagggtcgattgcgtatacgcctaaaaaacaaagatccgctcgaatttgtttaagcgtatcaaccacgctttgtcctaccgtgaccattgattcttttcgaaacgttcctccaagagaaacaacttctacaaaagcatgctccgctaatgcaacggtaattaacggactgtttgtaataaccgtaacgtttaaattctttggaaaagatttgacgagctgaatatttgttgtacttccgtccatcaagagcacctgcccgtctttaattaacggaagcgccgctacggcaagtgaatgtttaacatccatcaattcacgttttcgctctttgtaatcaaccgcagacgttgaacgcggaagtgctcctccgtgtacgcgctgcagcagaccaagcgcgtccatttcccgcagatctctgcggattgtatcttctgaaacgttcagcgtttggctaagcgtcgtcgcaacaattcgcccttctctttcaagcaaattcataatttgtttgcgtctttcttgttttaacattgctggttcacctgttttctttctgctttttactttattatacttgtttcttttgtaaaaacaatgtaaaaacacttgattatcattgttttttcgtttattgtaagataatcaagataaaacacgaaaaaacaagcaaatacagtcaaggggagattttatatgaagatgatttttacggacttagatggaactcttttaaatagcaatagcgaaattagcgcaatgaatgcacaagccattaaaaaagcgcaaaaacacggagttgaagtcgtggttgctacagggcgcgcttatttcgacgtgcaggaaattttaaaaaaagctgagctttcaaatctttgggtgattgccgcaaacggagcgactattcatgacccgaacggacagctcagacattcagttccgatcaatgtccatcacgtaaaagaagcgcttcagtggctggatgcaaacgaattttactatgaagtgtttgccgaacatgcgatttatacgccaaactcaggccgtgagttgctggctattgaaattgaccgggtaaaaagcgccaataaaaacgtggatgaagaaagacttcatcacgcggcggctaagcagtacagccaaactggatttgcctttgttgcatcgtatgaagatattttaaatacaaatgctgagctttataacatactagctttttcatttgatgatgaaaaacgaaaaaaaggctggaatcattttagcaagcagcatgacatgacgcttgtatcttcggctgatcataactttgaacttgaacataaagacgcgtcaaaaggaaacgcattaacatacgtggtaaaagagcttggcggctctcttcatgatgccattgctattggagacagctttaacgacgtatcaatgctgcaaagggctggaaaaggtattgccatggcaaatgcacacgcagaaattaaggcactcgctgatgacgtcacattaacgaacgatgaaaacggagtagcttccgttattgaaaaagtgttagaagcacagctggaagcacattaaaaaaacgcttggcgtatgccaagcgtttttaaatagtcaggcggtaaataccgacaaaccagctgaatagcgcaactaaaaacaacagccacgcgctggttttctttcttttttgccactcaattgctcctaaaactagcatcgttaagcctagaagtatatttaaaaacgaaaggagctggtagctgtaagtaagcatgatgtaaagagccagtccaacagtaataattgaaagaacaagctgtaatgcttttaacaaaaaatctctccttacttgtaattcacttcttcattcacacacgtcactaaaggctttttttcaagacctaaaagcaggttctggacggctaaatccgccatgcgattgcgcgtttcgtacgtagcacttccaatatgcggtgtcactagcacatttgaaagcttcagcagcttgtgatctgccggaagcggctctgggtctgttacgtccagtgcggcatacgcaatttcttcatttttcagcgcttcgtacagtgcctccgtatccactaatcccccgcgcgctgcgttcacaaaatacgcgctgtttttcattgctttaaattccgcttctccgaacatgcctttgctttcatttgaaagcggcactaagcatacgatacagtcagctgtgtgaagcagctcttcaaataaaaggtatacagcatcaagctctttttcggcttcatgcttgcggcttcggttgtggtaaacgatgttcatgcccgatgcctttgctcgtctggcaacggcgcttccgatatcgcccattccgacaataccaagcgtttttccaaataaatcaacgccaaataccgtttcccagtttccttgcttcactttttcatagccttcatgaatgcggcgagctgctgacagcaagagaccaaacgttaagtctgccgttgcttctactaacacgcctggcgtattactaaacggcaccccttttttggtgcatgcttcgacatctacactgtcatacccgacgcccgattgagaaataacgcgcagattcggcgctgcttctaacagctcttcgtccactgtgatgtggccgatattaaaaaagccgtcggcatcacgaagccagtcccgcagcgtttcttgtggaatctttccttctccttcccacatttgaatatcgcagtgctccgctagcttctcgtaagcgtttggccacgtttttccagacataacaactttgtatttccccatgtgtatctctccttttccttgttcattcatatgtatgaatagtaactagctatcctatcataagcctactacaaagatgaaactttttccattcaggaatcgtatttatagacaagggggaatatgaatgtttgaagatgaaatgatatttgaagatgatccgtccggagatgacattgtttttgaaggtgatgctgacctaagcggaggcgcttttttactggaatgaggcatttatacagcaaacgacctatttgtgccttttttccattctacaagaacgttattcaatacaaaaacataccgtgtaacacattcatttaaacaggcaggtgattttatgtattctccttattcaggcagcggcctctactacggacattacggcgaagcccctcattcgcaccctattcaaacaatactggcgcaatactggcacgaaacccactatccaggtccgcacaaaaaatatgtacacgtgtattatcttaacccggcttctcttcattattatccaacctatcaaaggtttttgtaaaaaaatggtgtttcaattgagtttttattgtaaaattaatccatattattatttattggaaaggaggttaaaaaacagtgcgtaattctacagcaaaaaatagtgtgatagtcaccactttgctttctgccctatttttctgcttcattttggttcttggttcgctttctcctctagcagattcaggccccaacgttaatacgttcggctcaacagggctgtggttatctcttggcatggttctatttttatacctattgcctttagctttttatatgtttggaatcaatttcttaaaatttgtcatggctgctttttgcagtatcggacttttaatcgctgctagtactctattactgatgccggctctgtttttgttcggattagaagatttctcaggaaacttatcttcaattataggaataatgatttcttgtttaggtttgctgattacgaatattgtgtggtttgttgctgcgtttaaaagaccgtcagccaccttgcaggaaagcgtttaaaatggtgaagaggagccgctactgctcctctttttatagctcggtaagtaaaaagtgtacatataacgaagtagcatttgtgcttactgttttttatacataacatcaaatttcattacatatttttatataatgaaagaccaattaaacggaaaacgatagtagatacgagattgaaagaggttttgtttttggtgacgttatttttaacaaatgtgctgctcggtctttcgattgcccttcccgttggtacggtgacgattgaaatgacaaagcaaggtttaaaaaacgggtttcttcacggatgggttgttggactcggaggaatgacggttgatttattactaattgtgcttctttattctggactggcttctgttttatcggctccttttatacagattatgatgtggcttataggggcgctttttttactttatattggctatgacagcattaaacatgccgaccatgatataacggctcctggggaacacgtaaaaaagtcgtttgcctcttcttatgtgaacgggatctttgttgcgatttctcctagcaatctcattttttggctgagcgtgtttggaacggtgcttacaaattcgcttcaatcctctcattcttttcatttcctgctgattgctgccggaatattaacagggattttaattcatgacctaggcttaatgacgattgtctctggaactagaaaagtgctgaatcagctttatattaaatgggtttctattgcggcaggatgtatcttaattggtttttcatgctatttcctctaccgatttattgggaatctgcgcatgtacttttaatgtttctacatattttatgacttgctatatcccctctttatctagtatagagaggggatttttataatctatcagggactaccagacaaaaagttcacattttcgtcacatttctattgatttttttctctttttatacgaaaatataaaaaagggaggaaatatcatgaaaatcaaaaaagcacttcgcatctttattggatcaaacgtccttgtattattaacattcggccttcttccagcactattggttaaccctgatattgacctaattcaatcatttattaattatataggcaaggattaattccgctttaaatagtcgtaattttcaatctattatttcgataaaaaagacagcgcaggctgtcttttttagtaggtttgaaaaagcctacggtactttttaggcttatttagttgaaaacagctttttaacatctactttttgatctttaaccatcgtatatgtctcctgttttttatcttcaaagctaaacgcttttatgtagtcattatcgtaaatcgttaagccgtacgcatcttttccgttttcgacgatttttacccagtaagcttggtcaaactttgggtcgagctccttgcttttttttacttctatttttgccaaagaatgtacgatttgctttatctcttttttatcatctactacatgttttccttcgtctgtatctatttcaatacgcgtaacgtttgcttcatctacttttatgacgtcttttaactgataggctttcccggtatatgtaaaataaaatacgacgataaataaaagtgcagctataataatcgttctttttttcaaaaggaacctccttttctacatcacgctgcattcacgtgatacacctttttattcctcctgttccgcagccctttaggacaatgctgcttcctacaagtaaactatacgttaatccccgaacaggaagtactaacgttaccatcaacagtaacatgcccgtacttgtaagagctactccggcagctcgatttttcattcatttcaccaccgttgctctgtaaatctctttttataaagtgatagaagtaatattgatctactatttacttatgtgcttttagcttatagtacagaaatgccaaaacttctactagtaagatcactacttcacattaccttctctttttaactaactcatcatgatttatgaaataaaaacagctcatctactgttgctcccagctcctcagccagctgaaaagctagcgttaagcttggatcatacttattgttttcaattgcattaatcgtttgtctcgatacgccgcatacttttgccagttcgtcttgagacatccgtttgattttacgcagttctttaattcgattttccaccattcatcactcatctctaaaatgtaaaaaactttttacatccatatcttatattatcttccttgttactgtcaaatatgtttgacaaagtagagtcttttacataactgaaatagagattggaacaaaggtaggttagttgaaggacaatgcgaacgagtttgattaagaatccacctcgtgctaattttttatgggtatggtgaacgtaggtttcgtgtatgtaggtgcttctagctgatgattggagggcaaggcgaagactcctgcgggaaaaagcggaacaggtgagaccccgcaggagcgcaagcgacgaggaggctcagcggccgcccgcggaaagcgaagccttgcacggaaatcattagcggtgtaacaagcgattcatagtagtaacattaaagctccttactcatattaaaccactgcacgcctgcatgctgagactccgctactccttgattcacatatccgtttttttcgtaaaaaggaatcaattcttctttacatgttaaagtaaccgttaagcgctgtttgttccgcgcttgtttttcaaactctcttagcagcatactggcaattcctttgtgatgatgcttgggatttacaacgatacccaaaatactttgataaccgcctgtctcagggttcgaaatcgttttttcaaacaaatcatccgtaataaacggagctgaaatgacgggaccgttcacatatccgattatttcttcattttcttgagcgatgataaacgtatcaggaatggttttgatccgcgtgataaatgcatcttttgaggcagcttcttcaggtgtaaagcctttgttttctaacgtaattaattggtttaaatctttttcatccacttgtcttataatcattggaacgtttcctttcattaaaagctactattatatatctctctttctactatatataaaaatgcccaaacaaaaaaggattgacctctgcatcatacagaattcaatcctacttcgctttttaattaacgtcttgattatttaataaatgcaccaaatggcttgcccaccggaagcacaactcgaccgtagtgagtatttaatacagccgctgcagatccatagaatgaaaacagagcaatcaatagctctgacactgctgctagtaagtgcgtgtattcatatgccacaccaaatgtacttagcgataatccaatgaataagaaatcaattaacacaaaaataataaataatactttatgagtgcccattgctccaactgtcataaagacgctgaaaatcaagtagccgacaaaagcaaatgcgagctgctttggatccgcttcttttgcgagcgcttccccaaatgctccaagctgaataagccatgtcatagctacacctagccaaaataacccgaaggcaccaaaagcagttgcgccgaaggtattattatgtttgaaatcttgcatagacgcgattaactgtcctattccgcctaaaaaaatcgcccatggcaataccaatgaaacaccatcggttaccccaagcttttgaaacgatgcaacaagtgtcaccatggcaagtccgaatagacctagcgctgatggatccgctgttacaattttaacgtgctgcgtgctgttgttactcatgttgtacctccctgattttaaaaacacctttaaaaagatacaaaaatgcacgggaagtgtcaatggatatttttggccttttaaaatcccataagaccaagcagtgtagcggttacactgcttggtctttaatttcttatcattaaacgttttgtaataaattttgtctggtttgttttgcagactcaaccatcacttttaaagcttcaaccgtctcgttgattcctcttgttttaaggccgcagtcgggattaatccaaaataatgcaggatcaagtacctgcagagcgcggtcaatgtttcgctgaagctcttcaagcttcggtacgcgcgggctgtgaatatcatacacgccaagtccaattccttgattgtacgtatgtttttcaaatgcataaattaattcaccgtggcttttagatgtttcaatagaaattacgtcggcatcaagcgctttaatcgcatcaataatttcttcgaattctgaataacacatatgcgtgtgaatttgcgtctcgttttgcaccgataccgtggctagcttgaacgcatacaccgcagcgttcaagtagctgtcccagttttctcgttttaacggcagtccttcacgcagtgccggttcatctacttgaatcattgaaatgccctgactttcaagtgcttctacttcttttctaagagcaagcgcaatttgatttgccacgtcgtagcgcgggatatcatcacgtacaaacgaccagtttaaaatcgtaatcggccccgtcagcattcctttaaccggcttatttgttagagactgtgcgtagaccgtttctttgatcgtcatcgcctgctcgtacgatacatctccgtaaataagcggcggcttcacgcagcgagaaccgtaagattgcacccagccaaacttcgtaaactgaaagcctcctaatttctcaccgaagtattcgaccatgtccgtacgctcaaactctccgtgcacaagtacatctaagccgatgtcttcttgaatttcaatccatttttttatttcctcgttaatgtacgcttcatatgcttcatcgtttaactcgcctttacgccattttagacgctcttttcgcacttcttttgtttgcggaaagcttccaatcgttgtcgttggaagaagcggcagttgaaaagcttcttgttgaacgcgctgacgtacgtcaaatgacgcttgtcgctctgctttatagctgtgcagctgcttcagctctttttgcacgtcttgatgatttcgaaaagatgatccatttaatgcttgaattgcctgtttgcttacgcttatttcttcttctattgctgcttttccttgctgcactgcttttgttaaaagcgtgatttcctttagcttttcatctgcaaaagacagcgcattttttaatactggatcaatggtttcttcatttttcaccgtgacgggaacatgtaataaacttgatgaaggctgcagaattagacggtcttttgatatggctccttcaatttcactgatcgttaaaagctgttcgtccaaattttcacgccaaatgtttcgtccgtcaatcactcctgctgccagcactttatcagtcggaaaaccatatttattaagcgcagtgaggttttctcctcggtcatgcacaaagtctaaaccgattccttcaacaggaagagacacaacttctttgtagtgatcaacgctgtcaaaatacgtttgcaaaatgacttttacattgggtgccgcttttttcaaagtttgatagacttctgtgtaaagcgccaggtcttcttttgatagcgttgtagctaaaaccggctcatctacctgtacccactcgacgccttctgcctgcagctccgctaagatagttgcataaagcggaacaaattgttcaactacttctttaaactcactttttttatatccttttgacagcttcacaaatgttactggacctagaataacgggcttgccgttgatattcagcttttcttttgcttctttgtaaaattgaagcgggcgattttctacaagcacaggagtacattcctcaagctcgggtacgatgtagtgataatttgtgttaaaccattttgtcatcgtagaggctaccgcaccttttgttcctcgcgcgatgtcaaaatacgtttcaagcgataccggtcctccgtcgtactcaaagcgctttggcactaaaccaaacatagcggctgtatctaacacgtgatcgtataagctaaaatcgccgactggaatcaattcaattcctgcatcacgctgttttttgagatgccctagacgaagagcttcaatttcctgcagaaagatatctttctctagctttcctgcccaaaactgctcaagcgcttttttccattctcgtttttcaccaattcttggataacctaagtttgaactttttacactgctcattttttccactccctgtatatttttttatcgataaactaaaaaatctctcttttcgaaatgaaaagagagatgatacgcatacttaactaaagttgagatagcctgtttttctcaacacgtatttctcactcctctctatatcccgtagagcttaagtgcatacaacaggcaggtctcctgacttaggttcatcgcttcttatcccttcccatttcaacatgaaacagtggttaataagttgctccccattacagtggcgggaccgcgccggcttttcaccggtcttcccttttaagctgcgtacattcgttacacagcacctgatgcatttttataaaattgttcattcaaaatatattcacataaaataaaaagcctctctatcacgaatagagaggcatagtatctatgaaatcctctcttatttttcaaagctgtacgctttgcaggatgtagcaccttttcaacaagaatgttaaatggttgccgggcttcacagggccagtccctccgcctctctcaataagagttttaattatttataatatttcgaatgtagagtcatcttaacaccttaaatttatgttgtcaaaagaaatttcaaaaaaattagtttttaggaggcgttgacgctaatttttgccttaacaatttgtaatcatcttttcgatgtgtttcgattaaatcttttgctccttggtgatatcctgacgaataaatgtactctaccgctgtttcgatgagctttcttttttcttcggcacactcccggtccattaaggggaacagtctacctaaaaggtcatttaaatcttccttgataaaacgatcaagtccttcttgcatcttttcgtttgccatgattgctcctccatttgctgtgtatattctaagcctgtataaacaggcatttcactgtgaattttaagataaagttaagtcattaaacagtatatcaagtgaatgtttttcttcaattacatatgtaatacaaatatatgacaaatgtagagaatatatcatcattcattatctattataacgtttgactgagccttctgctacaaggtttcgttaagagttatgtacggttttccaaaagaggttgagacataacgaagtgaatccaatctaaaggcaaatgggatacatgagctgagtcgcttgtgacaccgcagttgatttccgtacaagacttcgctttccccgggagtcttcgtattgtcctccaattacctgctagaaagacctatacacatgaaacctacgtttaccctaacaaaaaaaaacgaaccactaatcaaacactttgattagtggttcgtttttcacttcagctaaaatacttttatctcagcaccttacatttaaaacatttacgacaattaaacatatttattacgctcaactggacttacagaatttcttccagagcgagctgccatgtccgtttcaatttgctctaggctacgtccttttgtttcgacaactacaaagcgtatgaagaataacccaagaatacaaatgatcccgaacgttgaaaagataacgcccaaactaaactgatcagctaaaattgggaacacaagccctactgccagcgatcccgtccagttaaaagcagatgaaatcccagcaccgattccgcgtacagaaagcgggaaaatttctcctacaatgatccacgtaagcggtgcccaagaaaacgcatagcaaaggataaagcagcaaagagcaattaacgtaacccagttcacgacgacttcattaacgcctaatgctcctagaatagccggtgtaaaaaatgaaagagccatacccgcgccgccaatcgtaagaatggtacggcggttgaatttatcaacaaactgcagaaaaataagtgttgtcacgacaaagattaccccaacgatgaccgtaaaaccagcagctacctgcggggctaaaccaacttgacgagcaatgcttgttgcataataaacaattgagtttgagccttgaatctgctgaaaagttgccattccgacgccgattattaatgctaaacgaaactttttatgaaacaactgtttaatgcctgattgttcatgaacagctacgctttcaatttcagacacttcagcttccacttcagctgttgagcggcgaagcgtgcgcagcacttcacgcgctttatctgccattccatttttaattaaataacgaggcgactctggaagcttgatcataccgatgcataatacaattgcaaaaataccggcgctgccaagcattaatcgccagctgtttggaaccggctcaaaaataaaggctacgatatagcttaataataatccaattacaatcattagctgatttaaacctgaaagcttcccgcgaatattagcaggtgcgatttctgacatataggcaggaactaacgaagatgccgttcctactgctgtacctaaaaagacgcgcgcaatcgttaacgtaatttcctctggtgcaatcgctgaaccaatggagcctaaaagaaagatgatagacgaaattaaaattaactttcttcgcccaaacttatcgcctaataatccgcttaaaatagaaccgataattgccccacccattagcgacgaaaccacaattcccagccagagcggacttaaatgaaacgcttcacgaatatgaccttctgcaccagcaataatcccaatatcataaccgaataaaataccggcaaatgagccgaagaagaagataaacttacttgatactttactcatgattatatatcccctttgtattgtcttagttttgcttcctatcacacaaatttaaaacgctttcatttatttctaaaaacggcgttcttttactaaattgcgctatatttttacttcccaggaagcagcgctccctcggaagtagtgatgcttacttaataatgacgtactctagatcaacaagctttgcatagctcacaatttgatcggtcgttaaatttaatgaaagaaccgtatgatggcctcctccgttttcaatccacgctttaacgccgtcttggaagttcggcttaatgttccaaagcacgcgcgctactggaagatgtggagctggaacttccggctcaaatgccgatacttcgttaattaacagcttgtaatgcgtgccaaagtcagccatggaaaccactacgccttctccttgtttaccgtcaaacactaagcgagccggatcttcgcggttaccgatacctagcggagaaacgattagttttggcttgtttaccgctagcgtcgggtctacttcaagcatgtgtgattgaagcactgactcacgtccgggagccaattcatacgtgtagtcttccataaagcccgttgactgattatggctcattactttgagcaggcggtcaagcgccgctgtcttccagtctccttcaccagcaaagccgtagccctgtgccatcaagcgctgtacggctagacctggaagctgtttcataccgtatagatcttcaaagttagtcgtaaaagcgctgtagccgccttcatctaggaaacgtttaatcgcaatttcatagcttgcctgtacttttacgctagactcccagtcttctacagaataatcaccgtaaacaaattcgtacgcgtcggcatattcagcaaacaaatcattgatttcttcttccgtaacggcatttacatatcgaacaaggtcaccgattccaaagtagtcaaccgtccagccaaattgaatttgcgcttcaattttgtctccttccgttactccgacgttgcgcatattgtcgccgaaacgcgcaactttaatgttgaagctttcgttataagcagcggctacatccatccattgtgcaatttgctgctgtacttcggggcgctcccagtagcctactacgattttattttgcttgtttaaacgcgcgttgatgaagccgtattctcgatcaccgtgagcggactgattcaagttcataaaatccatgtcaatcgtttcccaaggaatgctttcgttaaattgtgttgctaaatgaagcagcggtttttgtagtaatttggtaccgcgaatccacatttttgcaggcgagaacgtatgcatccacgtgattacaccggcaacttcatctcggtaattcacttctttcatcatctttgtaatcgtgtcagcactcactgctagatcttgcagaacaatcggataaggcaagacaccgctttcatttaaagcatcagtcatcgtttgcgcatgtgcttttacttctgctagcgcttcttttccgtaaagatgctgtgaaccaacaataaaccaaaattctttttgagctgtttttaacatgataatccccttttctgtatgcaagtcttttactgtccttgcccgtaatacgcgttttgtccgtgttttcgtaaataatgtttgtctaatatacgctgcggcagctcttcagccagtccgtttaatttttgtgtaaagaaattcattttggatacttcatctagtacgacgctgttcattaccgccgatttggcatcttttccccacgtaaacggcccgtgcccttgaagtaaaataccaggaaccgctagcacatctaagccgcgctcttcaaacgtttcgataatcaccttgcccgtttccacttcatatccgtcattcacttctttttctgtcaaaaagcgcgcgcacggtatggaaccatagaaggtatcggcatgcgtcgttcccattggttgcacatcaagtcctgcttgagcccaaatggtcgcccacgttgaatgcgtatgggcaataccgccgatttgcgggtagtgtttatagagtacggcatgcgtcagcgtatcggatgacggattaagctcaccttctaccacacggccatctaaatcaacgactaccatatctttggctgtcattttttcatacgtaacgccgcttggtttaatcacaaacaaaccggtgtctcggtcaactgcacttacatttccccacgtgtacttaaccagtccgtgttttggcaaatcgacgtttgcttgaaatacttcttcttttaatttatctagcacactaactcctcccgttcttcgctgtggtgctctgcagctgctttttcaatcactagcccttttttatatcttttaataaatgcttcaaatccttttacatcgagttcgtcaggataaatttcttgtgcggtcacttctttaaagactttattatccaagaaatcttctaaactttcattctcacttttattgagcatataagaagaaagaatagccattccccacgcgcctccttctcctgctgtgtccatgacagaaacaggcgtgttgattgccgctgccatcattttctggccaactaccggcgttttaaataatcctccgtgcgctaaaatgctatgaatctttacattttcttctttgactaaaagatccattcctatttttaaagcaccaaaagctgtaaaaagatgtgtacgcataaagtttgctagattaaaattgctttttgctgaacggacaaataacggacgtccactttctactccggtaatattttcacctgagaaatagccgtagctaagcaagccccctccatcaggatcagcttctaacgctttatttaacatcacttcgaataatttatccgactctactttttgtcccatcgcctccgaaaattcacgaaacaatccgagccatgcgtttaagtcgcttgagcagttattcgcatgaaccattccaactggactgccgtttggcgtggtaaccaaatcaatttccggataaacgtttgaaagctttttatctaatacaatcatcgcaaaaacggacgttcctactgaaacatttcccgtgcgttttcttacgctgtttgtcgccaccattcccgtccctgcatctccttctggaggacaaaagggaatgcccggctgcaaattttttgattgatctaaaacgctagccccaatggctgttaatgtacctgcttgctcgcctgaggtatgaactgcaggcagaatatctgatagttgccacggataccctttgtgataaatgaggtcatcaaactgcttcatcatatcttcactgtaattttgcgtgcgttcatcaatcggaaacatccccgaagcatctccaatgccaagcgacttactgcccgtcagcagccagtgaatatagccggctagcgttgtcatgtaatcaatgcgcggcagatgtttttcttgattgatgattgcttgataaagatgcgcaatgctccatcgttcaggaatattaaattggaaatgttcagttaattcttttactgctgtacttgttgtcgcgttacgccacgttcgaaacggaactaacagctcacccgttttatcaaacgccatatatccgtgcatcatagctgaaacaccgatggagccaactgttctgatggtgatcccgtagcttcgttccacttcttgcttcatttcacggtaagcactttgcagacctgtaataatatcgagtaagttgtacgtccaaaaaccgtcttctaagagattttcccattcataactgcccgatgcgatcgtttcaaagttttcatcaatcagcaccgctttaatacgagtagatccaagttcaattccaagggacgttttccctttagcaattgcttgttttatgctttcttgagttgttttcacgtttaatctcctttctgatagctataatgatacctatagcagcaaggaagcgctttcctttttatgtaacgctgtttgaatttgttaacaacttaagtatatttatttgtacgtacatttgtcaatataaaaattatacatgcacacaaataataaaaacatcctatcttttctttcttaaacttttaaaaaatccttatccagttgttaaatatttctactttttattaaaaagaaaggaaatcttttcatttattcacgttcatgataaaatatgtccatacaaattttacgcataaaaaaagttgaatgtatacaactacgaaagaagtgaaaacatgaagccaaaatatcaggtgattattgaggatataaaaagcaaaattctttcaggagattacagcatcggcgaacaaatccctactgaatcggtcatgcaagaaacgtatggtgtcagcagacatacggttcgaaaagccattttagagctgtcgaatgaaggatttttaagaagcgaaaaaggatcgggcacctatgtgagcaatcagtatcaatccaaatctagcggagcttctaccaacaaaacaattggcgttattaccacgtatatttccgactatattttcccttctattattcgcggaattgaaagcaggttaaataaagataattattcgctgctgctggcaagcacgaataatgatgtggaacaagaaaaaaaagcgctggaaatgatgctttcctacggagtagacggcttaattgttgagcctacaaaaagcaatttgtacaatccaaacatctcgtattatttatcattcaaagaacaagacgttccgtttacaatgattaacgcctattacgaagaattggacgttccgtttttttgtctagacgacgttcagtcaagctaccttgccacaaatgaattaatttcaaaaggacatacgcaaattgggctcatcgcaaaaatggatgatcttcaaggaaagtaccgaatgaaaggctacataaaagcgcttggtgaagcaaagctccgctttcagcctgagcatattttgtcttttaataccgaaacaaagcttgatttgtatgctaatttaaaagaatttcttactgaaaatcaagacgaaatgaccgctcttgtctgctataacgatgaagtcggattagaagtagtaaatgtatgcagacagcttggcatttccattccggacaagttgtcaattattggtcaagacaattcgtacatcgctaaaaatgcgacgattaatttaacaacgttaacccatccgcaggaacaaatgggacacgacgcggcggattggattattaaaaagctgcagggcaaaaaagatttgccaaatgaaacctactatcagccggtgttagttgaaggagaaacgattaaagagttaaatgcgaagcgtgatgaagttcgttaaagagaaggcttccttagaggtctataaaacttcttatgagagaaagggatgcacattattatgcatccctttctttatgtactgattccctttataacggaacctgaatgttgagatatacacctttttctatcctttgttttgattgttctattagtctttgagcagtaatagatagtttggatacaggaacgacttgttctgaaacgacaacaagaggatcaacccagcgcatttttgtcgtttggtgaacatcgtgacaagaagcagtgcctgtttgtactttgctgttaaaaagagcagataacatcccttcaatgccgctatctcgagcgtttttcagcaaccgaaccacatcgtcatcctgctttaaaaaatcttctctagataaaatatctttttgcaaagcgagcttgataattttcgtcagctgataatttccaaacatattaagcggattcataaaaaagccaatcacttctttgtagtaagcatccacaaaccactctgccgctgataaattactgcatgccatttgcccattgaatacgacaagctgatccaaaaacgcatgcacttcttgtaaagtaatctccccacatacgtacaaatcccgcagcgtataatccacgcggtcagcacataagtgcggagcttgctgttcgagcagcgtccactggctttcatcaagtaagatatctcgccagtttaaaccggcgctttttaaaatatgaggaatagacgactgggtcacaatttgttcgtaaatcatttcatgataattttcttctttttgttccaaaacatagtcaatcacatgagaaaatgccgtatgtgaaacgtcatgtaataaagccgctatttgctcttccaaagagcctcctaatctgttgacaagcatcatcgcaccaacggaatgaccgtatcgagtagtattccagttttcatttacaaaccggctcgccccgccttggtaaattccttttaaacgctgtacgggatcactttgaatgagttttaaaagaacgccgtctgcttcaaatttcccgtacagctcatcataaagtatgagcatatccttctctccttttcctagctattttggacttattttaatcttacatgagacatcgcagggttccatttgcctgtaaataaaaacgacctcgtcttaccagaggtcgtttttattattcacttgacgctttaatacgatcaaaatactgcttcgcaggaagcaaaccaagatttttttctttccgtatgtatttaataacatcaacgtctcttcggccatttcgaatcaaaagattgactttgttttcaaaagcctcgtctttgtctatttcttgctgcttccactcttcattagaatcgcgtttaggtgctttaagcaagaatatagccttgtttgatacttattagctttttttgaatttgttttgctgaaaaataaccccacagtcagtccccttttagcaatctatctgtacgttttgtctattaatttctcttatacatgaaatgaatctacatcatacaaattaccatttaacctaacaaatagcaatcaagttcactctattatactatctcattgactactcataaaaaatacagagctcttttcaaagccctgcacttttatttcatatttaaataaggttaaacgcttttaccacttgagcaaccgtaaacgtaacgccaatcgcaatcactgttggaatcgcaaaagcaagaaacgtccactttgcatttttggtttctttataaatattcacaagcgtcgttccgcacggaaaatgcaggagtgaaaacaacatcatgttaagagccgttagccacgtccagtggtgatcaaggaaaatttgtttgagtcttgttgcatcttcaatttcaattaatgaacccgttgataaatacgccatcagtaaaactggtacgacaatttcattagccggtaagccaataataaaagcagctaatatataaccgtctagtcctagcgatttagcaaatggatcaagaaactgaacaaaatgcattaaaatactcatatcaccgatatagatgttggccagtacccacgttaacaccgctgcgggtgctgctacaataatcgcgcgttttaacacgtatagcgatttatccagcgtcgcgcgcacaattgtatcaacaaatttcggcttgcggtaaggcggaagctctagcgtatagtgggttggaactccgcgcagtgccgttttagacagtgcccatgatacgaacagcgtcaccacaattccaaataacaccgttccgactacaacaagcgccgttgcgaatgttttagcgcttcctgtaaagccggtcgccataaataaagaagctaataaaatcagcgtaggccatctgccgttacacggaacaaaattatttgttaaaatcgccatcatacgttcacgcggcgattcaataatacgagtcgacataatcgctgcggcgttacatccaaatcccatcgccattgttagtgactgctttccgtgtgcacctgctcgtttgaacagacgatccatattaaatgctacgcgaggcaagtagccgtagttttctaaaagcgcaaacaccgggaaaaagatggccatcggaggcagcatgacgctaataacccatccggtaccgcgaaacagtcctagtacaagaattccgtgcagccattctggtgcatgcatcgcttgaaagaaagctgttaaatacccttccgcccagccaaatccttgtgcgattaacccagaaggaacgtttgcgccggctatggtgatataaaagatgaccgataaaataccaagcataatcggaaagccccaaattggcgaggtaaagactttatctaacttttctgtgcgctgaagctttgagcggtcttcgtacacaactgattttttacatacttgctgtgacgactgataaatacttgcgaccatattggaacgatgatctttttcttttgcctgctgcgcatagcgcgttagctgttccatcgctaatgagttttcaggagttaacggatttcccatatgcgctgttcctcctttctgtgtgactgatatcttgctgctgacgctgctgaatggtttctaaaaatgacgtgtctccatcaagaacccgtaaagcaatccagcgcaaaggaaattgatttcccacaatagaagcgacttgaggttctagctcctttaatgacgcttctatttcttttgtgtactgcacctggtaagggttaagctttacctgcccgcgcacgacttgttcaatcgcatccaacaaattcgtaattccttttttattacgagctgatataggcacaaccggtacgcctaacgattcagccagctttttttcgttaatcacaattccttttttctttgcttcatccattaagttcacgcaaatcacgacgttttcagtcatttccatcacttgcagcgctaaattaagatttcgttccatcgccgttgcatcgaccaccacaaccgtaacgtcaggtctttcaaataaaatatagtcacgggctacttcttcatctgccgaatttgaataaagtgaatacgttccaggcaaatcgacaattgtgtagagctgctggtgatgttcaaacgtcccttctgctttggctacggtttttcccgtccagtttcccgtatgctgcttgagaccggttaagctattaaataacgtgctttttcctgtgttcggatttcctgctaatgcaatacgatacttactcaccgtcgtcacctactttttttacataaatttttgagctctcttcttttctgagaccaatcgttgtatgacttacttgataggcaacagggtctcctaacgggcttttttgaagcactttaataattgctcctggaataaatcctaaatctaacaagcgtcgctttaaggcaccttcgatttcgattcgctctagctgtaccgtttcacctgtcgtaaatgtagacaatggataattatttacactagccatctatttttcgtcccttctcattttttatctaaggttatatttttttcgtcagaccaacttttaaggtaaaaaaaatatgctcgttgatttttaatagggtattctgctggtgcagaaaaatgaacatgtcagcataatttatttaaaattttcagtttttacttgtcatgataccgaaagtttaccataggaaacttttttagtctagggtaagatactgtgttttttcttatttctactaaaggcataaaatgcaccggtctattttatttaatcatttaataagaggaatcaagtcgaaaaataatttagtaaaaacgaattgacaaaagtaaaaaactgtaaaaatatgctatactagtgaatgggttttttgaagataaagtattgattagctttaaaacctacaaaaatcactttagggggcttttatgaaaaagttcaaaagagttagcgcagttgttttaggtttggctttgttattctcaccgcttgcttcgcaaacagttgcagaagcaaaagtcgtgtgggggaatcaggaactggttaaagggcaaataggacgcgttaccgttttaaagaacactaatctttacaacatcaaaaacaacaagttagtagcggctagaaaagtgacaaaagggcaagtattccgcgtgtattctgagtctagcaaatttggtggtctttatggggtatcaaagggtacctatgctcaaaagtcatcaagtattaagtatgaaaaagcgcctagtgacaaaattcaagcactaggagtaacggttacgaagaaatctttagcaagcaacattagctatccccaggtatccggccttatcaataaaccatttgaagctagctataatcgaaagtttttaaacattgcgaaagaagcacaaaaagaacacaacaagctaaaagaacaagaaaaggaagaccgcaaaaacggctgggcaccaggtccttattctcgtaatatgacatactctgtaccttacaaccaagataatattttaagtgttgctattacgaatgatgcatacgctggcggcgctcacggcaacgcttggattgatacgtacaattacgatttgttgaaagctcgacaaattagcttaaaagatattattaacaataacaataagctaaataaagttaataactacattcgcaatgaaatgattgctcgtaataaaaaaggtgctcagttctgggttaatgaatttaagtctgtaaatttaaaagaagatcagttttattacacaagtagcggcattgccattatatttggtgagtatgagtacggcccgtattctaacggcattcagacgtttaaaatcccgtccagcgtttataaataagatagtcagtcgtataaaactagcctactgcatgaaaaaaagaagcctgcgaaccatcagttcacaagcttctttttctttttttctgcagaataagcggagcaaaaaagaaagatgagccctattccgcttccaaccatcattgaataggaaaacgtatctttcaacgctagtccgcctatcattgataataaaaacagaaaataaaacagtaatgtgtagtttttcttcttcttcacaatctcactccccctcttccatcgtttttcagaaaatcaaattatacacccacagaagaacccaggactacctacattacgcttctgatagccgaggaaaaattgctggttgaggtatttttatagtgtttgaaaaagtgaaatggtcagaactaacgtcagcaaggagcctgcggatgttaacaccattatttttcggttactctgattcttttcaggtgttaaaaactcttgaattgctacaaaccagataacaaaagtgattaaggaaataatccccatagacatatgagcgtctcctttcttatatgtatttaaattttcagcatatctaatcaacaacctttcccacccaagatactcaaatagatggcactttcgtgtaccaaatttaacaacctcttattctgtataactgccatttaaacacaatctttatcttaatattaacataaaattccataaccctttaatgtattatgtaaaaaccacaatattttaaaaaacaggctatttataaaacactcttttaaactaaaaatagacatacagctgtctttggctattctccactttacaaatgatatacttatttatagaaaaacctctcagacctcatcaaatacttgctctattttcagaggaagaaagttcacactgttaggaggaaaggaaatgattaaaaagttagaccattttgtgctaacggtaaaagacattgaaaaaactactcacttttatacggttattttaggcatgcaaaaagaaacgttcggagaaggaagaatagcgcttcgttttggtgaacgaaaaataaacttacatcaagcgggccatgaatttgagccaaaagcaaagcatcctcttcccggctctgctgatttatgttttatcacaaaagaaaaaatcgaaagcataatcaatcatttacaaaaacatgatgtagaaatcgaagaaggaccggttaaacgaacaggtgctgtaggccctattgtttctgtttatattagagatcctgattacaatttaattgagttatccaattacgtagattaaatccaccttattaaaaaaagagaatgcgcgaggcattctcttttcacatggctatataagccccttcttcaactataaattttactctttagacttgcctacctctacttttttcgtaaacattttcatgtcaccgtctaccgtaacgtgagcggtaatcatgtattcgccgtcttctttaaacgtatagtccgtgctgtatacaccttttccttcgtgcggtgcttttgtcatttcttgattgatatagccttctttttcaacttgaaactgtacgtcatctgcgttttccatttttttgtctccttgcgtcacaaggactttaagcttgacttgttcatttgcttgaattgattccggtacttcaatcgttccttttacttcttttgaacttgaatcatttccttttgaacagcctactatagctatcattaaaacgaataatacgatgctgagttttttcattatgttgttctcctttgttatgtaaatgtgaagtcttcctgcaatttcatattatactcatttatccggtaaaaagagaaaaaatccttattgtccacataaagttcttatttctacagtagcttttgcatcttttcacttctctactcgcccttcgcttcacaaaaaagctgaagaagcttattgccttctccagctttgcctttatctctgcggttcttctaacgtgtacgatgacagtgcattttctacccatcgtacaaaatctttgcttgctccccagtcaatattcaatatcccttctgcgcttcctgaaggaatacacttaactttgtttggccccgacacattttctaaaataatcgttaatgatcctctgccgccggtgcggaaaaaatagcgttcaaacacaagcgtgcacatctgcttgccgtctcctagatcataatattctttgtataataagtcactttcagaattatttgcgttcacaagcttctttgctccatcaaaaggaagcaatgttgttttaaactcaattaccttttccatcactcaagcccctttctatcgcaacagatatgtactacttctctttttccctctaaaaaacctgccgcttctctttatgtacaatatggtacaatagaaaagaaaagaaattgtttgaacggaaaaaggagcacacaacctcaatgaatacacgagatgaacttatccaaaatgtggtttcaacgatgcgaaaccaaacgaaaaaaatgcagctatcggttatccccactttaaaatcatatattcctttaaatgaatttttagcgcttcacatgctgtataaagaagggaatcatatcgtttctgagattgccgagcatatgcacatctcaaacagcagcatgacgtgcatcagcgaccgattaatggaaagagaatttgttacgcgcgtacgcagtcaaaaagaccgccgcgttgtctacttatcgattacggataaaggaaaagcgtttgcagaagaaatggaaaaagtactcactaaagaatatggtgaaaagcttagccattttacggatgaagaattacagacgtttcttcgcttgttaaataaaatggatatctaataaaaaaccagatgcccgctaagcaggcatctggtttttattttgttatttgttattcaccttcaaattaaaggcgtctgaagttaagtcttttgcccagtctttttcgttatcacttacatacggaataaaccgaagcatagtcacgtctttatcatttcggtactcttcgttcatttccatcacggtgtctgtcgcttctccgcttgcgctttcagacaggtttcttccattttggtcttttattttgacaccggcgtccgttccgcctcggatgcttctttttgaagctgtaaacgtatagttcattttaatcgaaacaggcgatacgcgaatttctttaatagacaatacgccttctattcctttttcattaatcggaatttctttatttaacggatatacttttgtgtcagcaataatttttgagccgtttatgcttgtgtatacggtccaattccctttaatttctccataggaatctcgatggtcaccgcttttcgtctgagcaggattcttttcaaattctagacttgtgaactgcgcactgatttgatagtttttatttggttcaatatgatctagcacattgtagccttctacatcgattttcccgtctccgttcgtgtccgcttgcgttagttttaaagcgtacaagtagttccagcttccgtctttgtttttgattggttcctctctaatacttgaagcggagttaaaaaacaacatattgccaatttttacacgcagctctcccggtcgaattgacgcgtctcggttaagccctagtgcagttcttctaaattcatctgcgctgatcgtcaacccaagcagcacctgtccgtcatcaagcatcagttcatttacttttacttgaatgccttggtccgttgccgtttcatttaccgtttttttatagctgctcaaactgccttcaggcttgttcataagcagctcgatttgctggccaatttgctgactgattcgcacagccgatgcccatactgtttcgttttgcatcatcacaggcgtcacagcaagcagcagtaccgcagcggcgatcagcggacgtgctttttttcgagtcggctttatgtcacgctttaagcgttttttcattcgttttttctcgcttgccgttagctcgatttcttcatatttatcaaaatctacagaagatccatttaataagtcatattgatttttcatctttgtccctccttatttcttatttgaaaatcgcttttaatttttttcgtccgcgcgacagccggttatataaattgctgatggtggtctcttgctttttcgcaatttgtttcagctcgacttcctgtaagtaatacgctttgaacagctcgcggtctccttcatttaagtgacctaaaagttcttccacatcgtttgtttgaacgttatgaacttctggtgattcaccaaattctgcttcgccaagcgcttcgtgctgcgtttttatgtatttgcgctgatagtcaatggctttgtactttgcaacagccgcaacccaatttttaaacgtatttttctccgaatcaaagcggtgaatatgatgccataccgctaataatacgtcgtttatacattcttcttcatagctttttaacgtgcctaaatgcttgcgaacaatagaggtaatcaatcctccgtactgatcgattaacagctctaatcctttttctttttttcgcgttatacatgcaacaatccagtcatcttccatgacattgctcctttccgcttgcttttacatctattaatacggattctttttacaaaacctatcaatcttcctaatttaaataaaaaataagcttgttccgtatttccctcgctggtaaaataagctaaaacctttgaaggaggccgctatgattacctatccttttcttacatctaaccctaccatcggcgtaaccgcaccttcttctggtgtacctcaagctcttcattccatgttttctttatcgtgtgaacgaatgaaggaaaaaggcttttctgttataccgggagaaaccgtttggacgcagcacaaagcaaagtccgcttctcctaaaaaacgtgcgaatgagcttcaagccatgatagaagatgaaaacattgatatcattattcctccttggggaggcgaactgctgattgaaattcttgaacatctcgactttacaaaatggacagcaaaatgggtgcttggctattctgacaccagcgttcttttgctggctattacacttaataccgggattgcaacggctcatggaaccaactttgtggacttgcgaggagagtactgggatccaacgactgcgatgtcgcagcaggtgctgacgactaaaaaaggagaaagcgtggctcaagtttcttctgatcgctatcaaaaagaatggcagcacgacaacccgtcaccgtgcgtgtttcatttaaccgagcaaaccgcttggaagcatacagagttaagcgacgtgcacatcgaagggcgtcttctcggaggatgtattgacgtaatcagacacttagtaggaactccttttggagacgtaaaatcgtttcgggaaaaatacattcctgctgagccggtcatttggtactttgacaactgtgaactgacgaccgctgaccttcgccgttcacttcttcagcttaagctagcgggttggtttgacaactgctcaggtattttatttggcagaagcaccgctaatcaacccgttgattcctacaccgctgaagatgtgtatcgtgaccttgcctctgacttacatattccagttatctatgacatcgactgcggccacctccctcctcagctcacgcttattaacggcgcgtatgctcgtgttaaagtagagaagaagaaaagcacggtcgttcaatactttacgtaaaataataaggacgtgagaaaagtagtttaattgaaggcagatccgaacgagcttgaattctgatggagaatcaaactcgttcggttttttttatgggtatggtgaacgtaggcttgtttcatataagtaggtgcttctaatggttgattgaagggcaagacgaagactcatgcgggaaaagcggaacaggtgagaccccgcaggagcgcacgcgacgaggaggctcaccggccgcccgcggaaagcgaagtcttgcacgaaaatcaatcgcgcttcatttcgttatgtctcaattttgttttacatatctgtcattagtaatataaacgtccctaataagaaaaaagttgcaccaaaccacgagtggtagtgctctttttgctttctttcaaacttccattcttcgaaacctcgaattacgtataggaggaaaaagaaaagaaacataaaaacggaggtgtaggctggaggtataacaaagatcagcactaaaaacgcagcaagcatcaccatttcaattgtgacaaccagcggacgccttcctttaaagcttctccaatagctttttgtcatctttgtatgcagcttttttcgcaggcaaaaatccagaaagatatagacaactgccagaatcagcaaatacacaagcgtcattttcattcctccttccaacctaaaatatccttataattccattttaaagaactttctataaatttcaagcgtctaaaaaatctttacacaacttattagtgcaagcattcatatattcaaaaatcgctaatatattgactaatgtacaggttaaattctctgtataaactcacctagagggggacatcaagttatgagaataaaagaagtgaagcaaggtgcactcgcagcgctgaaaaatcgctggggatttgccgtactgcttacgttcgttacgtatctaattgctgccggtattccaggacttattgactttttaatcaagggatttccaaacgggtccgaaaccgaatactctcagtctaccttagctaatattgtatccctgctgctcgtaccgctctttttctcttactactgggtactattgcgtctcgtgcgaggagaaagtgtacgtgtaggaaacgtgtttgattcgttttcatctgcgggattatactttagaacactcggactttacttgctaacgattatttataccgtgctatggagcattttattaatcattcctggcatcatcaaaagccttgcctattcacaggcttactacgtattccgcgataacccagattattcagtcaaccagtctattactgaaagcagacggttaatgaacggctacaagtggacctactttttacttgttttaagctttatcggctggggaattttaagtatcatcacgcttggcattgggttattatggctcgttccgtatgtaacgacttcgcttggcgtattttatgaaaagctaaaggcaaatgaaactgaagtcgctgaataaacgaaaaaccgtattcgagttgcgaatacggtttttttatttagttttggtattctctatatacattagctgaaatttgtaacctgttattcactaaatgagctagtaaactatattaacatcgaactatatctcctagaaacaggagctaaacagccgccgtctccttaattcaccctcttttttaacataaaaatagaaaaattccataccctttacatattttctaataaatctatgaattccctaaacatttctacctagataaattgtcagaattattacagagaaggtgacaattctacttatatcgctctttaatattaaaactatgttacaaaatgtcgtaatttggaattagatgtttacttttcctgtcaggattgatagactcacagttgtgaataaaacaagttatggaaagggagaaagaacatgctaaagaaagcaaatcgtacagttatgaatatggggttagcagcattacttgttcccgctgccctaacatttagcacaacttcagcaagtgcaaatgacggaggcgctgcaccagcacccgtacaagaaaaggtaacgccaagcgtacctcaacaacaagcaactactactactaatcaaaaagtcatcgtaaacgtgagtgcgttaaatattcgtcaaggagctagcttttcatctccagtcgttggaactgcaacacaaggtcaagagtttgctattttaaaagaagcaaacggcttagttgaaattgcaccaaacaaatggatttcaaaaagctcaagctacgtaacaattgcatcaggtaaaccaagcgcaagccaagtaaaaggtgtaagcacatcaactccttctacttctacagcatctgcatctacatctgcagcacaagaaacaagcacaccagcacctgctccaactacaagcacggcttctggaagcacagtaaatgttgcacgtagtttagtaggatcaccttaccaatgggcaggaaacacaccaagcggatttgactgctcaggctttatcgcatacgtgttcaaccatagcggtcacagcatttcacgtacaagcgtagcaaactattggaacatggcgacaaaaatttcgtctccacagccaggagatctagtattcttccaaaacacatacacaagcggcccatctcacatgggaatctacatcggaaacggccaaatgattcatgctggttcacacggtgtagctgtagctgacctagatgtttcttactaccaagatcatttcttaggatacggacgcttctaagaaaaaaatgccctctaatcgttagatacgttctaacgattagagggcatttactttttatcgctgcgcgacggaaagcgccttttcaatacgcgtttgaaatttatgcttccagtcttcagctagctcagccacttctaaagcccgcttcatcccttctacatcttttggacgatggaaatataaatcaagcgtaaaccaaacggatacttggttgggatgagcttcaaccaatttcacttccgcatcttgcgtaatcgtaccttctttcagcacgcggcaaagatagcccgtatagcttgtctctatcattcgtttcaaaatccctttaacgcccgttcgctttgtaatcgtgtcacatggatttcgcccttgcgtcacttgaataacggcgtctcctacttgataaacgtctccaatgcatacgtctttttcaaccatgcctgcaacaacaagattttctccaaacgcagacatcggcagctccgtatcaaactctgcgttccattttttgtagtgttcatacggatacacgcataccgcacgatccggtccgccgtgatactttaagttcgctacgccgtcgccttgaaacccttcttttgctaaaaacgtttcgtctacttgcttcttgcatatgcctgtacgcatttctttatcaggactgtatgccatttgttcaggcatgccggttgctaaataaatcagctttctctcgggtgctgtcattatgtttacacctcttttatcatttttactagtttaccacaatcatagccttatttgcgtgatgtgctagttagctctcttagcggtttccactttagccccaatgcataattaatagcggtagctgcgataaatccaagtaccacgcctgaaacggtcggtataaataaagatggaagtaccgctacgcaagctagtgttaccacaaaatttccggtatacgatcattctggatgctttgaaaaaaatgtttgaatagtattcatcgttaactcctttatacaattgctttataattcctcatgaatattctaccattaaaaaggaaaaatttctcttaaatagcgtattataagtgactttgtctctttttcgcttcttatgctgaaattccaagaatcggaagtatcataaatttttaaaaatatttcacaattatattaaaaatatcttcatttcctctttttcttttgttcaaaatgatttaagatagtagaggctgtcgaaatataagttattatgtcagttctgcatgtttttttacatattagcacatagtaaatattattttacaattacgtcatttttttaatggcctaaaaaattttgcccatttttactaaaactagcgtgaaagtcctgatttttatataaaatagaggccgatttacatagtcatttctatgcacgtccctcttttataaatatagagtacatgtaaggagaaaagtaaatgtcaattttaatgggaattatcggaattttaattgtcttagcagttgcgttcctcatgtcaaacgacaagaaacttatcaactacaaaggcatcgcagttatgctggttattcagctcgctatctctgcttttatgatgaatacatcgattggtcgcaaggtgcttgactttattacgagtgtatttacaaagatcttatcatttggtaacgacggaatttcgttcgtgtttggagatcttgcaggaaaaggcattttctttatccaaacgttagttatgattgtattcgtttcagcattattaagtattttaaactactctcgtattttaccctttgggatcaaatatattggaggacttgtttcaaaaattaccggacttccccaaattgaaagcttcacagccgtgaacgcaatgatttttggtgatacaacggcgctaattgcggtaaaaaaccacatcggaggtttaacaccaaaccgtttatttatcgtcacaacaacatctttagtatccgtttcttgttcgattctaggcgcatacatgcagatgataccggcggaatacgtattaattgcccttccgctaaacgtattctctggtttaattgtttcttctatcgtcgcacctgtaaaagtggaagatgaaaatgaagtcgatatcaaagcgcctgctaagcaaggcacactgtttgaagcaatcggtgacggagcactagacggcggacgcgttgcgttaatcgtagcagcgatgcttgtaacgtacgttggtcttttagcattagtgaactacgtattaaacggcgtaatcggattaactgttcaagacattttaggctatatcttctacccaattgcctttatcatgggtattccggcagatgaactaatgagagccggcggcgtaatgggaacaaaagtagtagcaaacgaattcgttgccatgcttgacttccaaaaaatgatgcctcacctttctgaaaaaacggtcggtatcgtatcagcttacttaatctcatttgcaaacttcagctcaattggtatcgttcttggtaccatccaagcaatcaacggcgaacaagcttcacgcgttgccaaatttggcttgaagatgctgttagtggctacaatgggatcgattttaacaggtattatggttggattgtttatttaatgaaaaagcactcactttggtgagtgcttttttgttggggctggttcatttgggattatagctagagcgtttctacaatgttgaaatttattaaatatctctgttgacatactcctagttatcggcactattatcaaatgcttttcttatcttcattctaataacatttaaattagttttacataatggattaaagcaatatctcttatccaataaaaagacagcttgctttatcagcaaactgccttttttgtaatgacccgtccgggattcgaacccgtgttacctttttaaaaggacaatttctcgaccactcggccaacggaccagataaaattataaaatggcagagaagaagggattcgaaccctcgcatcgcgttaacgatctactcccttagcaggggagccccttgagccacttgggtacttctctgtatggatctcccactgaaatattgtggaataatggtaggcctaagtgggcttgacactgacctcacgcttataagacttgggctctataaaactgatctacttcccgtttatggcgcgcccgagaggagtcgaacccctaaccttttgatccgtagtcaaacgctctatccaattgagctacgggcgcttcctaaaatggtgcggatgaagggacttgaacccccacgtcataagacactagatcctaagtctagcgcgtctgccaattccgccacatccgcatgtgaaaaatggttgcgccaaccggatttgaaccggtgataaaggtattacagactttgaccttaccacttagctatgccaccaataaatatagaaataatttacagtaagtcgcgtttattcgtatactacccctttatatgaaacctggactagtaatttaataattcatatctgtttcgctaccaacaaaaattattctaccttataatttcgtagaattcaacatctatgtaatttatgttttaatatttaattttgcaattattaattagaaacatacacctaaataaaaaaagctctgtaacaagaatcatgattcttgttacagagctctttttatagaaaggtttgagtaatcgcattttctaaatctcttttagaagattttaggtatcgttttgtaacattcacatcagaatggcctgctaattcggcaactgttgcaatatctacccctttcttaactaactcatgacagaaagtgtggcgtaatttatgaggatttacattatatttttttaacatgtactgaaccgtacgtgcagacattcttctattaaaattagagacaaataaagcttcatgattagaatcaaatgaatcaatatatttctttaaactattccttgcttctgtagaaagaggaacaaatcgctttttacaccctttagcattacggataattaaaaaaccgtcagatttattattctctacgtctttacgattcaaagcacaaatctctgatactcgaatccctgtatgtaataaagtatatacaatagcaatatcacgaaggtttccctgttgctttacttcagataaaaggcggtcacgctcacttgcttctaatgactctggtacaacctcgttatttttctctttttgtttacgttcaatattttgaacaatttgtggtttttcaagaaagcgtgcaaaaacgctaattattacaaaagctttttctatagtcgacgcacttttattattagattcaaggttaagcatataagtttggacattatttcttgttatttgatttaaatgtctaccttcacttagaagccattcatgaaattggtttagcactgctcgataggttttaatcgtattatcagatttgcctgattctattaaccattggctaaagtcatcaatcaacggaataacttctaggctattttttttcactctaaatcctcctacatgtactaatgaattacgtaaaacataacatttaatttcgtagaaatcaatttaaacgaaattaatatacaaaaaaacagcatatcattgaatgatgtgctgttttttttgcctgacaacgtcctactctcacaaggacaacgtccccactaccattggcgctagagaacttaacttccgtgttcggtatgggaacgggtgtgacctctctgctatcgccaccagacctattaaagatagttttctcaacactaaataacaattgctaagtaaaaacaccgtgcacccgtcattgacatgatcaaataagcgttacttgtacagttagctcgaccgggttgtgctgcaacacacagaagaatctacttatggctgcttccttccggacctgaccatgttcataggtttctgttgtgcaggacctagttgtcaacaccacttgtccaagtcagaccttacccgactcatacctctgttaggaattaaaccctgctaaggcggattgcaggttacagggcaccgccatctccccgtctagcacggtatgtatagttaagggattcccacctatgtcgtcctcccaatctgttttgtgaacccgcgatctcgcaggtgggtttccacatattaacgttccagcgatcctgtgtcaaagacaggcatggcatcagtcaacaaatgtaggaatcccaaataaacagtacggttcaaaacaaatagggcataacgtacatcgtaggataagtatttaacgtgtttattgatgatatagattatcctacaataaaatttcgcagaagtcaacataagcgaaaaaatagctgctaatcctcatacaatattttcttatttgcttgatttactgttgttgggaagggatttctttgaaagatggaagttataaggagtcgtgtttcattatattgagtcctccacttaaaagtgaagttcattatagttagatttttatacatccttgatctaacaacacttttctgatgtggtgattttttcttctcatcctctatcgataaaaataagagaaaaataaaaaaagcctaaataaagcggcttttttattttaagaataaattattgttctgttaattcagatatagaaacactttgcttattatttggttcatccaggttatgaattgtagctaccccattttgttggtctacatgctcaatgtaaatacttttcccattatatattacattggccatgtccactgaatcggcaattttttgtgctctctgtgcatccacctttatctagcctcctttttatttatgacagtgaaagtatttgtttttaattaatttttatgcatctaattcctctatataaaatcaattttaatttttcaaatgagacattaagtagtaaagaagctatctcgttcataatttgagatagcttttcattttattattcagtttaatcttcttctggaatcttaattaaaatggctatagctattgttgccaaaaatataacccctaaagttagcaatagactcgtactcatatgcctcatctacccttctctcttcatccctatgattccattttagcagaggaaattagttaataaaactggaaatgatagcgttttactaaaaattttatacatgttaaaataatgtagttgttttaactcaaccaatgtattcaatttttagcttgagtagagcaagctacctctttcctattttggggtagccctttttttatcgtgataaaataaaattttgttttggatatatttcttcctaccctcggtttacattcgttatttacgaatctgttcaatctcttcttctgtaagctcagttaattcagatattgtttgattatccatacctttttgtaccattcttaacgctactctcttaatagctcttttttccccttgtttttcagctttttttaatgtcaatttttcatctacttggaattcctggtttacttcataagtcattaacatttgtggatcctcagttacacgtgcccattcgttcatcgcatttttcaaagtttgatctttctccattacaacttcctccaaaaatgagtaaaatcttcatttcctgacatattaaacaacagtaattgttttactaattatgcgtcctttttacgatactattctcacttattccaaaatcaaattaatcccataaagcttgtccgtccaccctaaatttgattcagaagcaactaacaaattatttatttaatttatatgtttttttcttatagttgcacatattaaaaataataccagatgaaagcgagatgagataagtaatgtcaaaacaagggatacagaaaaagaatcagacaagagagcaagtagagaagcaagataaaagaaatgatgtcgaattaggtaatgaatttcaaactggcaacacaagttcccagagccagaaaaaaagtggccgtcaagtaaataaaaaataaatttaacctttcgaggataataagaaacctcagttcaagtcataaatttgaactgaggtttcttttatagagttcagaagacttatgtgcaaaagaggcaccaagctaaagagaatttgaattctattatgaaaacaaaattcaaataaaaaagaaagtatctcatattagttaattgttaagtattgtaacaaaataaaaaagtgtagcttaacataaccactctttccgaaacttataataaaaacgatctttttatgaatacgatattatcttatatctctttttatatttaccttcaaattttcgaacctgattctctgtataaaagtgtgctactttatatccgtcgttattataggcttctgcgattctaagaggttgtttaacatctcttggatagtaagttggcattatggtcgatatacgattataagtcagaacacctgtgtctttgcttttttcacgatttagtacataaagtcctttaaatatcgcttcaaattgtccggaagaagttttagcatatgcaaatagcgcgatcttctgattcagctgatacattcttttctgaaaataggcttcgttctcttcttaaattgtattatgttcaataaatatttcctcattttcaagaagttgattgttccatgtttcgttagggaaaaactttaatcttttaatatctgtatcttcttcaaacttgtgcggtgctccgcttttttgaattccgtgagcatagccagctccgaacacattacaacagtctgcaactaaccttaaagaaatattatcgtcggcatctatatacccttgttcaatataagtatttggttcgtattccttctccatatcccatggaataaaccattgctcttttattagcagattaattttttctactacctggtcgatcttttcatgaatcttttcaaaagattcagtagcatctattcttataaattcacactctaacgcattcacaatatcgttttttctaatttcgtctaacgtttgatttatatcattcttatgatgggcttcatcaatttcaatggccaaattaaactgtggaaaatacaaatcaattaagccgtattcgaccctttggtttttatttgatcgtactacatactgttgagaatttatttttatatcgtaattatcaagcaagtgccagatccttgtaatgatataattctcatcgttttttttattcgttttcgctaattgtcttttgatatagtcatacttgttcattacttttctagatcctctctttttcctctgctgtagcattatgaaaatgaattcctaaataaccatatccaaacgatgaagggagtgcaactcttttaataaactgtctactaggccttgctttcacgattcatccctcttgttgctataagtttctgcaagttattttgatctacatactctcatgctattttcaacatttatatattggtaaaataatttatatatcctaacattaaccacaataaacatatcgagacttaatttcaggataataagcccatattagtgtatattaagcagattgatctaacctattattaaaataaggaaatttaatattgtaatataactatatatatgtaaacattaaacatgtattttaaatacatgtttaatgtttacaggaggaaatgtactgaaatgaaaaaattttttaagattggctgtttaggatttattattcttattgcacttattgtagtaattgctgtcgtagcatcaggtggagatgacagtggttctggttctggttctggttctaactcttcaaaatcagaagaacaaaaagctcataaagtgggagccacttttacagtagatgataaagcggaagtttctgtaacaaaagtagaggaaagagaacaagttggaaaccaatatgcaaataaaaaagcttctgaaggcggtacacttgttgctattcaatggactgttaaaaacatctctgacaaaccattaggtgctttttcaactccaacaattaacctcgttgatgaaaaaggaacaaaatatgacgctgatattgatgcaacatcaaattatgcagttgaaactaacattgatgactctaagattgcaagtgatttaaatccaggtatcaaagtcacggatgttgacgtatttgaggtttcaaaagatagctatgcaaaaggtaaatggtatattgaaataaacggaagtaaagttcaagttaaataatacttttccatggagtaaaaagctcactaaacgttcaacgtttagtgagctttattatatttatactattatctatacccttgagagagtatatggggaaacggtccctttttctgcagagaatgttgaaaagtaacggaatattatatacttgtttcaaacaagtgcaatttacgcaccaaaattataaatagagtcctttaatataaattgatgcgatattcttagcaatttgttctacaggatgctcatattcattacgaacaatttcccaaaggtacatttcattagtgaaaaaccaccctcttgctactaactcgttatgtacatctttacgtgctaatccattgtgctgcgcataggctatgtcttgtgaaattcgttgaataaacttttcccgaatgttcttccatttctctgaaacgagaggagaaatgccaatagcctgctcaaacacttgcagcattttttgttcatcctcagccatttttaaaaactcgttcgtttgtttatgaatcatttcttctgcttcatttatagatgccggtaaaaatgcagcctcggcaatttcataaaatttctccataacattctccattaatacaactaaaaagtcttcttttccttcaaaatgaacgtatgcagtaccatacccaacccttgccttttttattatttgagtgatagttgctttatgaaaaccttcttttataaatacttctcttgcagcttctaataatttttgtcgagtctttattgaacgtaaatgccgtttatcttcaatgttattttcattcattaaggctccttcctccctatccgttttactctctaggatatagaagttttcacaaaacgaaaagaaataaagagaatttattacaaaaattatttttttaattttcaaaattatattattgacactgtgtcatattctttgttacgattcttctaggatacatattaagtaatgcagaggaggaaaattatgcaattaaatacctttaaacccacattagagtatgcaaaacagttggatcaagaagactcactttcaagttttcgtgacgaattttatttaaagcctgattccatatatatggatggaaactcattggggcttctttctaaaagagctgaacgcagacttatggaagtgttaaatgattggaaagaacaaggaattgatggatggactcaagggaaacacccatggttctctttgtccgaaaaattaggtgaaatgagtgcgccgttagttggggcttccagcgaagaagtcattgtaactggttcgacaacagttaaccttcatcagcttgtagctactttctacaacccaaaaggaacgcgcacaaagattttagctgatgaattgaccttcccatctgatatttatgcgcttcaaagtcagctgcgaacccacggatacagtccagatactcaccttatacgtgtaaaaagccgcgatggccgttttttagaagaagatgacattattgaggctatgaccgatgagattgctttaattatcttaccaactgtactctatcgcagcggccaaatattagatatggaacgattgacggctgaagcacacaagcgtggaattttgatcggatttgatggctgccactctatcggtgcgattcctcactcatttagtaaatgggatgttgattttgcatattggtgtaattataagcacttaaacggtggacctggctgtgtagggggcttatatgtaaataaaaaacattttggaacagcacctggtttagcaggctggtttagttcaaaaaaagaaaagcagttcgatatggagcacacattaacacctgctgattcagccggtgcttatcaaattggaacaccccacgttttaagtcttgctcctttaattggatcgctagaaattttcactgaggctggtatagataatattcgagctaaatctcttaaaatcaatcattatttaatgtatttattggaaaaagagctgagtgacttcaattttatccttggaagccctagagaagataaaaagcgcggagggcatgtaagtcttgaacataaggaagcagcgcgcatttgtaaagcattaaaagagaatagtatcattccagatttccgcgctccgaatattattcgtcttgctcctgttgctctttatacttcttatacagaagtctgggaagtagtacaaactttgaaaaaaattatgaacgataaagaatatgaaaaatttaaaaatgaacgtgaagtagtggcgtaaaacctaaactacttgtttttttaacgagaaaagtaagcgctttctaaatcttaaggaagctatttgacgtagatatgcagccagccattattttgaaactatgagggagatgaaatatgaaaacccacaatactcaattgccaaacaaagatgacgcagaaaagggattaaaacgaaacctaaaaacaagtcaattgacgatgatttcgatgggctgtgccattggaactggactgttcttaggcagtggacttgcgattcaaacagctggacctagtgtattggttagttatgctttaggagcttttgttgtattacttttaatggggtgtttggcagaaatgacagtggcccaccctacttccgggtcgtttggaacaatttctgaaaaatatgtacatcccctggcaggatttttggttcgctattcatattggatagccaacgttctcgccgtgggagtagaagtaagtgcaatagccgtgtatatgaagtactggtttccaagcgttccgggtattgtctggattttagtgtttgctactatactaatctatgtaaatgcaactagtgttaatacgtttgctacttttgagtattggttttctatgataaaaattagtgcaattgtgggctttattcttttagggtcctatgttctgtttggaacagatgcacgccctaatatgggtacaggtaattttgtaaatgatggtggattccttcctttcgggtggtggggaatgtgggtagctgtctttatttccctctttagtttcttaggaaccgaaatgattgcagttacagctggagaagcaaaagagcctgatatagccgttccgaaggctttaaaagcaactgtgtttcgtttaactactttttacgttttgactataggtatcatgctaatgattgttccatggaagtcagctcaagttgataaaagtccctttgtaaaagtaatggaaattctgaatatccccgctgcctctggaatcatgaattttattattttaacggctgctttatcagctatgaacagtcagttatatgcttccacacgtatgatgttctctctctctcaaagtaaacatgcaccagcttttttagggagactaagtaaaaaaggtgtaccgctatgggcccttgctgtatcaaccctgggcatttttcttgcggcagcagttaatggactgctcccaagctcttcatatgcctttatgatgggtatttcaatgttcggagctatgttcacatggcttatgatatttgtttctcacctctacttccgaaaaaaatgggagaaatctggcggaagaaaattaccggtaagaatgcttggtttcccctattttacgattttaggagccatcttattactcggtttgatgattaccactttgtttacagattttaaaattatgcttcagtttggaattccttggttagcattcttatccattgcttattttatctctaagaaaagaaaagttaaccatcattttgtagaagatatggctaatagcagcttaaaagaagaattagaggaattacgttaacgttcatattttacataaaaacaagggggatacaaaatgaaaacgacaaataacaaggcaccaaatgcagttgaactagagaaagaacttcaaaccgactttcagaaaaccatgtcgtatggagattacctgcaccttgataaaatattatctagtcagcatagactttctaatcaccatgatgaaatgctgtttattgtcatccatcaagctagtgaactatggatgaaactaattctacatgaggtaacagctgctgttcagtgcatccgtgctaataacctggaaccttcatttaaaatgttatcacgcgtttcaagaattcagcagcagctaattcaatcttggagtgttctctctacgctaacaccagcagagtacatggaatttagagataaattaggtcaatcttccggctttcaatcttatcaaaatcgcctaatagaatttgctttaggaaataaaaatgtccatacactatctgtttaccagcatgatgcggatttatatcaaaaaatgcaaacggctcttcatgagcctagtatctatgatgctgctattcatgctcttatgaaacgcggattgccggtagatcaagaagtcttgcaaagagattgttcacagccttacgaaccgaatgccagcgtagaggatgcatggcttaccgtataccgtaacgttgatcagtattgggacttatacgaattagcagaaaaattagttgatatcggaaatcaacagcaaatgtggcgatttagtcatatgagtacagtagaaagaattattggaaacaagcaaggtacaggcggatcttctggagtgaattacttaaagagagctcttgatcagcacttcttcccagaactatggagcctgcgaacgaagctataaatattctataaaaagatagagaggtagtaagaatgagcaaatggattgatatttcacagcctctagacaaaaaaacagcaggatggcctggtgatactcccttttcttatgaagtgaattggagtaaagaagagaccggttctgtaaatgttggaaaaataacaatgagtatccataccggcactcatatcgatgcaccttttcatttcgacaataatggaaaaaaggttatagatttggacttagatttatatattggacgtacaaaagttgtccatattccagctaataaaagcattggaataaatgaattgtcagatgttaatttaaaaggtgttacacgcttattgattcgaacagacgcgtggcaagaccgaagtgttttccctgaaaccattccttacattgaaccaagcttagcttcttacctagctaagcttggcattcgcctgctaggcattgatctgccttcagtagatccactcgatagtaaagaactagcggctcaccatgaacttgcataccacaaaattcatattttagaaggtgttgtcctagataaaatcccttcaggagactatgaactaatcgcagctccccttcctttagctgaagctgatggaagtcctgtgcgcgcgctgctgaaaaaaatcaactaacttaaagcgactattaaaagaacgaatctttttcattagatagtttctgatctatacaaaaaagagcggtatataaatataccgctcttttattatagctaatcaaatttttcaacttatttcttcttattcatatctatttctttccttgatactcctgcaattccccagtgcgaagatggaacctcgttgacaatgatccttactctttccttttcaacgtgaaggctgttagaaattgcttcggttacttctactaacatgtttttaatgtctttttcttctcttccttccaaaaggtgaacttgtacaatcggcatactatcgacttcccttaaagttttctatacaacaaagggtctttatttttattttcagtttcagatgaaataattattaaaaagttctagttagctgcagctgaatgatacgctgcctaaatcagcgaactgtgcatggatactatcacctgatctaaaagaaattgcttcagataccgctccagttaatacgatatccccttttttcaacccttctttatgctcacctagtttattaacagcccaggcgacagctttagcagggtgtcctaatacggcagcacccgcgcctaccgtagcaacctctccgtttttagacatcaccattccgatattagctagattcacttggtcaggctttatccaattgcttcctacaataaaacgtgaagacgaacagttgtcagctactacatcaggaagagtaaatttaaaatccaagtagcggctgtctataatttcaagagctggcgcaacatattttactgcttttaaaacatcttcttcagttaagttggttccacagaggtcttcccccattaaaaaagcaatttcaggctcagcttttgggtggatcagctgattaaatactataggttcccattcaagtcccagcatgtcgcttgttaagtatccataaatcgcttcatgtacccccatcatttcctgcttagccttacttgttaaaccaagctttacacctactcgttttacaccgtcttgtacttttcgttcaatcaattgtttttgcaagctgtaagcttcatcaattgtcaaatcagggtagcgttccgtcacttttgttacttcatacccttctctttctgcagataaaagatagtcaacgatttctaagtttccacttttcgttaaaggcattatcacatttccacctttctttgagctaactcagcagccacgtctagaatcatatcttcttgcccgccgactgcttttcttttaccaagttcaagtagaatatcacgtgaatccaaattaaaacgctttgcagcacgctctgcatgaagcaagaaactagaatacacgcctgcataacccattgcaaggctcccctttcgaatttcttgagagcctggcaggataggtcctactacttcttcagccagatccattattttatatagattaatgccgacatctattcctaaacggtttaacacggctattagtgcttcagtttgagtattacctgctccagctcctaaacaacgaacacttccgtctattctcgtggcgccttcttcaatagcagcaagcgtatttgcaacagctaacgaaagattgttatgagcgtgaaaacctacttcaacttgaaggcattgacgaagtgctctaacacgttcacgaacttcatgaggcaaaagagctcctgctgaatcagttatgtaaactccttgtgccccatagctttccattagctttgcttgctccacaagcttttctacgggtgctgaatgggccatcatcagaaaaccgaaagtttccatccctaatttccgagcatattcaatgtgctgagcagaaacatctgcttccgtcacatgtgtagctactcggactaaacctgccccaaggctatttgcttgcttcagctcatgtaccgttccaattcccggaattaaaagaacagcaacggtggcttgtttcgcttcttctaccgcagcctcaattaatttcatttcgtcaacgagggactttccgtattgcagagtcgagcctcctaatccgtctccatgactaacctcgatatagtgcatccctgcatcgtccagcgctctcgttacactttttacttgtgcttctgtgaattgatgtttgactgcgtgacttccatctcggaggctgacctctgtaatcttaataggcttatcactgttacgtttcatttgtcatagccctctctttctttattcctccatataagctctcttcgagtttatagcgcgcataatcttccgcaaccttcgcagcagcagccgtcataatatctaagttaccagcataagaaggaaaataatctccggctccagttacctctaaaaagactgttacttgatcactatcaaataacggttcttgctttaaattatagcctggtacatattcttgtacttttttgaccatatccttgatagccttttgaatagcttccttcttcatatttttcactttacaataaattgtatcgcgcattaaaataggtggatcagccggatttaagagaataatagcttttccgcagtctgcacctcctactttttcaatagcttttcttgtggtaacagtaaactcatcaatatttgcccgtgttcctggtccagcacttaggctagaaatagtagctacaatttctccatatgttacatctgcaacttggttgattgcataaatgataggaatagttgcttggccgccgcacgtaatcatatttacattttctgatttaagattttctccaagattaactggaggacacacgaaaggtcctttggcagcaggagttaagtcgataaccgtttttcctaagtcttttaaaatctttgcatgtctaacgtgagccttagccgatgtagcatcaaacacaatctctgccaggtctggattttcagcaagggcttttattccattgctgtatgtttgatatcctgcttctctcgctctttttagaccatctgaatccggatcaattccaagaacagctgttaactcgataaattcgctgcgctgaagcttatacatcaaatcggtcccaatatttcctgagccaataattgcggcttttactttttccactactcttcaccttctttccggtattattcaaaacgtacggatactgaaccaagagaaccgaattctgcttttactacatccccgctcgcaactggtactgctgcagatagagcccctggtaagattaattcgccggcttttaaacaaatatcgaaatcagatagcttatttgccagccatgcaaccgcatgtgccggatgtccaagggcagctgccccagctcctgttgcgacgagctctttgtttttatagagaagcatactagtcgtacgtaaatcggactgttcaattgtggaatatttattccctaccactactttggcagaagagccattgtctgcaaccgtatcgactaatttgattttccaatcggcaatacgactatcaatgacttcgatggtcggcaccacgtatttcgttgccattaagacatctaaataggtaacgtttggcccttttaaatcttcttctagaataaatccaatttccgcttcaatttttggagccaccattgaatgaatgttgattatttcattatccgttactttcatatcatcaaataagtgtccataatcaggctcactaactcctaacatatcttgcatggctttactggttagaccaacttttttaccaataatcttttttccttcttccagctttctttttacaatctctaattgaatatggtaagaatcagctactgataaagcagcatgtcgttctgtaataggagaaattggctgattcgtcttttctgcttctaaaagttcttctgcaagctcactaataagtgtacgcatccgttaatcacctcttttatagagttaaagtttcatcgtaattgttttggcttcgttataaaattcaaagctgtgccggccgccttcacgaccaattccacttgcttttgctccaccaaatggcgttcttaaatcacgaatataccagcagttgatccaaagtaatccagcagtaacttgagaagcaacgcgttgtgctcttcgtaaatcgtttgtccaaacgactcctgctaatccataaatagaatcattggcaatttgaattgcttcctcttctgttttaaatggaataacaacaagtacaggaccaaaaatttcttcttgagccacacgcattttgttatctacgtcgtaaagaacagtcggctcataaaaatttcctttttctaaaccttctactctttttcctccgcatgccagcttagcgccctccgccaaaccaattcggacatattcatcgaccgtttctaagtgactttgtgatacaagtgctcccatatttgtctcttcactcagaggatcgcctactttaatatttcttacctccgccgtgaacttttcaagaaactgcttataaatgctttcttgtacaagtaaacgagaacctgctaagcatatctctccttgatttcgatagattgcttcgatagatccttttactgcttcatccaaatccgcatcttcaaatacaatattggctgatttgcctccaagctctagcgaaacaggaatcaggttttctgctgcatttcgcatgaccgtttttcctgtattactttcccctacaaatgaaatacgccgaacggacgggtgagtagacatagtagttcctaccgtattccctggacccgtaataatgttcaacacaccaggaggcaatccagcttcattagcgatttcaccaagcattactgcacttaacggtgtataagaagcgggcttaataaccactgtattaccagatgccaaagcagctgaagctttccatgtcatctgcataaatggtagattccaagggataatgaggcttgtaactcccgctggtgaatacttggcataggacattacattatgcttttcgtaatgttcatgcaccatatatttagccatctcagcaaaaaaacggaagttttgagctgctcgtggaatatcaaactctcgactttctttaataggttttcctacatctagcgtttctaaataagcaagttcatctactttctccataattaagtcagccattttacaaaggatggcagagcgctcttcaacaggcatcttgctccaaataccgctttcaaatgcacgttgagctgcgtcgatagcgcgctttgcatcttctgtgccgccattagctacggaagctaatttctcattcgttgctggattaaaggtatcaaaggtttgacaggatagagcgtctacgtattctccattaataaaaagctttgcatcttttaccgtcattttttcaataactgcctctttactcatcggatatcctcctcatcctcaatctctaaaaccatttcaatttctacagctgtgttattggggagctgagccattcctacagctgaacggccgtgtttccctttatccccaaatacttttacgagtaagtctgaagcgccatccattactttaggctggtccgtaaagtcctctgtactatttacaaaaccaagaattttaacgacacgcttcactttgcttaacccgtctaactcgtagcttaccgcactcaatacattcagcatggattgctgagcagccttatatccctcttcaattgttaaatccttgcctaacttgccgtgatattgatctacaccttggccagcagtaaacaataaattacctgttcgtacacagctgacgtagtttcctactgaaggacgaacctttgacagcgttaagccaagttcttgtaatctattctctggtgtttgtactgttggcataaatgtcaccccttttctcttgcccaatgtttaaaaacttcgcggcatttccacctaacatatctactctttgttgttcagttaaatccagcgtttcatccagaacttttccaggaacaacttcacgcagtaaaaatggataatccgaccccataaagattttttcatgtccaaaccgttcaatcatgtactttatatttagcggatcgtagtttaacgaatcaaaataaaattgctttgcatagtaactaggaggatgtgttgtcagtctaaggtgcggccatacttcccaccctttatctaatctaggaagaatataagggaaagatcctcctccatgtgcaaaacagacttttaatttagggaatttctccataatgccgctccatagaagagttgcagccgctagtgctgtttcacttggcattcctacggtatacataaagttatggtttggcattcgatcgcggcctaacgtttcccacgggtgaatgaaaatgggcacttcccacctttcagccatttgaaaaaactcaatgaaagatggatgatctaaattttgaccattgacgtttgtcccaatttcaattccatgcagttttaattcattcatgcatcgttccatttctttaacagccgtaggtccgtcttgcataggaaccgtccctaacccaacaaagcggtcaggatacttagcaactgtttctgcaataaaatcattttggattttagccatttctaatgcatgttcgggctgagcccaataagagaaagtaacagggataggagataatacttgaatatctactccttctttatccatgtcagctatacgtttttcagggctccatacttggtctgttacgtctctgaaatttttccctccgaccataatcgatgcgccgcatgtacatgtacgttctagcacgggccagcgttcaccgccatatttttgagcaaaatcagggaaactttccggaatgatatgtgtatgaaaatctattcgcatttccattcactcgcttccggtgccataacatgattacactttttacatgtgcgtaattctaagctcctgttgaactcctgaatggcttcttttacttgaatttcaatattggttagctgaactttcacacgatgcatctccgcatcacattcatcacagaaccatacaaagtcttctaactctccttcacttctgtttcgctcgataacaataccgattgtatccgctacacggtgtggagaatgcggaacgtttggaggaagtaaatatacttcgccttctttcaccgttacaacttcgcgcttgccttcttcattaatgatttcaacatagcaatcgccttttaattgataaaagatctcttcagaaggatctacgtggaagtcacggcgtttattgggtccgcccaaaaccataaacatcaattctgagtctttccataccactttattgtttacaggtggttttaattggtctttatgctcttcgataaacttccaaagatttaatggtttagatgattgaatagtatttgtcattgagataatctccttttaataaattttaattttcaaaaaataaaagttagtttgattacacttgaaaatattaaaatcttaaaatgtgattaattaaggatttccagctcgcttacttttagttttttctgcatgtagacgacttcatttgctaaattcttaatacgatctaacacttccggatcggctacctcattcttttgattaaagtgagtggtatgagcgtatacataactcggtgccacaaaagcacgaaagtaacccgcaataggctttaactgattttcaatgactagataatgctgataagtaccgcctgtggcgatgaaccccattactttatttcggaaaacctgaggatgtattaaatcaaacacattcttaagagcaccggttattgacccttggaagataggtgaaccaattacataaaaatcagcgctagaaataatttcaatgacttttttagtatcttctgaataagtagagggatcgcggccatcgcaaaattggatagtgtaatctcgtaaatctaaaaattcaatttcgatgtctggatgctgcaatttagcttcttccaatacttgttgaaccacagcgcctgttttagaacctataatcgtgcctgatatgcctaataatttcattttcactttcctccttttaaagaagttttatacttagcttcaaacactcatttttttatacatattcctgttgtaaagaccagcctaataaatcatttgattggtcaattgcaccttgctggattagctgacgaattctagtagaagagattcttgttccttctgaacaacagacaggcgggatgatatctactagaaagtgctttgccagcagtttgatatctccttctctatttcggccgaaacgaaaatcgttgcctactatgatctccgatggattaagcttttttaagttactgataaaatcgattgatgggcgcttagcgtataactcatcaaaatggataataactgcgtagtctactcctaactcagctatcaggtgtaccttttgatcaatgggcgttaacacttgatcttgttgaaaatgaaagcgaggaggaggatcaaatgtataaacaacgctaggtacctttaacgctttgcttcgagttacagcttgcttaatcactgcttgatgtccttgatgcacgccatcaaatgcacctatagctattactgatgctggtaaagttagtattccgtcctcatacctttgcatctttacacctcccttattaagaacgtaataaacctagactctgtatctattaacaaagtttatttttagataaaaggagtatgggtatcagctgtttgttacttctttctttttagcttctgtatttaatgcagcatctaccatggcaaacgaatggctgcgcttatagctattgtagaaaatagctcttttacggattggatctcctgtatagtatcgctcgtattgtagtaacctttggccaaatgcttctccacatagatcccacgctaatttaaataagtgaacacggtctacagcaggtactccttctcggcctccataataacgatttaaatcctctcttaattcaagattttcaaaatctgctcctgtaggagacataagcaaaccgcctgcaccaattgtttgcatgacttcgatagcacgagggtacattttaggaagcaatccacgaattgtttctaaagctgtttcatttggaagagcttctcctttttcattaatcgtatactcatattctgatgttcgaagcaaagctctaatagattctactgactgtaccaattcccctaagctttcttgaacgtttagatatccgtctacaccgattgcatccgctactttacaagctacttccgttgcaaattgaagtttaattaatcctcttacgccagattgatgtgcaggttgttgagcgattcctgttttaggataaagaagatttgcagcttcaatattgttatataaaaacactcgattccaaggaatcagcacatcattaaaaatcaatactgcatccatctcttcaaatcgagaggctagcggatgatcaaacaatgatcttgttccgtcttgcatagcttctcggcaaagaattcgaagtcccggtgtatcaattggcagcgcgaaagcaagtgcataacgttcatctccaggtttaaaccctgggaatgaataaacaatcacttcatcggtaattggtgaaagtgtagctagcattttagctccttttacaacaagtccatctggtgtttctttgacagcacctaaatgagtaaaaagatcttgctgttcatatgaggctttgcttcggtcattctgcgggttgataatagcatgagttaaaaacaagtcattatcacgaatataacggtaataatctcttatattctctccccactgttcattgtaattatctaggaaactagcattatgaaataaagaagtgactacaacatttaagaaatccggtgttcttcccatcagcccaaaggtagcttttgcaaatgcttcaaacacttctcggcgagctactaagtcttcgtaacttttaggaattaagaaggcatttgatattctctctcctgtttcttcgcaaatatgagtaattttctcttggtaagctgggtcatgctgcatatcgtacaacttcgcaatttctaaaataggctgttgaaacaccttttcttcaaatacatttgtaatttttctgccccctaaccaaatttctggctggcgtgattttaatgcaccaatatattgagcacctgtacgaatccccatatttgttcatccccttaaggtttagtagtaattaattgaattatagtatttaatttttttcaggggtgtagtctcgttaacacttttttgaagttttttatttttgaaatagacggagtagcttaaataagaaatttatattattgcatttacgcatttttcgctttaagatattgtagagagcttaacgtttttataaaaatactggcttattaaaaaagagagcaaataaagcgcacattattgtaagcgcttacttatttttatagtaaaataaataaaatcccctaccctatagtgtgttacttgatcttacaattgtcttttcaattttttaggcgtatcttatattttggttaaggagtgagtatgatggctattctcttcaatcatgaaaataattttaaaaactacttaatgtacggaaaaaggcaatatatgaaacaaaaaaatgtggtatatgaacaaggagacataggagaaggattttattacttggagagtggattaattaaagtccatacctctaccccattagggaaagagcgcgtgttaaacattgtattgccaggtcaattgttgggagtccaatcaatggaccaacaagctcatttcactactgctactacagtaaaagattccgtactatattattttagttatgacgatttcaaaacgcttataactcatcacccgcctatactaaaccttattacaaaaagcatcattcaaaaaatgcatatcttagctgaacaaattaatttacatacattaactaccgaacagcaaatcgccgctgtgcttttaaatatctatcatgactttaaaaactatgaaattcctttaacacaaaaagacttagcaacgtgtaccggtttaacaaggattacggtttataaaacgttaaaaaaatggaaagaaaaaaaactaatagatagtaaaaataaaagatttctaattaagaacccggatctgttaaaaaattacctctttcattgataaacactttggtcatgttatcaaagtaagaaataatgcttcatatataaaatatttctatacgttcaaactacacgtttatagaaaggtgattaaatggtaaaccttcgatacatatggcgtccctttttaaagtatggacagatgataaaattagaagaaaacaccacgatctattatcaaggagaagtcggtaaaggattttattatttagataaaggaagtgtaaagattactctcttaactgagaaaggagcagaacgtacggttaattatgtacctgaaggcatgttattaggtgaaaacggtattaataaagagccttatttaacaaccgccgtaaccacagctccatccgttttatattattttactaatgaagcaacgttaaaaatatacgaggaggaaccgaaagcagtcattctctttacaaattctcttctctataagtttagactgctagcagaaattattacgtttcttaacctccccattgaacaacagatggctcattatttattaaagctcgtaaaagaaaatgaggaatttccctttaatcaaacatcctttgcccgctacgttggaacttcccgtattactgtgaataaaattattcaaaaatggagtaaagaaaaatggattgagctgtctaatcaaaatatctatattaaaaacagcagtaaacttaaagaaataagagatcaaaacagcaaaaatataggagatttagatatgctaatgctgccattaatgccattataaatacacttgtgatgctgcttcgcacatagaaggtatggaagaaaatacagcgcatgtgaaaatataattgaataacacaagaggttgagacataacgaaaggaatccaacctaaagacgaacaaatgggatacatgagctgaatcgcttatgagaccgcagttgatttccatgcaaggcttcgctttccgccggcggccgctgagcctcctcgtcgcttacgctcctgcggggtctcatctgttccgcttttcccgcaggagtcttcgccttgccctccaatcaactgctagaagaaacgatattcaccataacaaaaaaacgaaccacgaatcaaatattttgatcaatagttcgtttttcacttgagctaaaatacttttttttcagcctatttcagcctcttagtatgcatgtgtaattaagataaaaaggaaaaataaggaccaaacagtcccgaaaaccataagcgagatacgcaaaagtttctctgctgaaaccttaaatatttttccgatgatatcaaagaagatttctgctatccatatatcaggagcggaactaatttcatcatacgaacgcttccatcccccatagataaagataaaccctactaaaatcatgcaacaaataatagcaactgccatttaagtcctgctttcttttatctttaattgtatacgttatatatattgttataaatacagcttacttatcaagcactattttttcactggtctctgcagatgttcgaaccgcatccaatggctgatgaaattcaacggcatcgtggaagtttgggatttgacttttatgttcaaatatatcgtttgctaacgcatgataagccgtttttatggacggcattcataagttcttggtgttgacattcaaatacatactgagcgttcaaaagcctccccaagtgttaaaaataaatttgacattccataataagggaaaatttaaatcgtttagtttttttgcaggaaaagaaagcgcagtatataaagataacagtatacatcaaaaagtgttgagaacattttattatcattttctatcagcacgagagcaataatttgagaaaagagcttatataagtccgtgtcttaagtatgcctattatatagaatgggttacttagtaaataagggaaggtgatttatatgtttggggaagaagatttaaaagtaaattgtatatcagctgctataggtttacttatccaacataacattatcactcaccaggaactggacaaactaactaaaacaaattatcaagttttttacaattttctaatggataagctaattgaacaagagtttagtaaagaaagagtggtacaaacataagtatttcaacaaaacaaaaaccgcatgattaaaagaaaggatctcatatttcaaatataattcttataaggctccttacatattagacatatataatatgtaaggactctcttattcaacaaacgccccctatagtttaagtgtacttcttcacaatctataattttaaaagtcattttatcacaggaagtctgccagtattgttacaaaaaaagtcctctcctcgtttcaggaaaagaacttaaattcagtgaattttataagctacttccaagtctgatccagtttatctgaatagaaatttaaggctcttttataacttagtatttcattgtcatttgtcgtatttattaagcatttcagtatcagttccatcgctttactatgttcttttagattgtataaagtcatggaataaaacactttaattacatgattatctgggaataactccattccttttaaaaatatatcttttgacttttcatattcccccaaggctctatatgtgctgcccaatcccaatactgcaccttccatatccttagaaggtaatcctatctttatggcattttcgtaaaagggcactgccttttcttcttctcctaatatgtcaaagctccaagcacattgatagttatataaagcatcgtctggaaattccttaactaattcacttagcaattcgttagattctttgtgatttccattctttcgtaacgctaatgctttatctagtttgttattcattacttaaatctccaatccttctttctcccactacttatttatctcttaacatccttccatatccggaaattcagggtattcgtacactttatcgagatctatttcttgctttaactatccttaatgtttaatttttaaaggctaacccattggcctgcaaagctgttctaagtttaggtaaagaagccggccccataccgtgaaattgtaatatctctttttcactaaattttgatacctgctgcaaagaagttatcccgttattttccaacgctcgtcttgctggtgctgatagcattaaaagaaatccattgtcaggtttgcgttcttgctcgcaggttgggcaggtcggacagttactgcttttataatatttgtgtcctttatgacagattcttagatttccctttttggttttcatttttaatctctccttttctcaagaatttttttagcttttatcccctgccacttcttcaacagatggttatgaaggaacaaaacatcctacgtatagtaaattaattatcattaaatgcttgttagtctcgtttcagatagtgtagctccattacaaataatgctaacaccttacatgtttgcgtttgaaaccaagccgtcctctatctatatccttttgaatgttttcggaagcaagaagaatactactttttttcttatccttcttaacttcgactggacctactgcctttgcagtttcaagcgccttctcatgaagtggcaaatatgaaacaccgactgtatagacaaaattattcatagccgattttgttcgatctggagaatcgtgaatcgtattttccacttgattaagcatatcggcaatcttgcttgtgctaaattcatcgtcaggacgattacccaaaagccagcagtaacaactccaccctgccgacattttaagttcttcatcacttgccacccatctatcagcaacaacttgcgcaaaatcggtttcggacaaagttactgaaactacataatcagatatcatgtaaaaatacgctttatcgatccatcgctcaaaatcatccgcagtcatctctgttgggtctgcaatgataccggcaaaatacatagcgtcataattgccagaagcgtaaagctgctcagccaaagcctgatttttcttgattttctttgcaataggcttcatttttcctgttgccactccaaaaagtggatcgtgtgcaccattgtttatgtaagtctttttaattcgttccgtaccaagtgcttcgagttctttcataaccatttcaaagtccatcgttctgtaccctccttcttctccattcataagctggatcatcttttctttttaattcagcttccaatttatcctgtaatttctaagctacttggggatcagctcaccttttataatcagctttttattttcgccaaaaagttgaacagtctttcttatctaaaatattaaactcgattatttttttaagtaattcatagtttactggctcagtccatagaattcgaaacaggcctttggtagcgctgtatccagcctgggcaatgtcatgattaaagtgcgcaatgcctatttcttcaggtgaaacgctcaaatgatgtttcgctgaggaaaagccgacgataaatgtgccatgatcagtaaacattggcgtattccatttgatttgtggttccaaattcgggaaagtattagcaatccaagccaaaacctcctctattcggtcacggtggtcagggctatctatacgcgctaaatattctgcaaaaacttccatagctttttctcctcaaatgaaatttttttaatctactctacttttatacaaatggaacatcagtcagttcacttcaccttatttcattttcaactcaaatacattaacaatttatattagccatgttttaaataaaatgtactaatcatttaatccttttccattgagaatgttcggaatgcatttttcaacccttgattctcgagtcttagattgtttggccgcagaaaaataaagaatatatgctctttgtcgtcctggagtcaatgtagtaaaagcagcttttagagcaggtatttcatcaaatttatgctgtagctcttcaggaataatgagttcttcaggctttttagctttgacttttaatccggctttttccacctcaatagcctcataaatataagctttcaagatggcttccttttcaactatttcttgcacattggtaaaacgaatttgtcgcgccccttgtacattctccgtttgttggattaaaataccatgagaatcttgtaacagagcacctttaggaaacaggagcgcacagtattccttaaatccatgtactaaaacaatgttttttttctcaaacgtgtaacaagggttcatccatttaaaatcttcggtcaactcgcagtcaagaacaatctttctcaacgtctcatattcatctttccactttttagctttacttaaaaattcatcaaccttaggattcatgttactatttgtcatcaaggaacactcctattcaattttttaatctgtcgctctagcaatcatacagtcaaccttcaattcatttaatggtgttactattcttcaaatgtaggaaatgcccttcttcaattgacttgatagttattaaaattataaatattttaactttataagaaagaggccttcgtttacttatcaagcgctaccctttcaccagtctctgcagatgttcgaaccgcatctaatagttgatgaagtttaacagcatcgtggaagtttggaatttgacttttgtgttcaaaaatatcttttgctaacacatgataagccttttcaacgtaatcttttgggtgattatcttttgctgaaaatacatttatctcttcaacatacacactttcagtacttaataaataagtaggatacttaaccttctctaatttgagattaccaaattgtacgtgaccggatgaagaattctgggttaagcgaaagacacctttttctcctctaatctctaattgaaaagcaggataaactccgccttgaatatgaacagaagccgagatatcatcgttgagtgttccctgtattaagatttggtccgctgtatcctttggcaccgtaacttctgttccttgtatgagagcttctgtataatgcgtattgattattgacgataactctttaaaatcacctaagatgtagcacagaacatcaagcgagtgtccaccgttgattgtaagaaggttcgctccattttctttttttaagatatagctgtttgcttcatctgttattccaccctttccttgtgtcgctacctgcatggtgcaggaaataattcttccgatttccccttggttaatagcctgctttacataattcacctcgggagattgtcttgcttgtaacccaatcgcatggtgaatgtcctccttatccgctaactttgccagtttaacagcctgcttagtatctacacctaaaggccactcgcaataaatatgtttcttttcctctatggcagcaattgaagcttcgtaatgaaacggaacttttacactaactactactaaatcaacatctttagattgcgctaatcccttatagtctgtaaagctatgggaagcatcaagtaccctcgcactttccttggcggtttctgcttttgatgttccaattgcggttattcgataaaaagggctttctttaagcactggaatatgtgttttgctcgcccattgattatttaaagatccccctataattcctacttttatcaatttctccttcattagacattcctccaacattttgtagaaaatattaccttttaatcaagtataattaaaatgaatcatcattttaaatgttaaaatatgatggctatatcactttttttgatggagggtgaatatgaatggatattgaaaatatgaaagcttttgtttcagtggccgaattaagaaatatatctgcggctgcaataaaattaaaccatcttcaatctaatatgaccgccaaaataaagaaaatagaaagctattataatcaagaactgtttattagaaactctaaaggcgttaaattaaccaagcaaggagaaaagttgtatcaccaatttaaaaaaatattgcttctttgggaagaaactgaaaataaaatgaagaaacaagatgaaaaactccgtattggcaccatgatatcagttggggggactcaattctcaagcgctttaaacaaactttacaacacctatccagatctagcagtaacattaaaaacgggttcaaccgaatatatcgaaaatcaaattctacttggacaaatcgatgtagcttatacaattggatcattaaacaaccaaaagataaaatataaaaaagtaggcgtagaagaaatggttgtcattggtcgcgatattgatcaacacacgacatttgatgactatataaggcaaaaaaatgtactggtactttcagataagtgcttgtacatgacaatattacatactatttatgccagcttacatattgaacaaggtgacatgatcgaagtcggcgatccagaaacattagtacaatttgcgttaatgggcatgggaatttccttagtatctaagcgtatcgcaaaccgttataacatccataattatttagaagttccaccaccttatcggtacactgacttttatctcatttcccggctaaattatgaatttacccctatcgaaaaacagtttattgaatcgaataacttccttggggacacttttagaagagtagaagtttaatattgaggttacagtttttcctgtaaccttttttgtgatttcttggctatcattgttttttatataggtacagtgaaggattttttcgctttacataaagcgtattcttagcagccatttataaaaaagagcaaattaatgtttgattcgctctttataatcttccctcatatccaacgtgtagaattctacaacgttatcttcagtatccttaaaatacaccgcttctctttttgcatattaatattaacctcttctataaccttatggtcgatactagcatcgtttaatactttaatggcagaatcaaagttctctgtttttatatgtaaagcaaaatggacatgaataccaccaataccaccttaatcataactattcatacctaatacttcctaaatatttaacaccattaatttcgttatcactctttttattgtgctgaaaatcataaattaaaatcatactgttaaaaccatcaggcaaatattctccatatttttcaacaaagttaggacttactacatcatcatacgaacagccttccaataagcacgaaagcttacgcatgttctgatttgcataatgagcttcgctaaaatcttcgtcatagtaatcaactttaaagtccttttcaaattgtgagggtatagcatctccatcttccgtataagcaaccaacagatatttttctagctcttcgctagttgaaaacttaccgatccataaagatacataacctatctgttccatacaatccctctttccaaaaaacatttcttacattacaatcattctttatactttaactttacacgaattaaacatcgattagctcacttaatctcattttgttctttaaaccaaacgcgtcatcaataaaaacaaacagttcacctaaggaatcaaaaaactgaatgaattctgtctctgttacgcattgacccttcttatactatgtaaagtgcacttgctaattcatatgtaaggcttcaacccttgccactctaggtgtatagctttaataatttttggcggggcaaattgttcgcatcatttgtctcaacaaaatattctaattgccatttttgtgtctcaatagcttgtttgctagttggtttatcccatatcggatacactctaatagccattttaccttttgtggtagccgttttaaggattttttgttttaaaagaacttcttttggaaaaatgaattgcccaaatctatttgtactagtgaaggtattaataactaatagatcggtagctttttcatacgaaaaggcttggtttttacgagccgcatctttttcccaaaaagatacaaactgccctaccttattaggtgtagttttcgccaccctaaaccttatagattttgaatttaactgaaagataccagcgccataatctgaattctgagcttcttctcgaatagcttctataacgaagtgattgggtttataaaagttctcatttacatatgttaacgcctcataaaattccattgtttttaccccttatgtttatagacctcttcaattaataatacgtggtttgtatttctttcctctaaatcgcgtctaaatatcttaaatattccaaatgatatagcaaagctatcctcgccttataacacctcttgatcccttaagcgttgctaccctcttaatatagttaatatgctacatattaacctcatttttccactttggttcgcgatctatttgtattactgaaatacttggaggttcagttgaaaccacatcaattatatgatttaaagcatgtattccataatgtttaaacggaccaggatgtatatcgtcagctgtggtaccaacttcaataaaatctagatacctggactttgaataaactgcaaaagcgcttcctttatacatttcatactcttctattacggtaaaactttcgtttctaacagagtatgcaatgtaccaatcaaatgtaagtcgaattataggaagtgcgtaatccacatcaatagaggcataagaagaagaagtactttctcctgttttctcttcagctacatttccactaattttgcaacgttcaatatctactattaacgcgttatcctcaggttcaaatatagagtttaaataaatatagccttaatattgaagcagtttagagtaattcataaagccctccttttttaaactaaaacatcgagtgagttcaataacaaataaaaaagcgttcattcttggattgcatctattcaaaaacctctaactttgaatatgaacattagaatgaactatgttgatgaatttttcaaaaagaaaaagatgtgcactaaaggtcttataaataataaaacttataattggcttagctgcttactatggttacaaaacgtataaatctgaaaaaataagcagtaaattattcgagctgttgtttctaactttaaacgaatgagcaaaaagatgacgcgttattggttcgcggcaagattgtctaaactttagaaaattataggcaggaagttaggatttattttatcttgaatatgatctttctatgatcctgctttatacgtttcaagcgcagctctatttttctatctaacattttatgtgcaatttggaaagttacacatatgaacagtaagataacagtaataattatagcgtctggcacttgaaagcaaaaacataatactgctaaaagaaaagatatagtacaagtaaagttgattatccattttttatttctatgagcttgaagacttttttcaagcagctgcttttgtccttcttccctttttatatcttctgaattattgagtgtagagttcaatgttatttctccttagaaaactaattttatataatttatatattggttattttttccttttaagatcatagtatagttggggctcttaaagagaaagcaaaatctaatcaattgttttggcaagcgcataggcttgtttgcgctgattacaatatcctccaacaggctcattttctcctcttcttcaacgtttgcgtttaatagaaaaaaataaagcacggaatacctctatgtcggtgcatataatgactctatttggcagctactcttaatcgatccaaagaaaccatcaaaaaagaacattcgttctctatattatacaggaacaaacgttctattttcaataaaaactctaaagttttccgaattattcctatgaatagcgtcgaatttattattaaaaaagaaatactttatatacctaaagaaagatattgagataatgaaaataaaaaactatgagaaaatgttctacaaagcaaaatttcggaatgaaataatcaacaaaatttgccataataagtgaagtaaggaggtgtattatgtttcgattgtatggagccttaattgggcttagtttaatttggggtttatcttttgtatttatgaagtggctgcttccctcagctggtatatggggaattgtattttttcgttgtctagcaggtgcaatcatcttgctcccctttctctggtggaagcgtagaaaagttaaagagaaactaccctggaagacgttgattgttgttggtatatttaactgcggtttagcctggggattaatttccttaagcgaaactgagataaacagtacgactgcctccattctgaatgcgaccactccaatctggacaggtcttatcggatttattcttttttcttatcgacttaccggacgtcagtggatcggtattcttatcggttttttcggaatactcgtccttatggattttcaatttggtcagatttttgggaaagggtttgttgggattggaacaatgcttgttgcttgtatctgctatgggcttgctgggcagttaacaaaacgtcttctgtctgaggtgagtgtactaactataacaacctttaccttactaacaggtgctatcatcggtttagttgggatgctgattactcaaccgttcaaatccgatttgttgattcatccacttccgattctggcaattgtgggtctcggctgttttggctcgggattgggtcagttaatctatttttatatcaataaaaatggtggccctgaattagcagcgacagttacttacctgatccctgcctcggccatggtatggggttatttactactgggagagacaattacttcaaacgtaatcgttggactacttattatctttgctggcgtttatctttcatctaggaaatcaaaaggggaaattccgcatgtcactcttgttagcaataaacaaaattaagtaagtagattttataatgtgagtctttaaagttatcttcgagagtagaattaaggaactgaaggactacagaatatgatatatctcaaatggaattcatcatatgtgatgataaaacgtaattctagttgttcaattttgtttaaaaggcagccctctgtttggctgcctcttttatttcaaggaagaaaataattttaaaattcacttctagttatcccatacaacacaacatcaaacaaaaaacgctgaatttatagatgtagcagattcgagatattcccacctaacactctgtctgcaacttctccactagatgtatgacgtttaacagcctgtagatttaaatatggatctccatatggaaagtccgaactaaataacgttctctcaggtatttcttttatagccaaagacaaggcgtatgttgtataaaatgcagatatatctaagtaagcatttttagcgttttttatcagttctatcgtttgtagccaatgaattccgcccatatgcccgtatatcaccggcacattttcatgtttttgagtgagaagaaataactcttgaatatcctttaagttcaaaggatgaaaagtatgtacccagataggcaaaggtgtatagtcacttgctgctttaaatataggttctaacaatggaatttgacctgtaccaagagtgaattctccgagacctttcatcttttgctctttgacaagtttctctacccagtcgtttaaggtgacatcaccaggagaataagaaagcggaacggaaccaaaccctacaaacctatttggatattgcttaatcgcaacgcttacttcttctagcgcatctaagcgtgcttgtacgggattcacctcattacttagaatttgatttagtttgtttatttccgttgtaaattctttaacgttgaatttaatggccatgaattattaaaagagggcggaatgacaattcaatattcaaaccgtgcacatgtaaaagttttagaggtagaattagatctttataatataaaaggttattttgattttagaataacacatatgacaccactaaaccccgaaaaatccaagtatcaattatttgtggaaccattgaaagaaaaaagaatgtttcaatctacctttatctttagaacagaagcggaaatgagaaattacatggacaacattactactgctagcgatagtgtaggactgcaacatgcagaagaacttgcaattgattaaataaagaataattatagcaaagaccatcttagtatataaggtggtcttaaacgtaattcattttacacaatatcaattttttatgactatctattgggtaaagaagctaaagataataaacgtctcaattaatcacttaatgtagctaataaaaaccgtaaggcagattgtcaattatctgatttctatattcgtttttaattccataatacagaaaaaacgttcttaaatatgtgtgtgattaatagaacgtccgaaaaatgttttttaacttttacgagcggttataattgttaaatcgattttaatgttcgttagattttctggattatagtggaatttccagcatgtttatctttcttttaacttgaaacaattcacgcgacagtcattctaaatcgtatttcaccataaaaaattcctgcatatcaatacaggaattttaatcaaaataaaaaagtttatatctacaagaaacattgattaacaaggagtattatataccttatttaacaatgttttgagttgatcaatctctgcatcacttaattgacgcgtaacaaagagatgagcgtctttaactaaaggcgaaaggttcttctttagttcttcccctttttctgtaagaaacagataatgtgagcgacgatcctgttcactgaacgttctttttatgagtcctttttcctccattgcataaatcatttctacgatagttgtttgtttcttatcaatcgcttctgctagttctttttgagttatccctttttgagtgtctagaacgctaataatgctccatcgcactggagtcatgccataaggcttgagcttttgcttaaaataattaattagttttacatctgtacggtgaataagataacctgttaaatcatgtaagtccataacgtcacctctgaaaaatagtaaaatataaggctttattagtaggcgatacctacacgtgatcctatgtaatcgctactttttatctggctaaatgtaaattctgctgtatctgatacggatatttcagttccgccctctggcaaaaaatcatcgtctatgcgatatttccctatgctttctccatccggcaaatacgtaggacagacaatcgtccattcgaggccggaatgttttagcatagtgtatatgatgttcttttgctgcacggactgacctgccctttgatttccgtctttatttaaaccattcccttgaataatcgttaactcttcattagttatttggatcttctctggagtgcgaactaatacagtaacatgatgtccgtcatgaagggcatgattgactatttgacttccaactcgtccagttgcacctaagattaaaatattcatgagaacgaacctccccttccccatacaaatagtactctatacgttaaaagttgttagatgatctttttcaacagctaaaataaaaaccacgaagtaaatcgtagtttttatttcgcaggtatcccctctactttaaccttagctggtttcgtgattttccaacctagtaggataacaatgaaacccataattataagaagatataatgtgggaacgaaacttcctagataatcatgaagaaatccaattataaacggacccactgcaccaatcatatatccaatggcttgagtcattgctgaccaattacttgcttctataggtgaagctgtcttatctattggtaacaataaagttagcgagacaagaccgccggcaccaattcctaaacatatacttgcaataatcggtgttacgtttgtaaaacataaaagagataaaccaacaattacagtgagggtaaagaatgtaatccaaaatcttttattgggtagtactctcaggagactaggtaataaaagagtagctggcagctgtgcaatcatagctattgtacctgcaagaccaccaaatgctggcgtccaccctttttcctctacaatggctggtagccatgctgcaaaacaataaaataacagagttacaagtcctacaaacgaagttaataaccaggcctctttattttttaatggcaaggaagccttcttcttttgtgaaaatttacttgtaggagtatgagattgttttgttaccatcaaccaaagaggaatagcgaataaagcaaaaatactccagaatgctaatccatttttccatgaatgattgagccagtgttgaagtggtgtcgttagcccgatagaaatagatgcacccactaccattgaagtagaatatatccctatcatcgatgctgccttctctggaaagtaacttttgatgaaaccagagagtaaaggacttacaacaccaattcctgccccaattaataaagccgttactaataggtatagtgatgaatttgtaaaaacacgtagaaacgttgcaatacctatacaagctataaagaaagtgataactttctctgattgatagcgatttgctaagcgtccagcaaataacgaacaaaaaccaaaacataataaaggaatagaagtgagtaaactagctgaagtagaactcatgcctagttccttcgttattccatgtaaaactgggctaactgacgttatacccggtctaagattaaatgcagctagtataagtgcaaatagaaacaatatattacgattaatcatactaattacctccggttgatttcttgaagtttaattctcttttatggtacattaggttttaacataaataaaatgcatattaattatatgggagataacaaaattgatatgaataaatcacaaattcaacttattgttcagatatcggaaacgggaagctttacaaaagctggtgaagaactacatatgacacagcctgcggtaagtcgtgccgtagcagctattgaatcagaattaggaacgacgttaattaagagaaataagaagaatggattattttttacggatgtaggagagcgtatattagttatttttagaaatatcctgtgtgaatttcaaaaagtagatgaattaattgcggctgaaaaaggattagaaattggaaaggttcatattggagcttacccaactgcttgtacgaggtttatccccaaaattatacgtacaatggaagataagtatcccggtctagaaatcaagctttcagaaggaagtgtagatcaagtgaaagagtggttacgttctaaatccatcgatgtaggaatgattattcctcctgataaagattttgatatcgtacccttaatgaaagatcaattgattgtcattatgcactcaagtcatcctttatacgagaaagacacaataggtattcccgacttacaaggtgaagatatcatacttggaagaggcggttatgaagtacaagtccatgacttatttaaagaatttaacttgaagcctcaagtacgatttgaagttgattatatcgacacagccttaagtatggtacaagaaggattaggaattaccattacaacgaaaaaaaatatcttgtcactgccagaacaagtcgtttttcgagagttgaagccgaacacgttcagagaaattaatatagcagtgctagatattaaagatacatcaaaagcaacagatgcctttatccaaacggctcgtactctttttactaaggaagatgcttaaatgtcactcgatatcttttaagagagaaagttataaaatagtacttaaataaatgaccttatgttggtatctactcagttcgcatatacaaagaaagacagccactttttaaattaaattagcaagggcaaactactaaagacgttttcaaaaaagcatcgccttaaaaataataggacgcaagacagaaaagctactggtctctgaggattaggtagttttttctatttttaagctgcataggatgtacatccgtagttaacataaaatattattcaaatctattgcaagatgttaaagtaattattatcgttaacaaaagaaaaagctacctcggcattggcaagcgaggcagctcttcgtcagggtttacacgtataaaacgtattaaatcaagttcaaaaagattatagcacattttttctaaaaatactatattcttccgtgcaagcatatgtataaaaggtgcacttcttatacattagtttctcaaccacctactgagaaaacgttgataaatcaacagtgtataaaaagatgcagactccggaaaaagaatccttggtggaatcctactgtcccaagggttcttttgcttgtttggttcctataggagacattatgttaactaaacatgtatacgatatacagcttaaggacagaaaaaacgctgggcctattcagtggttttttgtttattgaaaggtagtcgtaaagtgatgattcaatccgtcttgagtagtttatttaaagaaataaactttatgaaaaaagatagaaaaagctaatgatgccttgaggagtgaaccttgttcttacacaaataacaaagattataatttacttaataggcttggataaagtagcaatataatgtttaaagactacagagaataaaaatgatataaaaggcaaccctaagaaaaaataagcttaggagattatacatgagaacaattaaaccaactaaaataggctcgaaaaagtcaaatttcaatgggaagttgacagctccagaaatggggaaactttgggcaacctatatgggtaacagcatgtctaattgtattttaaattattttctacaacatgttgaagatcaagacataaaaaaactagtagaacatgcgaaaagattaactgaagaatttcaaagtagtgtgaaggaaatctttatcaaagaaaatatacctattccacatggttttacggaggatgacgttaatctaggtgctccaagattgtttgcagacgagttctatgtacattacttaaaatatgcagcaaaagcaggacttagcatttatagcattgctataccgttgatgtatagagaagatgtacgcaatttcttaacttattgtatgaactcgacaatggaattagtggaagaaattaaaaaaattttaatggataaaagccttattattgaaccacctattattccagctccagaacaagtaagaattgccgacgctgattatttgagcggttttgttggagacgttcgtcctctacacgcattagaaattgctcatttatacgataatattgaaaataacgtaacaagcaaagccttaatcatgggatttagtcaagttgccaaaagtgaaaagattagagacatatttataaaagggaaagacattacaaataaagcagttgaacgttacatagaaaagcttcactatgagagcttaccagctccaggatttattgattatttagtcaccacttcaacttttgcacctttttctgataaattaatgctgtttcataaggtcgatatgttttccatgaaaatacgagcatttgggaattcactagctgtaaatggaagacatgatttagcgttactgtatggaaaatcattaatgaatatagcaaattttgttaaggatgcatcaaatattctgatagagaatgaatggatggaaatcccacccgaagctgtagatagagaaaatctagcttcaaaatagtatctttgataaaagtgagaaaacaacaaaaaagccttaataaaagggcttttttgcatgtaatttctgataaaatccattatggtgcctaaagaagatacgacatcaaatggacctgcaatgggaggcttgagccgatgcgtgttgaaagggactcgcacggttcttaggggaggcaggggcagtgatgcccctaacttacccgacttaactaaacatgtatatcatataaagcttaaaaacagaaaaaccactgctcccgtacagtagtttttctgttacacatattttatgtttaagtactgatgcctcatgacgtcttaattagttttacgtatatttaaaactttattcgttttatcctaacgttctaagatcttttgctagataaagtgttatattttacatacatttcataatgtccatttatataactagatacctttaaattaagtagaagagcttttaggttaactattttttcagcatctaatccgcactcttttgctatatcttcaattccttttttactgatttgtatgttatcttccaaatcggttactgtttctttactgtactggaaaggaacttcatctataacttctgtaattaattgatcctgcccttcacactctagtctccctttgactgcagcatgttttccaattaatacagcctgctcttttatatccgatagaagaatcattaatctaattcgttgattcattagaatagggtgtttatcaaaaatagagataattttggtttgataatcatccatggttgtgtgaagttgatgttttgcttctcttattacttcttcgctgtttttaataagtatcatacttaaattctctgccctctccgtatcatatatactttcattataacaaactataaaaagggaatgtcatttttcactacttatcacgataaataatgtacatatacaaatattatcatggattcattaatcattaacattgattgtagggaaatataccgactcatagtttttaaagatttacaccaataataagcgacctcattaatttcaattagaattataaggtcgcttataagaaattctgattcaatttttgtattttttccgttcttttattgcaaagcaattgtttttccatcaaactctcgtctcatttttaacatgtatatcaattatactgagcaaataaataaggtaagaatttagtttgaattgcttctcttcaataaagtcagataacattagagtagtattactagtcactccaatttacattttatctctttctcatgcatgatgaccatgattattgttttgacccattttgcgcataataaagcttacaattaacactaaaataatcgatccaataatagctgggataattgcaaatccacctacgactggtccccaattacctaagataagtccacctaaccaggcaccaataaaaccagcaataatattaccgataattcctccagggacatctcggcctgtaattaaactagcaagccaaccgataatccctccaacaattagcatccatagtatttccattaagaatcgtctccttgttaaaagatttagttgactttacccctaaatgagacgaattaatcgtgggatttttttcttgtttggaggcttttctctcagttaagtagaaaatttcacacagatttctttaaatagttactaagtgctagtcctattcaccatatgaatttcctaaataaaaataatccatatatcataaatttatttgtttctatgggtcgtataattcgttttatgttaactagagatcactaagatatcagcgctaaatgcatattagcaatgatctgtcattgtctcctttttatttcgtttaagtgataagaacctattcttttatataaaacagagaaaaacaatccgatttaaagatcaattgtttttctcgacaaatatataacttctactatctagatattcttttttcatatccatatttaagtactttttttaaaaatactatctgattgtataactcgttcttagtaggtagatgcctacacttatcataatccgcaattaaacatttaatttccctgtacaataggaaacgttcatagttatcaagcatctcctccccttctgatgttatatcttttacattaccccttcgacacatattgacacatgatctctgataatttacattatggtaactaatctcttatatgatatatatcttaaatcaacttaactcaagaaagctaggaactttaatcccctagcttttttgagtttctatcgcttgtttaaccgttgcataggttttaatagatgagaaatcgattccatttctaacaatagtttgggcaagttcaggtcgtataccagtcatcatcacctcaataccttgtaagcgaagaacactgtaaatatcaaagaggtaacgttcagctatagcgtctatagttaagatacctgagaaatcaacaattagatactctaccttcatttcaagaattttcaagataacattctccaagatatattcagctctttctgaatcaatagagccaattagtgggagaacggcggttttatcttgaatggggaccacaggaacagataatttcaatacttcttgttgcgccttttgaataattttatctttcacttgttcaaatactataatcgtttcattaatacttatatcgagcaaatagttaaatcgtttattaataaatacaacttcttctgaagagagtccatgctctatacttattttagtaaggtaatcgatgaagactaggcgcgtaggaggatagcgtgtaataataatagagactctctccccttgagatgctgtacgcttaccattggtcttactccattcaacaagcccttcaggtacgttgctttcactactaaagagactctttcctaaaaacttaataaattcagtatagacgataattgcttgttcaagttcctcctgtaaagccctaaaattggggttctgagaaatttcttgcacaatttcatttgctaacatttctgcgttatcatctaagtacttagcaacgcctataatccctttcaatgattatcactccctcatcttcttattcatgaatgcatttaggtagtcattttatctcttgctttcctatttattgttttaaacaccaataagtagatcttctatcgccttttgtaaacttgattttatagtcaaattattgaaatcaataccaatacttacaacagtctgtgcaacttccggacgaattcctgttaagactgtttctacacctagaagctttaacgagtctatcactttgaaaatccgatctgctaccatggtatctataatataaacacccgataaatctactattaaacgttgaagctgtagtctgttcgctgatttcaacgcttcctccattagataattggctctttccgtatctatatttccaatgagaggcaaaatagccatccctttagctaaagggacaactgggaccgataattcaagaaaggcactttgcgcacgttcaagagttaattgatagaaatgcacataacttaaactaaaggaataagctgcatgatcgagaagaggatcaataattccgcctacttcaaatacagtatctattgatagattattttcctttattacttcctttaatgtcttccataagaaagtgcgataatattttgtatcttttaatgcttcatccaatggcaccttcaaattgcaaaacatttcccctgtttcttttccccattgtgtaaatttttggagtgctctttcttcatttaaatgatccctaagaacttcaccaaatagacttataaagtgagctcggatattaataagttccacttcaaaaggagccaattgtttcttttcttcttctgtaatatcaactattctgttttcatgtacttcattagcgattttaaatctatattctaagattttatcccctaaaaaccctatttcatcttccatgttttcctccgaaaagcctgttgaggctattatttagtttttatattaattataccaccacgtgtcaaaatacttatttttttgttaatttcttagtataaaattcccaactctaatcttcatgatttattaaacaatttgttacaaatggtaaaaaaaatcaaagccgaattcgccttctatgatatgattaatccaataaatagaaatcttgtatgttatacacatcataaaacagaaaaactactaatccattagtttttctgtatattaaaatatagacattaagctgatgctttatggcaacttgaatagtttactcaatatattaaagaacatttaacgtcggaatatgtaaaattaacacaaataagaataccttattactctataggttttttaaatttttttgccaaaaccactctgaggtgaactatgaaaacaattaattctatatctagttctaaaaaatttgataaaggtcatgtcttttaccgttttgaagataaacaattttacataaataatttaatgagttttattaagaatggattagagagtaaacaacgtatattgataattgagaatatgagggcgcttcccctaataaaagctactattgataaaaagtttattcataaacaaaaagaatctattcgtttagttaataattttgattattacttggcaaatggtgattttcacacaaaaactattcttactcattttcaagaagatttatctatgttgaaaataaaaaatacgatgataaggacatgggctcacgtagaatgggcttcagagaaaccagatgttcttttactagaagaatttgaatcaactgccgataattttgttgaggaggaaggtatggtttcagtttgtgcatatgctgctgattctttatcttctactttggatactactctgcagcaattacatcaatacattatgacagatcataacttttttatttcccccttttacaatgggagaagttgttaaaatcatggccatgaatctacatattcatggcttttttggttcctatatcgtgttttatggaaactaaaaaagacaaattagtggggcaatgagacctggtcagaatggtcattgatgttatctcctacttttaaatctaattctctgtgcgtgaattcctgaaacccagataaatctaagctataacttttaacaatatcttttagcaccctatcattaagttttttatggtacttttcaaattcctcgctacaagctttctcaggtcgatttctttcttctgttgaattggcaaatacagttccgtaatttgtaccataagcgaaaataccaagtatcagaagtaaaagaactgcccttttattcatatagctcaccctatattcatattttgttgtatttttgcccagttacgttgttactatccttctgttttcctgaagtaaataccgctttgatttcatcctaataaatatgtatttaataggagatagcaactaaaaaatgggaggaaataacatgaaaaagcttattttagttataatcttgtcttttgtagtacttgtttatccaagtcaaactaatgccagtaaaatgccttgtagttcgatattagagcctgtagacaaacatttaaaaaatgcaaaaggaacagctctaatttacaaagtacaattgaatccacccagttttgctcgaacaaacattagtattatggctgttcaccttcctcacccttctacttatggtgagtataatcaatatgaagggtttgcaaccattccaggttacattagttggcgttttaaactatattctacacctgaagaagatggcgttacgtgggctggaaagttcgattggattacggaagagatgaaaaatgtcaagatacaggtgcgcccttcaaattctaaaacagaaaaattaagatcaccagtcttaacaaagtgccctttcatcttgtaactaagctaaacatcttactacttgaaaggaatcgtttagtttaatacatgctcatacaatatatctaaatcaatattatgtaggtgattaaaaggtacgattaacgactcatttgatttagaatgtgttcatgatcaaattccggaaaatcattacacaattgaaattaggcctagtaagcataaaatacagtttacgaataaggacataaaaaaatcctatcttcttaaagatggacaacccgcccattatatagaaaattcagggtccgggatgattgttttcgaaaaagataattggcagtatatgcttagtattgataagagagtttcaaaacaagtatcgatccaatctcttattgaaatagctaattcaattgattattcaaccaaaaagaaaaaattactatagtggtatgaattttgccactgaacgattaatacaaaagaaacctttgtccatatagatagacaaaggtttttcatatttattggaacagggggaatacgttattagtttggccagatttgtagattcatatacgtataactttgaaaataaatattttaatcgactttacttagaataattaaccctcttctttcacctgcttttcgcgttcagttaagtaaacaccaaattattttatatatttttaaggtttcgctatttactctaagtgacgacaaatatgaaattcatctataattattgtcttaagctaatctgcctctttgagtagcaataaaattcattatatgttgttttccaggtgctgcgtgtatcgctccttttactgaagcagtaagtgccccacttgcattagcaaaggtaagcaattgttgatggtgttcactcactttttgacatagattgtcgctcgatatatcaattgaaagcaattcagataagaaaccacctataaatgcatcacctgctccggttgtatctgaaacagttactttaaatcctttatcctcaaattgttctccattttttaaataaataatagctccatcttttccttttgtataaacgactacttttacattaccaacaaaaagagagttaatagcttctctttctcccttaatattggttataaaaaataattcttcatccgatactttcaggatatctgctaagggcacaaagtctagaattgttcgacgacagctttctttatcaggccataagggaagacgaacattgggatcaaaactgacaatccccccgattttttgaaaactatctattacttttatatgagtttgtttcattggactttcgactaaatctacagaacaaaaatgaagaaggtctcccttatcaaaccactctactttcacctcgtttggtaagagtaataagtcagctgaattctttctgtaaaaactgaagtccctatctcccaatttatccacagatacgaatgccaaaccggtctctccttcatcacatcgaataatgtaagaagtatctaccccattttcttcaagcacatctactaaataatcaccgaagctatcattagctattttggttagcataacagaattccctccgtactttgcaatcgcaattgcaacgttcataggagctcccccagccacacgttcaaaactagtaacttcttttaaagatttctctttttgaacaggaataaaatcaattaatgtttcaccaatacaaaaaactcttttcaacatcttcaccccaaaacaatgaacaagtgtataaacacttgttcattcataatttatttccagatatcttttaacttccaatatgttaattccttaatccttacatcctcaacatctgcaaatacctcaatgcctaatctatcctcagttggataaatacgacttgtcatagttgcttgtccctcatttgcaaatacttcaacagaggatcggtcaataaatatgcgtaaggaaagctcttgatctgctctaagaagggtctttctcacaccgtcttcaactttaccagacttagaacaatcgagttttagtgtttgtgtgtctaaataatactttaatgcagtctcttcctgattaattccacgaattcttatcccaaccgattgagcgttacaattgcttaagtcaaacacagcttttatttcaagtaaatcttcgcttgtctctattaaataattattagaaatcgcattggtaagtatattatgttcaatttcacgcaataactttaattcttccacaggattcattagaactttatcattttctcctaaggtaacctcacgcggtaatgtaagtgctccacaccatccatcttcttttgttggcatatctgactcccacatatccatccaaccaatagcaatccggcgtcctttttcatctaataacgtttgaactgcataaaaatcatgtccattatctaactcattaaatgaaccgtgcataaactcgtttgtttcgtaattgtaatctccaattaaatatcccgtctggaatagattgttgtataaatccccatctttttcaataccttgtggagaaatcatgagaacgtattttccatctaattcaaagaaatctggacattcccacataaatccaagtttttcgtttccttgtgctaatacaccgacgtatgaccacttacataaatcaggagaacggcataaaattactctccctacattctccttagtcgaatttcctactaccatataccaactatctttgtatttccatactttagggtcacggaaatgatgactactatccgtaggtggtttaggaattactggattttctgtaatcttatgaaatgtgatgccatcggtactaacagcaagattttgattttgataaaataggtctttttctttatctacatagtgatgacctgtatagatcaacgttaattccccatcattatctactgcacttccagaaaagcatccatctgtatcacaagtatctccaggcgctagagcaatgggcaagtgttcccaatgaacaagatctttactttttacatgcccccaatgcattggaccccagttttcatcgtaagggtgatgttgataaaatacatgatattctcctttatactgtaccaaaccatttggatcattaatccagttggcaggtgccataatatgataacctaacctataacggttatttactttttcttttgcagtatccaatgcatcttgcgcttgttgaagtttgtttattgtgaacattcaaacatctccttatataacttgttttatgtccgttatatttccttctaaacctttacttttattagaacttaataaagtgaacattgaaataatcgtaaaacaaaggaccattattcctagaataaggtaagtatgacggaagcctattatgtcgtataatttacctgcaaaaggcgataacaaagatgcacctatttgagaggctgcttgaaatccaactaaatacaaaacggaagatagtcgtgtatcaaagttagctgcaaaatatttaaaaatagcaatcaacataatgggtaattctaatgcatgtattaatttcattgaagaaataccgattggtcctacaacaagccccgaaccaataatacgaagtgccattagaagaccggctaataatagtccgttttttggtccaattttgtttacaatgaaaggcgcaacaaacatcatcccagcctctaaaaatacttgaaaagaacttaaatatccaaacacctgattccccgtggcttcagtagcgaataaagacgtataataaattggaaattgctgatcgtacacactatatacacacgttactccaatcacatacattatcaaaaaccaaaacttctttaaaagaaaaagttgtccaacgtcctttaatttaacggattcagctttttccaattcatagtttgtgacttctattttcactgataaaataattgcaactaagataattgctgaaacagatgcaacccaaaagttgatatttggattaatattaaatagctgacctgcaaagaaagttgctgacgcccaacctaatgaaccccacattctagactttccgtattcgaaattatatttgcggctaactttttcaacataggtttcaatagcgccaatacctgccgaaataccaacgcctaaataaatagctcccacagctgcacctaaaatcacattatattttaatagtggtccatatatataaatataaaatggtcctacaaatacaagcagtaaactaataaaagacaatatatttttctttagacctatcttgtcggagatataaccatatacaggctgtatacacaatgcgaagatagcgtttacagagaaaatcaaacctgtggctgatccacttaaatttaattcttgctttaaccaaataggaaataaagaggcgctagaagaccaagtaaaaaagaaaaagaaaaaataagcacttaacttccaatagagaacttttgaacttttcatgtttgttgctcctttaactagatagatagaatccttgaaacaaaaactgaaagcactttcatattcattttatgtcaaccggtttcacaagtcaatatgtttatgtcaaccggttgacattttttaaaaaattacccatacatagttattgttttcgacacaataacctagttttttcttatttgatacctgttcctgaaccaccaatcccttctaaaatataacgctgagccactatatagataagaattaatgggatggtggatattgttaaaactgccataacttgattcgtgtaaactggctccgtactattgatggctgtaattgccacttgaatcggaaattttgacttgtctgttaaaaccattaaaggccaaatataatcattccaacttccgataaaggctaaagttccaactgtagcaacagccggtttagacatcgggagcataattctcaagaatatttgccaggtatttgctccatccaatttggctgactcaataatttctgctggaatagccataaaaaagtttcggaatagatagatattgaatgcccctgctaaggctggcagaattacagcaagacgagtgtctactaatcccagtttgtgaactatagtaaattgtgagattaagattgtttctagtggtacgattaaaagcgccaataaaagaccaaacagcactctttttccattaaaattcaatttagcgaaagcataacctgccatcccgttgataataacagaacctgctgctacgcataaaccataaaacaggctgtttattatataaccaatcaggtgaaaacgtgacagaacttgcttataggatataaaccaatctgacggatgaaaggaaggtaggaaagccttaatactgtccatattattataaacttctgattcaggtttcattgaagatgcaatcatccaaaacaacggaaatataaataatatcgccagcaaaactaaacaaatgtattctaagattgttaaaggcccgaatttccgtctcattagtcatcttcctccttcactaatttcctttgcgctagcgtaactaatccgataattgttccaaatagaagagcaatcgaactagcatatccaaccattcgatccgtaaagccagtttgataaatgtaatatacaaccgtcatcgtagagtttactggccccccttgtgtcataaccattggttggactaatagcttaaacgcaccaattaatgtcgtaataaatataaaaatagaggttggctttaataatggtaatgtaatataaataaaccgttgccatttattcattccatctaactgtgcggcttcgtagacatctccgggtatattttgcaaacccgctagaaaaattaacatttgaaagcccgctccctgccatgctgaaacaaaaacaattgtaaacatagcctgtttagggctcgttaagaacggttgagctgaaacaccaaaataagtgagtacattgttaataattccttcatttggatttaacaaataaagccaaagaactgagataacaacgagcgacattaccacaggactaaagtaagctactttaaaaaatgtgttagctttacgttgtttgtttaataggagggccagcccaagagctgcccctatctgtaaaggaattacccaaacgacaaatttcagtgtattcgccaggcttttcaagaaaataggatccttaaataaattgataaagttatctaatcctacaaatttacgcatatcgggtgttaaaagataataatctgtaaatgcatagtagacggacataatagctggaataataagaaacagcaataaaagtaataatgctggtcctaaaaatgtataagctactacattttctttccatttaactctatttttggtctctttttctgttcctaggaatgtgtaaacagtcttatttccttttaatccagttttaatcataatgcctccttctagctgcttttatcgattagccttatcgatagctgcttgcatttctgtagcacgtgtatctaagacttttttaatgtttttgttttgatcatagaaactgatatcatcaattgtttgttggaaagcacgtgttacttgtggatacgctggtgttactggtcgtgcgtgtcctgatttctttaattgcttcataaacacattcatttgatcagaaaattcttttgtaagtactttttcagaagagtaacgaaccggtagtgctgcaattgtacgacttaattctaaattcgaatctttatttgtcatccaatctactagtttagcagaccattctttattttcagatttctgtgtcattgcaaactgccaacttcctgaaggtgaaactagtttctttgtctttggtgataccggataaggcataacaccataatcaactttttggaagtttgttttcatatctgttactgtccatacaccactaaacttcattgggtacttttccgtttcgaaagcctgcttaactggagtacgcgttgtatagccttcttttaacatcgtttgaataaaagtcatggcctcaacactaggctttttattaaatacaccttctgctttagtaccatcttttgagataatttctccacctgcagaccatacaaatggtgttaatgcgtacgttaacatttcatcttttgattgtaattgcatatcaatagctggtttattatatttttctttcaacgttttacataaggccatgaactgatcccatgtccaaggattatcaactgtcggtaacgtatttaaatcaacgcctgcctcttttagcatttttttattgtagtaaattcccacggacgattcactcgcaccaatcgcatacaatttgtctttgtatgttccttgttgcttgatacttggtagtaaatcatcttgatctttcacgtaatcatctagtggagcaatgatgccagattttgcataagcagctgtatttggaccatccaacgtaataacatctggtaatgtatcagttgtcagcgctgcgttcactttatcctcataccctccgccgttcccactacgtggaataaattcaattttagctttaacatttttagatgcatacttcttgttaaaagcatctactcgttttttatacaccttaccttcttcactatcgtctgatacatgtacccacattgtaaccatttgtttaccgtcactacttacgcttttgtccttaccacaacctgctgcagcaaaaattagtaatacagatatacctactaaaaaccatttcttcatacgttccagtcccccttatttctccttattcacaacaaatatataaaagcgctttcaagaagtattttatgtcaaccgtttacatatgtcaatcggttgacatgttttttttgaaatatcaaacttctctcctctaaccttacaacggaggtataatatattagaatatatgtattattaatatctcattcataataaaagttaatgtttgttcgatgtaagctaataataattaatccctaattcttgcacatattagagata

SEQ ID NO: 13 - DNA, 123646 bp, Priestia aryabhattai
  source 1..123646: mol_type = genomic DNA
ccgccgctcttaagcgactttatcatcttatcaagttatcaacgtaatgtcaacaactttttaaaattctttttttaacttcgttgttaacggtatgtctcaacgacgctttataataataaaatatattttaactaaagtcaacggtttttaaagaaaaaattaaaaactattatttatagatttgaacaatgattactgcaccgtattatagtaaatattataggcaaaagccagctgtaactttgccttctttgtttctgcgcttttacatattcttttttattattcttatagaatagaagaaactaaaaaagagctgtccattagacagccctttcttatttccctttaaaactaggtcttctcttctcagcaaatgcttgaagcgcctctagacgatcttctgtcggaatcgttaactcatatgcttttcgttcaatttgcaaaccagtctgcaaatcggccttcattccttctttgatagcaaattttgcttgctgaagtgcaattggcccatttttcaataaaagagagataaaaatatctattgtttcttctatttcgtatccgggagccaccttcgttactagaccacattctttcgcttctgatgccgagagacgctgagctgttaaaattagttccattgcttttgcttccccaactaaccgagggagacgctgtgttcctcctgcgcctggtataatcgctaagcttgtttccgttaaacccataagcgcttcggttgaagcaatccggaaatcacatgctaaagccagctccattcctcctccaaatgcatatccattgatgattgctatcgttggctgcggaagctgctctatcttcgaaaacacttctcctattttgtaaatattgcgctttacctcttgatcagagagggttttacgttcttttaaatcggcccctacactaaaagacttttcacctgcccctttaaacgtcacaactcgaatatctttttgaatacgaattccttcaattacttcttccaattctttaagcatatcgtaattaaaagcattcatcgcttccggacggttcagtatcacatgggcgacgtgtcccttcatttcataagaaatagatgacatccttattaccacctccaaattggaatcgctttcattttatcgttcctgagatacttgttgcttcagtgcacgccgtaaaattttccccgttgtatttttaggaagttcttttaaaaattcaatttcacttggcactttatatttagcaaggtgctctttgcagtaggcaataagcttctcttccgttatttcttgattattgcaaaccacgtaacacttaacacattcacctaaggaaggatcagggactccgataacagccacttctacaatatctggatgcgcatatagcacttcttctacttcgcgaggataaacattatatcctcctacaataattaaatcttttttacggtcaacgatataaaaataaccttccttatccattcttgctaagtcacctgtatacagccaaccatctcggagagcatattccgtgtcttcaggaagcttgtaataccctttcatcacgttagggcctttgacgataagttcgccaacttgtcctacttctacttcttctcctagttcgtttaccactttattttcaacattcataatagaggtgcctatagaaccggcttttctctctcggtcaatcggattgaaacacgtcacaggagaagcctcagataatccatacccttctgctaccattaccccaaacttaccttcaaaattggttagaagtgccaccggcattgatgccccgcctgatatacaaagccttaccgtgtgaaagtgctctttttttcctttgtcatgctgaagtaagaaattatacattgtgggaacgcctgcaaaaatagtcgcttgtcgattttgaattaattcaaatatagaagatggactgaattttggttcaattaatatcgttcctccattcattaaaggcgcattcaatgaaacagttagacaaaatacgtgaaacatcggcaaagcagctacgactcggtcattcccatttatacttaaataatctgctacgtcttgagcatttgaataaatattcttatgtgtaagcatagctccttttggttttccagtcgttcctgacgtatacagaatgatggccacatcttcttcttttaactccagaaaatcatatgtagcttcccctctgtttacaacttgcgaaaacgtgtgaaaataagaaggtatattttccactgtatctgtcgtttcacataagataatgtgttccaaaaatggagtgtgtccaatgattttctttaaaatagggagaagtaaatcaaccgcaataactgcttttacatctccatcctgaagcatgtagctaatttcatccgctgtgtaaataggattaatgggtataacagtagctcctactcgaagagcaccgtacaatccaataacaaaatgaggcgagttgccgacaatcaaagcgatatgatctcctttttttacacctaattgcttcagaccattagcaaacttagataccgatgcatcaagatttgcataagatgtttcctggtccataaaaacatatgccgatttttgtggaaattgctcagctgttttatgaagctgtgctgacaaattcatctcataacttcctccttttaataacgaatgaatgaacacccattcattattaagtcataataatgtaaaaattcttacttcttctattctattataatgttactgctgttctattgacaagactcatctgtttaaaaagaaaaaaagcctgatgtagcagacttttttcttaatagattaattcaacaaactcttcttttgtaatattaccaaaataatgtggaatatcgatgtcttctaaggcttgttcaatagaagctttttcataacgaacacctgttaatttttcctgtacttcctggacatcccccactccaaagaaatctccgtaaatggtgcaagcatcgatttttcctttattcacttctaaacgaacgtcaatttgtcccacaggaaagcggtgagagtgctgtaagttaaatttaggtgattttccatagttccaatcccatgactgatagcgctctttagaaatttgatgaatcgtttcccaatctttttccgttagtttatattctgttatattttcttctccgtcaaagatataccgaagcagcatttctctaaattcttccaccgttactttctgttctaaaaattcgctgatatttgctactctatttcgaatagacttaatgcctttggattcaattttatctttttttacttttagcgctgatacgacgttttcaatctctgaatcaaaaagaagagttccatggctgaacattctccctttcgttgaaaactgagcatttccagaaattttccgtccttcggccattaaatcatttcgtccgcttagctcagcattaactcctaatttctttaacgcttccacgacaggctcggtaaactttttaaaattatgaaagctatttccatcgtctttcgtaataaagctgaagtttaaatttcctttatcatgataaacggcaccgcctccagacagacgtctcactacatgaatttgctgattttcaacatattttgtattaatctcctcaatggtgttctggtttttcccaataataatagaaggttcattaatataaaacagcagatatgtctcattgatgtctagatgcttgagcgcatactcttcaattgctaagttaattcggggatcataatttttttgattatcaataaataacattcattttcctccttgttattcccatacatatcctgattcagctaacgtaagcgtacctctataatgagcagcggcttcctctactagctgttgatgttctccatagtgcggaaggtgagtaagcatgaggtgtttgacacttgcttttgaagcaagtgtaccggcttctgtacttgtcatgtgtccagcgcctcttccatcttgattgtcataaaaattacattcacaaataagaagatctgcttcttctgagaaggaaacaaactcttctaaataactagagtccgctgtgtacacgacagtttgattgccggcgcttattctcatggcataacaaacgactggatgtttcgttttcataaattcaatggtaaaaggcccaacttcaagtttttgactcggatcatactctacccctttagtaattcctttatgagtaagtttgttgaagctttcctgatcatatgtatgtccataaatagaaagttccttaacagcgtttcctagatgagtctgaatgaggcgagcatattgaaatactccgacatcagccacatgatcatgatgataatgagataaaatcatagcatctatttcttctggctttgcatatttttgcagctgagccaatgcaccacttccacaatcaacgagcagctgaaatccatcatgctccactaaatagctagaagtagcttctgaaaccgcaggatatcctccccaaaaaccaataacagttactttcatttcaatcaccctttcgtactatttttattacgttcagtataccctacttttttttgaaaactaactgaaaggcactcgtttcggccattttatcgaaataactcattgttatataacaaataaccacttagaatagcaaaataggctaaattgttataaaacataattgacattttaccatctgttataatacaatattagtaacaaaaacaacggaggggatttaaaatgctagaaaaaatgactgaatttttcaaaagattacccaataaaaagtgcgtagaatgcggaaacgacatcgaggaacagcatgaatgctacggaaacaaatgtgatcactgtctagatatcatgaaataaaaaaagctgaaactgttataaaacagtttcagctttttttatacggtcaaactgcgatactcgtttggcgtaatgccttctacttttttaaacacttttcgaaagtatttatcatcatgatatccaatcatattcgcaatttcatagatttttagttcttcatttagtaaaagtgatttggctttattcattctgactttcaccatataatctgaaatgttttcttgaaattcttgcttaaactttctcgaaatgtattcacggcttagatagaaacgttccgatatttcttgaagcttcacatctcgatgaaaattttgctgcaaatattgttcgatttcataaataacatcgcgattgttttgcttgctatacctttttactacttttaaaaagcgctttacttcacgcttctttctctctacatactttgctagctgaaactgcccatcttggttatagaaaaaagaaagaacatattcaggaccgttatttatcgtataaggaatgtgatatctttttaaccaatgttgacttaacagctgatattcctgctcaaaatgcagaatttgctttaatgagagataattttgcgcttcaaaagctgtgataatttcgttgaataccggcaaaaaggcttcaaacttcccgacttgcagcgcttcttcaattttactgttatagtccatcatatttattaataaagcacttgctaaaacgtcttcctcgccgtagaccttcactttattttgatcaagaacattgcttaataaaagcgaatttttcgcatcttcataggatttcattagctgatcaatagaagagactttgcaccctcttgcaatccgacagctcacgtctaacgtacggcgaattgctgtatgtaaagtcgtcagcaaagaggttatacgttcaaaatcattccaaaatataatgataatttcccacttatttgataaataacggaaggctaccccattttcttctgccatcagcatttcattgattacatttaaaattgaaaaataggctaaatcccggtcaccgccaaaagaacgaataatggattcatctacacgtacaatccccacttcatattctctagtcagatggaaaccaaactcttcatagattgattgatttagcaaataattgttcattaactgcgtaagttttcgatctcgataaatcggcttcatttcattgattaaacggtagctgctattatggacttttctagactcttcttctttcttccattgggttacagctcgtataagcgtatcgtttaaaatcgaaggatccactggctttagaatataatccgtacttccaaaatgaatagctttacgcatatagtggtagtcatcataccctgttaccacaattgttttgctagaaggtgaattctctttaatccactccaacaaagcaattccatcgatattaggcatcttcatatcagtaaaaatgatttccggtccgtgatcctcgataagcgcaatcgcttgctcaccgctatcagcttctatcacatctgtaatttcatgctcttcccactgtccaagcagctttattccttctcttacatgctcttcatcatccacgattaatactttcatcactatccctcttttcttcaattgtcgttagctttatgacaacggtaaaatcgtgattttcttgactgctaatttgcattgaagcatgatctccatagtagatgcgaagtcgttcataaatgttttgcaatccaatatgctcatctgtttgattatacgattgctgaagtctcgtttttaattgattcaactcttgttgccctatcccttttccgttatcagaaacagttagaatcagttcttcgccgttcaaatccgctgaaataaatagctttccgctccctgtgcgggtttcgaatccatgcttaaaagaattctcaacaagaggctgcaaaatcattttcggtattcgcataatctctgcctctttttcaatatttaactcatactcaaactttgaaccaaaccgctgcttttgcagacttaaaaaagcttttacgtgatcgacttctttctttaagctaacgatatcctctttcatattcatgctgtaacgcataatgtgcgaaagtgaggttaataaagaatatacttcaactgctttatgcttaagagcaagagttccaatcgattgaaatgcgttgtataaaaaatgcggattaatttgtgactgcagcacttttagctgcgttgatttattttctaattccaatcgaaatttacgttcaatcaagtcattaattgtttctaccatagaggtaaaatgccttcctaaaacaccaaattcatcgtttccaagtgatttaaaccgcacctcaaatgatcctttttccacttctttcatattgcgaatcaatacgttaatcggctgtgtaaaacgtactgatataaaaagcgtagcgataacgagcatacacagaaatggcaggccaattaatacattcataagtgctgtctttcttgcatcctcatataaaacactgtaaggaattcgtttcacaatgtacaagtcctcaaagggctgtttaagcttttcatacattaatacgcctgagaagcttttatcttcccattccatgctatggtctttttgagaagtgagcgccttcacccacgcgtaattttcattttttccaataacctttgaatcagaggaatacaaaaccttccctttattgttcattaaataaaaatcttctgactcttcattatatagacgctgcgatatagattgaatttgtgtcatattaatgtctaaagatagataagctaacaacttgtctgatggaatctcatcaatccgctgatgaaagctaataacttgattcggcagtgaatcaattaacgttgataaattattgtagctataaatttcatgggtaggctcaatcacaagaaatttatgatttttatttaaataagaatagtaaggctgagtgtaaatatcatcgtacttccctctgctgctcactttcgaattataagctgtatatgagtcatgcccgttttcaatgtaaagatggatttgttcaatctctggacgagtattatataaataaagaagagttcgtgatatttccagttgattggctcctaagtcacttgatacaccttcatctaacactttgataaatgggtggtagccgtacagcctttttgtaatattagcaatttcatttaagtaatcgctcaaatcattgcttccgtttttaataacttgatagttggtagaaataaatcggttcttaacggtttcttttgtgtattgatacgtaaaaatcgtcgaaattaaaaatggaataaccgttgcgaataagaaaaacaaaattaatttcttgcgtatgctccagcctttcacaaataacctcctttgactaatgtcatacattatgactattattatacattaaaagcgctttcaattaactattattttttcatagctatgaatctaaccagctattttttcacaccaaaaagtccgcgttttccacgcggacttcttgtttattttttcatttttgcccaaattgtatctaatttcttcataaactcttcttccgtcatttgcttgcctgcgtaagactgcattgctgcgccgacttcttgaaccgttccttccggatacttaaaccagttccaagataatgttttaccttcttcagagtattttaagatatcatcagataaagaatcgattccttttccatcgatgtttttgaacgctggaatgaacttgaacttttcaactaagaatttttgaccctctttagaagaaaccatccaatttaagaattccttcgctgcttttttatctgcatctggcgcatttttgttcactacccagttatttggaactccgattgctagtttatcatttttctttgcatcgttgctgattggcattggaataaagcccattttcatatccggattaattttcgtgatcatatttaccgtccagttaccttgttgcatcattgctgtttcaccagaagcaaattgagtaacttgtgtattgtagtctgtcgttagtggatttttatttccatactttaacgttaaatcgaacagattcataaattgcttaaacgtttcattgccttcaaattttgcttttccttcgtttagacctttaataaacgcatctggatcgtcttgctgtgccattggaatattaaataaatggttacctagcacccaccactcgccgtatccattagaaaatggcgtaatgccttttgctttaagctttttagaagctgcttctaattctgacagcgttttaggtaattctttaatgcctgctttttcaaataaatctttattataaataaaaccataaccttctaagtttagcggctgaccataaattttcccgtccattgtcattggttctttggcgatatcatacagattatctacccacggctgatcagataaatcttctaatttatccttccacgtttgcgcttcttggaaccctccattgttaaagatatcaggttcatttccagaggcaaactgtgcttttaatgctgcaccataatccgcgcctccgccgactgtttgaatgttaaactttacgtttggatgttcttttgtatactcatccgttaattctttcagctgatctgcaatttccactttgaactggaacatatcaataacaacttgatcacctgagcctgttgatttacttgcttttgaatccgtacctgagtttgaacatgctgtcgcaaataaaagtgatgttgctaacacgccagacattattgaaagccttttcattttcattcgttttgccccccttgatatctatctctctttattttaccgattctaggacatttgaacaggtaacaatattgaacaaccgagtggaaaatattgaacacccccttcagcacccttcgacaggtctctcttctttcgcaaaaattcctataaattttttgcctgttttattccacctaataacatttatagacaaaattatgttaatatgtagagtgatagattcataagaaaatttatgaatttttttaacttgtataaacaaagtgaaggggtttacatgaaaactaaaaagcgcaaaaaaacacatgtctcatttcgaattaactggctgtttattgtggttttcctgcttttttctgcactcattttacgattaggcttcgtacagatcgtgtacggagagaactataaacgagaagttgaaaaaacagaagatgaaacggtagattcaccggttcctcgcggaaagatgctagaccgctatgaccgcgttatcgtggataataaaccgttgaacgctgtcacgtacacgcgtttgaaaggcgtcactcaagaagacaagctaaaagtagctaaaaagcttgccactcttattgatgttcctgttacaacagacgtgtttggcaaatcgaataaaaagaaagataaaaatacgattaagctaacagaacgcgacttaaaagattactggattgcaactcatccaaaagcagcagcaaaaaaaattaccgcagcagataagcaaaaagtaaaagaaggtcaactttctgaagatgatttatatcctcttcagctaaagcgcatcacaaaaaacgaacttttatcagtgaaagatgaccttgaagtgattgctattaaaagtaagatggaaggcggctacgcgttaaccgctcaaattattaaaagcggattaaccgataaagagcttgccgtcattagtgagcagctgggtgaattaccaggcgttgatacgacaacttactgggaccgtatgtatacatacgacggcttacttagcacgctgcttggtaaaatcacatcagctgatgaaggattaccgagcgaaaacttacagtactatttatcacacggttacagtcgtaacgaccgagtaggaaaaagttatttagaaaagcagtacgaagacgttcttcgcggtcaaaaagcccgcgtgcaaaacgtaacggaccgctctggcaacctagtgagccaagagaccgttactgaaggtcagcgcggcagtgacttaattttaacgattgatatggaacttcaaaagcaagttgaagatattttaacaaaagctgtgacatccggtgctgctggttcacgattaatggatcgcgcgtttgctattatgatggaccctcacacgggagacattttagcgatgggcggaaaacagcttgttactgataagcaaaccggagcacgtaaagtacaagactttgctcttggtaacatgaccacttcttatgaagtaggttccgcggttaaaggagcgaccgttctagcaggacttgattcaggagctattcagcctggtacggttttttacgatgcgccgctgaagtttgctggcggaacaattaaaaagtcgtctcacccaattggagcaactgggatccaaaatgctttggaacaatcgtcaaacgtgtttatgtaccgtacggttatgagcatggctggtgaaacgtaccgccctggcggtaaactgaacattccaccgtctatctttaataagctgcgctcatactatagccagtttggtcttggaatttcaacgggcatcgaattagaaaacgaatcaacaggtattcgcaataccgtaacaaacgaaccaggtaaagcactggattttggtattggacagtatgatacgtacacaccacttcagcttgttcagtatatctcaacgattgctaacggtggatatcgcatgaagccgcacttagtaaaagaaatccgcgaacctgagcttgatagcgaactaaaaggaagtattcaaagttctgttgaaccagaagtgttaaaccgtattacgatgggccaatcagaaattaaccttgtcaaacaaggatttcgccaagtagttacagggtcacatggtacaggacgtttacttaatacaggaaaataccgtcagtataatattgctggtaagtctggtaccgcggaaacctttaataaaggcgtaagcgttcgtaactctacattcgtttcatacgcaccttatgataatccagaagtagcagtagcagttgtcatcccttctgcttatgtagcaggtacatctaatacgttaagtaaaactattacaggcgattctattaaagcttacttcgatcttaaaaaagaaggcgaaaaagaagtagagcaaaaagaagaagatgcaaaaacaggaaatacagaattaaacggcgtaaaaaaagatgataatgaacaataaaaaaggtctcgtcatgagaccttttttgttttttctataaaaaaagcccatctcactgagacagaccgcgtaaaaagtatagttcaattaattcagcaattttttcttctgaaagcggctcatgccgtttttcccaatcgtagacgagtgcaatgtacattttaaatagtaaaaaagctgtaagctccgggttgcacggtttgatttcttttttagaaatcgcaatttcgattttgttttttatataagtcaaaatctcttcttctactcgcaccagcacttcttgcactgctgtagtgcctaactgctgttcctgtaccagcttcagcatgagctgatgctcagtgcggaattctaagattcgaaaaatagctgcttgggcattttcaaaaaaaggacggttgctatcaatgacagtttcagctgcatctgtcatttctcgaatcattcgcgtaacaatttcatcgaataactcttctttgtttttaaaaaaagtataaatcgttccttttccgacatttgcaagctttgccacttgctccatagtcgttgctttatatccaaacagcgcaaatgattttgacgctgcatcaacaactgattgctttcggtctatagccacgttatccccttctttctgaccaaatgaatatttcagtcaacaagtacggttttactatagcataattttcttttgcttttcaaccacaatctcttctcttagtataacctttctctacaggtagtagacaaaaaagcggagcattgattcaccgctccacttctacagttgctgcacatatttaaccgcttttttagccacatcttctccttgctctacacattctggtatacccagaccttcgtatgagcttcccgctacataaagaccggccagctctttttcaagctgttcgttcattgtatctagcatatcgtgatgtccgaccgtatactgaggcattgactgcttccatctcgttaccgcgtaaaattcaggctcagcagaaattgtgatgagcttcttcaaatcctccaggacaattttgaaaatttcatcgtcaggctgatccaccacagcttcatccccggttcgtccaactaaacatctcagcagcacttttccttccggaaccgcatgcggccactttttatttagccacgtgcacgccgtaatcgtgtaatcgctatttcttgaaacggcgatgttcattgcatctagattgtcttgcagcgcttcttgcgcaaaggctatcacaacagtagctactgaagtggaaggcatatgcttcaacggttcgaatattttatattccgaaagcatagactgagcagctgcatgaggagaagttacaataacgctgtctgcttttatgactttcccgctatttaacgataattcatatgtggtatctgctttataaattttctctacttttattccttttgtaataatatcaggatctattgctttttctaccccatctactagcgattgaagaccttcttttaatgttaaaaagacgctattttttttaaactccgaatcatcaccgtgctgtgggtgaatttcttttagctttttcattccaacaattaagcttctgtacttatgttcagcatgcaaaaactgtggaaatgttgatcttaaactcaaacgatcaacgtctcctgcgtaaattcctgataatagaggctcgattaaattttcaacaacttcatcaccaaaccgtcttctaaaaaatacgcctagcgaacggtcatcctgattttttgtcttcggtataaaaaaatcagctgctgcgcgcagcttgccaacaggtgaaaataaccctgttgtgataaaaggagataacttggttggtatccccattacagcaccatcaggcaacgcatgcggtgtatcttttactagaatataggattttcccttttcatttccaactagctccctacctagccccacttcttttgccagttttgtagcagctagcttacgcgctaaaaatgaatccggacctttttcaaataaatacccgtctcgtttaaccgtttgaatttttccaccaagccgatgcgtcgcttctattagttgaagatcaattggcagctgatgatcctttatttttttttgcaaataataggcagctgaaagacctgttattcctccaccgatgatgacaaccttttttcgtctatccgtcatgttatcatcgccttttctgtaaaattcaatataaagagaagcgattatggaaatccatagctcgcttcttacttttctttatattgattataagttacttttcgcccctgttcaacgtacaaagaatctatattaactcaacgggcaattcgttttaacacaactgtagctaacccatcgataaattcaggctgtgcattgggcatttcagggcggtaataatcagccccaatttcatccgtcaccactttacattcatagtcgttatcataaagaacttctaagtggtctgcgataaatccaaccggagtatagacgaacgacgtatagcctttttcttcatgcaattctcttgttaaatcttggacatcaggacctatccatggctcaggcgtatttccagcactttgccagccaatttcgtaatgttcaataccagctacttgtgcaattaaatccgctgtttcttgaagctgatttggatatggatctcctgctgcaataattttttctggcaagctatgcgcagaaacaatcaacacggctttttggcgtttctcttcgtctattaaatcaaacgtttgtttaacacgtgtagcccagtactgaatgaactttggctcactgtaccagctttctactgaatgaatgattggtcctcctaatttttcagccgtttctttggcgcgcccattataggattttacgctaaacgttgaaaagtgaggtgcaagcacaatgctgaccgcttctttaattccgtctttatgcatggcttctactgcatcttcaacaaacggttcaatatgttttaagccaagatacgctttaaattcaatttcatcctgtacttcattcaagcgcttttccagactttccatttgctgttgcgtaatttttgcaagaggtgaaatgcctccgattgcttcgtagcggttttgtaaatcttctaaggcttccggtgaaggtttacgtccgcggcggatatgtgtatagtaacgttcaatatcttcttctttatatggcgttccatatgccattacaagtaatcccattacttttttactcatgtgttcgacacctctttgttagattcaatacttgtcttcattttgccatgaataaaaagaaaaattcaaagtttagcgctccaaattatttgacaattcattgtctatttgcagaatattcatgaataaaggttgttaaacgcttcaacgtttccggctgaacctgtggaaaaacgccgtgccccaagttaaagatgtaaccaggactggccatccctttatctaatatttctgttacacgttcttcaataacttcccatggagctaacaaaatagcaggatctaagtttccttgcagtgtttttgttaagcctaatgcacgtgcttcatccagctgcgttcgccaatctaatcccactacatccagtggcagatcatgccattcttttgccaaatgacttgcccctactccaaacataatgagcggtacatttttttcacgtaaagaggtgaaaattcgctccataacaggttttataaagtaacgataatccgctacatttaaagcacctacccatgaatcaaagatttgaatggcttttgccccagcgtcaatttgcgcttttacatatgtaatcgtcatatctgctaacttatccattagtgcaaaccatgctttaggttccgtatacataaatgcttttgttttattgtaattttttgaaggtcctccttcaatcatatagcttgccactgtaaaaggagcacccgcaaagccaattagaggtacgtttaactgttctgttgttaacagcttaatcgtatctaatacatacggaacatcttcttccggcgtaatttctcctagtttttctacatcgcttaaagattgaattggattagaaattacgggaccaattcctgacttgatttcaacatccactccaattgaaggaagcggtgacattatatctttatataaaatagctgcatccactccgtactgttcaacgggcaggcgtgttacgtatgccccaagctccggctgatgagtaatttcaaataaagagtacttctcttttagctttcggtattccggctgtgaacgccctgcttggcgcatataccaaaccggaacatgatctattttttcccctctacaggcttttaaaaaagtatcgttaaacgttccttgactcataatttccacctttctcgattgtcttccatccgtattttcttcgattagacagacaataatcagcaaaggaacataccggttcctctactgattaaagtttcacgttatattctctacttgtcactatacccatttctttacgacttgtatagccacctgctaaaaatgtcaaaaattcgccctactcttcctttttttattgaaaaagagcaggtgttacttcgttggatttttttcctttttgttttgtttgggaattgtaaggaactacataataagtaggactgtcgagcagattcacacgctctttttcaaatgctccttttcccttcactttgccaattacttcggctttatctccttttttctcataaacataataaacagctcttttatcaggtgaaggtgtccacgataaatttaccgttaacaaaccaaatggatgaaatgttaattcttgttttaagtctttaacttgctctaagcgtattggttttggcaaatctttaacgcctgctggcttttgaaatgcagcttcgtcgtaaccagctcttgtgagaatgtctttaaataatagagtcggataagaacttccttttgttaaataatgctggtcatttgtagaatcatatcccatccacacgcttcctacaacgtctggcgtatatccaacgaaccaagcatcccttgtggctcctttaacattcgtatacgaagtagaccctgtttttcctgctaactctcctttaaactctccattttttgccgttccttctttaacaactccttgaagcatctttgtcatataccaagccgtttgttttgaaaatgctttttgagtgtcgggaacagcttttgcaattacttttccgtcttgatcttttatttcttgaataaagtacggttggatgttttctccattttcagcaaatacccggtacgctcctgctaattgaagcggtgtaattccttcctttaatcctccaagagcaatcgcaagccctttatcttctaaaggaattcctagctttgtgagatactgcttacttgtttcaactcctagctgattcaatgtccagacagcagctgcgtttttagaatcttttagggcatcgtacatcgttacctttttagcatattggccgtctacatttttaggtgtgtatcccccgtagcttctaagcttgtcttgcagcaaggaataaggcttgaattgaccttcttctaacgcagggccatatactgcaataggtttcatcgtagaacctggctgtcttttgacatttacgcgattgagcgatttttgtacataatctcgtcctcccataacagataaaactcctccgcttttgttatctactaatacaaaagcaccttgggcactgttatctgtacctggaaaataacgattttctttcatcagctcgtaggcggcttcttgtacttttgtactcataggtactttgaccgtataaccgccgcgcagaagctcattgctagaaatactgtatttcttctctgcttcttgaataaccatatcgatataggttaaatacgctgggtttttagcctgttcctttacgttcaaccccagcgttcttccttgcaaacggacattttttccagctgataaataacctgctttttgcatagcatttaagacaacatttctacgttctatacttttttctggatgtaaaataggagaataagaattcggtgcttttggcagtgcagcgagcagtgcaccttcttctaccgttaattcggagacatctttattgaagtaaagcttggatgcagcttggattccataggctccgtgtccaaagtatatttggttcaaatacatttcaagcagtttttgcttactgtaacgctgctccaagttaatggccaccactacttcttttgtttttctaagcagcgttttatcattagataaaaacacatttttagccagctgctgtgttaaagtacttcctccttcaacacttcctccagccaatatatctcggtataatgctcgaccaatagatttaaaatcgattccgtggtgttcataaaaacgaacgtcttcaattgaaataaatgcttgttgcacatgctttggaatcttatcaattgaaaccaagtcccgatttttcacatagagctttgttaattcgtctccattttcgtccactaacctcgtagccgagtccatgacgatctttttctcatcaattacatagtttccaagaaacaagatgataatatatccaatcaatcctaatagaaaaattccaactaaggcagcaattgcgtataagccttttttgtacatcgtgccaccccttttctttcgctaaacttttgataatatggaaaacaacttcatcaatgttttactttaccatcttcattagaagttcacaatttttgaatttttgtgtgtaaaaatttataattttagtatgatttacaattgtaaattgtatgcaattcccaattagaaaggaagtataatccatgaagatctttattacttacggaacaggcccttaccttcagaagttgatcgacgaacatcccagtgaacgtttgttactgcttcacaaagatgacgatcaatttgcactagttcacgaaacagatggagatacaatttttaaagaaggacatgcttatgaagtattagatgcttctggggatcttgcagatagcggatttgctgtactaaataatatttcagttacagatgaaggccgtcctttgtttgaacagcgatttagccaacgagctcgtttaattgaaaatgaagcaggcttctcagctattcgtgtgcttcgtccactgcaaaatgacacatacattatctttacagggtggaaagatgaaagttcatttagcgattggcagtcttcaaaagcctataatgaagcacacaaaaaacgcggtacgtcagaaggcgtggatcagcagccgtcgattttctctcgcccttcttatgtgacctcataccacgtagttaaataagtaaacatcctcctagtaggcgagtatcacaataggcataaacgtcatattgtatactacatcacctattgggaggaatttttatgggcatagagcttggagctcttcattggatgtatgtcctttttatcgccttcattatcggctttatgattatgcggcgagatacgagtatcctttgtatactcgggatttttttgctttccttaacggctacctcttcgttaagccactccgtcagcgctgttttttccagcttcatttatgccattacagaactgcttcctaccattttaattatttcaattattgtatctatgagtaaagtcttaatggctacaggaataaatgaatcgatgatttcaccttttgctcgcctcattaaaacgcctgctcttgcctattgggttattggattagttatgatgaccatctcctattttttctggccttctccagccgttgctttacttggagccgtgcttttaccagtggccatccgcgtagggcttccagctataggcgtagctgtagcgatgaatttgttcggccacggcgttgcgctttcaggagactttgttattcaagctgctcctaagataacagctgacgcagcaggtcttccagttcacgaggtggttcaagcaagtgtccctctggtcattgtgatgggagttgtgacgacactctctgctttttactttttaaaacaagatatgaagcacaatagaattcacgctcaaccgacaattttaacaagcagttcttctgtccaatccacccctctttcttcttcagtacgccgggctttagccattatagttccccttctctttgctatagacgtatgggcaatgttcgcgcttcatttacagggaggagatgcgactgctctcgttggcggcacagccctatttattttagtggtggtttcacttattgctcacaaaggaaaaggcctcgaacaaacaacttcctacttgattgaaggcttgcagtttggttttaaagtattcggtcccgttattcccattgcagcttttttctatttaggagatgctggattcacaacaatcattggtgactttcttccgaaaggatcacatggacttgtaaatgatctaggcgttgcgcttgcttccactgtgcctttaaccgcacaggtcgctactgtaacgataactgcgctaggagctattaccggattagatggttcaggcttttcaggcatttcgcttgtaggctctgtctctcatttatttgcatctgctttaggatcgggagctgccaccctaactgctttagggcaaattgctgcgatttgggttgggggaggcacgttgattccatgggcattgattccagctgctgcaatttgcggagtcagtccgtttgaactcgccagacgtaatttaaaacctgtagcgattggattagtcgttacaacaattgtcgcgatgttcttagtttaaacaaaagaggctgggacataacgaaatgaattccatccaaagacgaacaatctggatatataatatggacagcttgctcgaccgcagttgatttccgttcaaggcttcgctttccgcgggcggccggtgagcctcctcgtcgcttacgctcctgcggggtctcacctgttccgctttttccgcaggagtcttcgtcttgccctccaatcaactgctagaatcaacgaaacagataaaacctatgttcactgtaacaaaaaaaacgaaccactaatcgaacagtttgattagtggttcgtttttcacttcggctatactattttttccagactccatatgtatatattttttacatgccttttggaaactctttttccgctgaaggctttacatacgcataaacaagcgtatagaagaaaatgcctacaataagccacataagccctaagctgtagccagctaagacatctgttaaaaaatgttctcttaatagaatacggctcacacctattaataaaacgatcaaagtagttgcaagctgataccacttggctaccttttgactgttcatatgctttgtgagaaaaaagataatcagaccgtagataagaattcccatcatcgcatggccgcttggaaaactgtagccttcgatgccttcaagaggacgtcctcgttctaccgcatccttaattgctttattaataatatcaccgcttaaaataagtaaaaatgccgatatcataccaatatagtcctttttaaaaaataaaaaaacaataagtacagctaaaagaaccataatcattacttttgaagctaaaaaagacaagccatgaaaaatagatgatgctgactgaagaatagtgctaccatctatagctgaaacaagccagtggtctccttgaaaagaatctgtcaacacaacaaacaacactcctaaaaaaacgagccccgcaaccccgaacatccacattaattttttgtacagggatacagtttgtgaatccaccatatcgttacctcctattatctcatgagaaaattggtaaaaaactcattctttatccctattcctcatcttatgtatctattatgtatataaaatatttcatgattcaattacttttttcaataacaacgcttacattcttttcttttttatagataatgatataatgattaaaatgtcaaaaaattcaaaactttattcaacttatacagaaagggtatggttatgtgaattccaagctacatactttacttgaagaaaaatttgatgaaatggttcaaatccgccgatatctgcatcagtatccagaaccatcttttaaagaatttcaaaccgctgcctacattcgatctttttatgacaaaatcggtatttcttaccgagcaaatgtaggaggaaacggcattgtagcaagcattcaaggaggaaaacctggtcctactgtagctttgagagccgactttgatgcccttcctattcaagatgaaaaagatgtactatatcaatccactgttccgggtgtgatgcatgcatgtggccacgatggtcataccgctactcttttagtccttgctaaagcgctttttgaaataagagattctctccctggtaaaatcgtcttcattcatcagcacgccgaagagtacgctccgggaggcgccaagtccatgattgaagacggatgcttagacggtgtagacgcgatattcggaacgcatttatggtcattaactccaactggtgtggttcaatatcgaacgggccctattatggctgctgctgatcgctttgaaattacgatcaaaggagcaggcggccacggtgcacagcctcacaaaacaaaagattcaatcgtcatcgcctctcagcttgttgttaatttacagcaaattgtaagcagacgtgtaaacccaattgattcagcggttgtgagcataggttcttttgtagcggaaaatgcatttaatattattgctgattctgctcgactaattggcacggtaagaacatttaatgaagatgtacgaaatgatgtcgaaaaagaaatcgaacgaattgtccaaggtacatgtttaacagctgacgcttcttatgaacttagttatacgcgcggctatccttccgtcgtaaaccacccggaagaaacagcctttctcgcctctgctgcttctcaaatcgatgaagttcatacagtcgaagaaacggagcctcacatgactggggaagatttctcttattatttgcagcatattaaaggaacgttcttttttacaggagctcagccagaaggtgtagatgctccgtatcctcatcatcatcctaaatttgattttaacgaaaaagcaatgcttatcgcagctaaaacgctgggtacggctgctgttgagtattcaagagaacaagctccttctaaaaacgtaataaaagcgaattaatcattcagcaagcattcgtacggataagcagacgagtgcttgttgttttattttaggaacctttttctcacttagaacgtagtatttatatcgactgaaatgaggtgatttttttgaatacgtatgaagaaaaagtgttacaagaagctgaacattggaaattcagcatgttgaaacgaccttctaaatttcaacggaccgcaaaatctttacagcttaaaataaatgaaaaaatccctgctaaagtccataagattatgactgaaagcataaaaaaaatggttgaaaccacacttgttgggtccgatttcaccactaaaaaaagaaatgttagcggtctttcgtttgaagaaaaagagaaaagaatttttgaactcatacctaagtacaaaaaaacagctgctgtagaaggagctggtactggtgcaggcggtatccttttaggtgcagcagatttcccgcttcttctttccataaaaatgaagtgcttatttgacattgccgctacgtatggttttgatgtaaaagaaaaagaagaacgcatttatatgctgtatatttttcatcttgccttttgcagcgacgaccatagaacgaagctgctcgaagtagtagaaaactgggaagaaaagaaagaggaacttcttgagcttgattggaaagcttttcaacaagaataccgcgattacattgatgtcgtgaaaatgtttcagcttatgccgggaattggagctgttataggtgcatatgctaattatcagcttcttgaccatctcacaaaagtagcaatgaacgtctatcgcttccgtatattatcttcgtctccaaagtagtctaaaaacgtaaaaaagctccattcggagctttttttacgttaattttttatttacatatgcatttacaaataagtgaataaatatagcacccgctgccacggaaagcagtgcagcaactatattagaaaaagccaccactatggcgagcacaagaatttgtacatacagcgcttttttccatacgtctaaaaatgcctttttccgttctttagcttcaaccggataaagagaaagccataaaatctgttggtgctgcttccaaagcgggagtaattgaaaacccgtcatgtatacaacaaataaaacaaccactatattgccgtattgaaacggcgcagctacaattaaaaatccgccaatgacagttaagcgaacgagcaaacttaaataatctcctgatcgcaaaaatgttctgatgtacaagtaatggtaagtggcactttgacgaaatggaatacgtgctaatagccaatctaaatatctacggcgtttgattcgctcttttacctgaggaacgtccgtaaataaattagctaatcgataaaaatagcccatgcgcttttcttctaagtcaattagcttttcccatttaatcggctttctttttgtaagtgagcgataataaatggctagcgcaatcataatcaccgctaggactcctgtaaagaatacgtatgcatgcgaaaataagaagtacgtaaaaaccgcgttcaagaaaaacctgacgatataatctgtccatttcgcccacttttcttcaaaccatacggcccaccaagacatgcctaagtttacaactttcaagatgagtaatagcagaaaaaacacaaaaacgtttgagtaagaatcatgcattacctttacgtgaagaggtgctgctgcaccagttgcaaataataaaatataaagctgaatcgtaaaggtaaaccaaaaagattttttaaaataaggctgcagcttcgtctccaaaggaagtaaaaagactaaatcaggccgttttaaaaacgtttgaatttgacccatggttaaaatcaatcccataagtatcgcaattactacagccgaaggaaacgcaggtgttaatgtactcaaccactgttgataatagtaggccaaaccgccaatcgcaaaaattaacactaatttaatgtggtcatttaagatatattttgtatatcttcttacatccactaaatactgctgaaaccgttgcttccataatgcatcaatcttactcatagccttcttcctttgttaattcaatataaatttcatcaagagtagcattgcgcatctgaaattcttcttgaaggtctttaagcgttccttgcgctcttacttctccgttatgtaaaataacaaatttatcgcagtagcgttccgcagtcgccagaatgtgtgtggacattaaaatgcctgcaccttgctttttcatatccgtcatcaaatcaagtaaagattgtataccaagcggatctaaacctaaaaaaggttcatcaataatataaagagacggctgaaccaaaaaagcgcacataatcataaccttctgcttcattccttttgaaaaatgcgcagggaaccattttaacttccgatctaaacgaaattcttttaaaagcggctgcagacgggcttcatatgtttgaggctcaagtccataagccatagctgtcatatctaaatgttcttttaatgttaattcatcgtatagcacaggagtttctggaataaacgtaaactgacttcgataacctgttgggtcttgttgaaaggttttattattaatggatacacttcctttttttgcttccattagcccaatgatatgtttaatcgttgtacttttgccggctccgtttaacccgattaacccaactaattcacctgcatttacatcaaacgatacatcttttaagacgggagtttttgtatatccccctgtaatattgttaatttgcaataaagaacccatcacgatctccttttatttgttcttttttgtccccaagcgcaagcgctatttgctctattgtaccaaatctttttcttcctcacatcgttttcaatttttttcggttaatttttccagaatataatcgaaatattgggacattctatatagggaagaaggaaaacaagttattgattacaactaatcattacaaagcttcttacatttgggatgaggtgtctacagcaggcatatttcagaaaaccttattgtaaatcgatgtatgtttgattcataaggggatggtagtcatgaacgtagtaagaatatatataatgggtagacaataatgttcatttattactgtgtaaatgaggtgtttgtcaaagaccaagaacgatttcgttcacattgtatattttttagctcaatgcttaaatgaggtgtttgttaaagagaatatactttttcaagttactgtttcattaggcaatgcaattacgtaaatgaggtgttccttaaagatcatatgctgcattaaaagctattttttccttcttcacatgacgggatgcataatcgtttgcatcccgtttttgtgtataaaatgccagtagctatttcttgcctgctgattgcatttctactttgtggtaaaataaatgtacatgtatacccatacatttatattggtaacggaaggtgaatataatgagcacacatgatgaaaactgtattttctgcaaaattattcgcggtgaaatcccaggtgcaaaagtatttgaaaatgaacatgtattagcttttttagacattagtcaagtaacaaaaggtcatacactggtgattccaaaagtacataaaaaagacattcacgaactaacgccggaaattgcgcgcaatttgtttgaagtggttcctcaaatcgcaaatgcaattaaggaaacatacagcccaatcggcttaaacatcttaaataataatggtgaaaaagctggtcaatccgtgtttcattatcatatgcacattattcctcgctatggggaaggcgatggattcggtgctgtatggaaagagcatacaagcgaatacacgcctgaaaaacttcaagaaattgctggcaatatttcttctcgcctttcttgaaacaaaaaaagcttacacatgtaagctttttttgttttatctattcatttgacacatgtttaatcagtttgtgatataaaacatagtgcggcttttcacttattatgaacgactttccgccttaacttctaaattcatacgctcttcaatcaattttgttaatgctcttgatccttcaggtaccaagtggacaccatctgatgtaaagtattcagggtgcttagaagcctctgagtaccaatctacgagcgtgacgtgatcaaatttttcagaagcagctttcaagttcttgttcacggtgctttcccacgaacgaggaacgcgcgtattcactaagtaaacgtccgcgtgtgaaaaagcttttaacagttgttcaagttcttcatttgtaaaatagccgtttgttcctaactcaataatcactgcgctgttcggattattaaatgcttgatagctaggagttagctgcagtgcttcattgagctgccttcctacttttccgtcaatcgtaatactaagcggcatctctttaagattaggagcaatatccagcatgaccgagtctccaatcgcaagaacatctctgtaagaattcggctgccgtttttctttggcatcagatttttcttccccggaactcttttccgcgttctttgcttttttatcatccgctttgttcttgtctttgagagaagttgaagcattttctttatgattcgtttgaattttaacctctgtctcttttgctgtcgtttcatccttttgttgcgtactaatagcaaagcttgtcatatccgctgtaaacagcgccaaaaagaaaatgagactgcccaaaaccgcttgtctcgaacgagagagattacgccatttaaaaagctctctcggatggtagtgccggaaataatagcgaaagccgcgtgtgcggataggcacttcgatgtaacggtaagaaagttcagcaatgataaatgtaaggcctacttgtaacagcgcatgccaatagaccgggcggccaatctcagatacaggtgttgtaagaacaataaccggataatgccacaaatagataccgtatgatctagtaccaagccagcgaagcggtttaaacgacagagcttttcctaaaaaactactaggatgactaatcgttgcaaccagtacagcagcgtttaaacaaatcagcagcattccaccttgataaagaaaagatgcatgagtatactcatcaacgctccatacgcagagaataaatacaaagaaactcaccatacttaccgcgtttaatacttgcttgcctatggctggaagattttttgatgacaaacgatacatcggccagacaaatgcaagtaaacagccgattaaaagggcaaacagccgagtatcggttccataataaatgcggctaggatctcctcctggctcatataaaaaagacattagaatagctgaggccattactccagctaaaatgaatagagaaagaattcctctctttttaataaattttaaacccaacaataaaacaagtggccacacaatataaaactgctcttcaatagcaagtgaccataagttctttaatggtgacggtgacccaaaactatcaaaatatgaaactttatgaaaaataaaccaccagttactcatataaaaaatagacgataatgcatcgcctcgtagcgttgttaacaatggccggttaaataaaataacccacgctgcagttaatattaccatcacatacacagctggaagaagtcttctcgttcggctgatccaaaaatgcttcaaatttcccaaaggattttcccaagattgcaccagtaaaatcgaggtaattaaataccctgataatacaaagaaaacgtcaactcctagaaatcctccagatgcccatccaaatcctaagtgatatgcaatgacagacataacagcgaaagctcgaagtccatccaaactatatatatacctatttttcttttcctttgcactcataaaaatgcctccaagcaatatgtacaacaaatttcttccctaatcaatattaagaatattacgcaattgttacatttttgttacaaaaatcattatatacaatattattactttcttcaatatatcacttacttaaaatcaaagaataagcaaaaagaaacaaattcattatctatcttattcataaattactaatttagtagtagtcatatcgattctatctgcgcagtactaaagcctaacatctttctttcaccttacccgtttcagaaatagaaaaacttcacacaattggtgaagtttctaaggtgtctttagcatatctacgtggggaagcccttcatctgaataaatatcggaaataggtctaaaaccaaacgattcataaaatgtttgaagtctgctttgagcttgaattttaattgtcttctcgtgcaactcattctctaaaaaatcaattcctcttgctaccagttctcttccgagacctgtaccgcgctgtgcttgttttacaataatgcgcccaagagaagcttcccgatagctaattccttttggtaaaactctaaggtatgcgataattttctcattctcttttttgaacaagtgataagcaagtttgtcttttccatctacttctaagtaagcacacttctgttcgacaacaaaaatagcggtgcgaacctgtagaatttcataaagctcatcgtttgtcagctcttgaaatgattttatgcaccaagtcatgatccgctcaccttttcttattgttctttttcaattaaattcagcgtacgttctagccaattgatatagcttgtctcccggtcctgagcgcgagatagcaccaaataatgaccaaattgaggagacgaaacggtaatgtgatgattaacttgttccaaaaggtcatccattcgtttctttaaaaaagttagcttcactttcctgcttgatagttgattatctatttgttgctttaactcttctattgacatggatgaagcaaaataagcttttaacataaattcatctttagttgtttcaggaataggatcaattgtagtgagccacttgcttaactcggctcttccttcttccgttatcgaatacatctttttttctaatttcttgccttgaatcacggtttcatagcgaataaatccctcttctgttaatcgctttaactcgggataaatctggctgtgcttagcactccaaaaattaccgacctcttctttaaaaagtctggtaatgtcatacccgctgagctccttctgatctaagagccctaatattgcatattttaatactctcattctgttcctccacattatttcttccatcagtatagcatataaacatttcatttacatgtttgccaaaacatgtttgcgtatacttttcatttatctttttttctattattttctctttacagattaatttaaatttttgaaaagttacctccacaatcaatggttttcatgatagtataatgatattctttctgacatcagtcattagccattttgtatgatgagtgttcgaactaatttgaggaggaattaatgtgattacgttaaacagagcttacaattttaatgcaggtccgtctgcgcttcccctacctgtcttacaacttgctcaagaggagctagttaattttaaaaatacaggtatgtctgtgatggaattatcacatcgcagcaaagagtttgaagatgtattaacacatgctaaagaaacactcacggaattgcttaacattccagatacacatgaaattttattcttgcagggcggagcaagcctgcaattctctatgattccaatgaactttttagctcccgatcaaatcggtgcatatgtactaaccggatcatggtcggaaaaagcattaaaagaagcgaagaaacttggaaaaacaacagtggttgcttctactaaagaagagaactaccgctctattccagctttagatgatgtaaagcttccaaaagaagagattgggtacttgcatatcacgtccaacaataccatttttggtacacaatgggctgactatccttctatcgaaggaatagacttaattgccgacatgtcaagcgacattctttgccgtcaaattgatgtatctaagttctcactcatttatgctggtgctcagaaaaacctcggaccatctggtgtcacggttgtcattttgaagaaagaattgcttaaacgtattcctgaaggtttaccaacaatgctgaattatgagacacacgtaaagagcaactctctttacaacactcctccaacgtttggcatttatatgctttcacttgttttagattggattaaagaacaaggtggcgttaaagcaattgaagcccaaaatcataaaaaagctaagttactctacacaagcatggaacgttcaaacggtttctatacccctcacgctacagaggaaagccggtcaattatgaacgtaacgtttactttaccgaccgatgagttaacggctgcgtttttacagcaagcaaaagaaaaaggcttcgtaggattagctggacaccgttcaatcggcggatgccgcgcttctatttataatgctgtaccgcttgaagcatgtgaagctcttgctgtctttatggatgaatttgcacaggcaaacgcataattggcagaattaactgattcttttttcacataaatatgttataatcagtatgtaaatatatgcaatgggcatagacgcactattggtatatttcgagcttagcttagaagaggagagatgagaaatgaatacaaaggttttagtttctttagcgttattagtcggaattggagcggttctccacacggtggtacctcctattttatttggaatgaagccagatatgatgttaacaatgatgtttttagcaatcctgttgtttcctagcgtaaaaaatgttgcattggttagcttaaccacagcggttatttctgctttaacaacaagctttcctggcggacaaattgcaaacttgattgataaaccaattacagcatttgttttctttgcattatttatgcttgtgaaaagaacaacaggcattaaaacaccagttgctgctgctttaacagctgttggcacactcgtatcaggaaccgtattcttgtcagctgccgcgctaatcgtcggcttaccgggcggaaatagcgtcatggcacttgttgctgcggttgtattacctgcaacagtagtgaatacaatcgttatggtcgttatttatccaattgttcaatccgttctaaaacgcacaagcatcaaagcaaaattatcgtaacgtcaagagcctgatttaattaagaatcaggctcttttttcacaccaaaagctaaggcccgccaaagcgtggcggacctttaataaaacggttcatttatagtatgttgctgatcttttagagacagcctacagttcgactcttaactttttgtttaaaaagaaatggtacaggattcttttcacttaaatttcatttgcagctcatacaataggtatgaagacttactatgtaataaaggtttaagttctccatcctaggttacataataaagtataagcgccaataaaaaactcgcaaaagccactgtcgcacatgtaagagacttttgtttcaacacatgtttaggtggatatgatgccgttctagtcgtaaggctaaaccatttaaaggcagccagaaaaaaactcaggctaattatcaaaagaatgaataaagctaccccatgttgataacctccttcttttgtataaatctatgctatttttttatgattatgtcagaaggaagtgttagcaattactttactacataggaggaaataaatcatgagcagaatgaaaaaactagcagctggagcagcaatcggaagcaccgtagccgctattacaacgcttcttgttactccatattcaggacgagaacttaaacagcgtgtcagctctcgaaaagaccgagttaacgcttcacaacaagagctctcaacaaaaataaaagctgtttctcaacaagtacaaatgaccgccagagaaggaaatactatagtgaaaaatatcgcaagtgacctttctactacccttggtcagtttaaagaagaaattgtccctcataaggaatcccttcagcatcatttgaaagaaatccaaaattctttgtcaaacctagaggaacatgtacagacaactaaaaatcccaatgaaaaaattgacaaaaaagaaggttaagacgccttcttttttaattttttaaaattttgtaaatttacatctttataattttttattttattggcataatagaagataaataaaaaaagagactaagtaggtgggagaagatgaaaaagactagtgatcaagattacagtttgaaagaagcacttctatttagccaacgcattgcccaattaagtaaagccctttggaaaaccgtagagaaggattggcagcaatggattaagccttatgaccttaatattaacgagcatcatattttatggatttcatatcatttaaacggggcttccatttctgaaattgcaaagtttggagttatgcacgtttctactgcatttaacttctccaaaaaactagaagaacgaggtttacttgaattttctaaaaaagaaagcgacaagcgaaatacgtacattcagctgacagataaaggcgaggccattttattagatttaatggaacattacgaaccttctaataattcagtgttcagcggcgcacttccgttgcgcgacttgtacggcaaattcccagagtttatggaactaatgaccgtcattcgcaaaatttacggtgaagattttatggatatcttcgagcgatctttccatcatatcgaagaagaattcactgaagaagatggcaagcttgtcaagaaagataaagagaaccaccaggagactatttcaaactcttaatggttagtcccttatccattgaataatttcaaaaaattcattcatcacatcttgataagaaggttgataacgaagcgattcgaccgtctctctgggatttaatttataattcagcatgccaacaaattgtgtaagaagcggaacaaagtctgttagaccttccgctttttgctcaatatattcgttttttgtatcttcacacagaattaaaatttcctctacttccttctttgtaagctgatttcttaccactaaatcaataaatggtttagcttcttgttcagatgtcccagataacagttttatgtaatattctaaacgtgatactcgagattctaaagtttccatccgcttcccctactccttcaacgttcatatacctctactccatattgtacatgattcattcatgttcttccaaataattctttcttcgtcattcacatttcctgtttaagtagcaccgtataaagattttcatatactgattatgtactcactgcatatattaatataaatccctctgtcctttttaacaatccttttgcacaatgactaattgttactcatttcttatccattcactttgctatttcgtttaaaacctatttctcaacttcttaactaccctttataaaataaaaaccgcatttctgtgtaaataccttttgaaattctttgctcaactgtatatataactatctattttaccgcttttttggtaatgttaatatagatatttgtaaattcatacaaagctgtactatataaatgactataagactttctgtcttcgtcacactgattttgttagggggatttttatgtacatattctttattgtatttgcactattcattttattctacatcaatgcactaacaaatacattgtgtattcaaaaagaaattccagctgaaaaacagcctaaagtttttcgtacgattaatgtattaattaccattttattagtttcatcttatattgaagtatcatttacataaaaaacggtgagatgtctcaccgcttttttataggcttagcaaaaacagctagctccgatgataactaataagatgaataatacgactaatagcgcaaatccactgccgtatccgcatccgtaagaacccatatctatcgcccctttccctttatattcatctgtttcctagtggtaacatgcacaaccaacaatgactaataagataaacagtacaactaatagtgcaaaaccgcctccatgtccgcatccgctcatttgagcaccccctttgtttactaatactgcatcttatgcatcagctcaaaaaacgtctaggcttttagcccaaactccataatttatttctcttccttctcgtttgaagattactctgtgagtttgtccaccattttgaaaacgctttataaaaaagctgtcataagcgtataatcactccatacttagtggaaaataaatgtaaatttacttggttttaacttcatttgctaacatcaggaaatgtgatatagtaaatcttgagtcaagctacataagtaaaaatgatgagtaggagtgtttacgtatgaaaaaaagcttagttgcactaacaacggcagccagtctcgttgctttatcagcatgcagtgggggaaatgatgcttcaaatgcaaacgattcttcaaaagtaattgtagaaacaaaagcaggcaatatcactcaaggtgatttgtataagcaaatgaaagatacaatcggacaagaccaatttaatacaatcgtacgaagcgttaccgaagaaaaagtattgagtaaaaaatataaagtaacggataaagagcttgatcagcagttgaacattctaagagaacaatacggtgatcaggtggattcagttattaagcaaaaaggcgaaaaagaagtcaaagatatgctaaaagttgatattctccgtgaaaaagctgctacagcaggcattaaggtatcggacaaagaactgaaaaaagcttatgatgaatataaagctcaaaaacctcaaattcgcgcaagccatattttagtaaaagacgaaaaaacagcaaacgaagtagaagcgaaaatcaaaaaaggcgaggactttgctagtctggcaaaagaatattcaaccgatcagcagtctgcagctaacggcggcgatttaggctacttcggtgaaggccaaatggttaaagaatttgaagaagcggcttacaagctgaaaaaaggtgaagtaagtaaaccaatcaaaacagagtacggctaccatatcattaaactagtcgataaaaagaaagtagaatcgtttgagaaaaagaaacccgaacttgagcagcaaatcaaacgttcaaaagtagatcaagcagaagcgaacaagaagattcaaaaagagcttgataaagcaaaagtggaagtcaaagataaaaatgtaaaaccaattttcgaagaaggtgcgacagatagtcaatctggcgtagaaactcctcagcagtaatgctaagagcctgtcactcatgtgacaggctcttttatataatcagatggaatcgctgttgcgtctttctttttccacttgcattctttcgatgaagacttgtccctctttttcaataaacgaatcatccacttgcttatcatgttgtgcagcacgaatcgccataaatccactaaagaaaatgcctgctacaactaaataaatccaaattggtagtgtcaccatatattgatcccccatcacagttatttacaaccactatatgcgaaggaagaaagacttatacctttttaatcaatcgttggtttataaaatgagcgattatcaagtgcaaaaatacgctctgtaaactcaccgggcttcacttttgttaatgctcggtccagcatattcattttagcgtctacattgtcaatcaaatgaagcatctcagcctctttaattaacggctttttcggacttccccactcttccttaccgtgatgcgataatacaaggtgctgaagaagcataacctcttctccttcaatcgctaattcttctgccgcttttccaatttcattcaccataatcgaaatatggccaagcaggttcccttcgactgtgtatatcgtcgaaacaggacctgaaagttcaaatactttgccaaggtcatgaagaataactccagcgtacagcaagtcgcggtttaagcttggataaagggttgaaaatgactcagccagcttcagcatagacaccacatggtaggcaagtcccgatacaaactcatggtgatttttagttgctgccggatattctagaaattccgtttgatattttttaaacaaatggcgagtaatgcgctggacattcgaatttttcatttcgaatatactctttgtaatatgttcgaccatttcttcttgagataaaggcgccacttctaaaaagtcagatgtgcgcactccgtcttggggctgtgcaggacgaatgttgcgtattttcagctggttgcgcccgcggtaattcattacttctccagcagctcgcacaatcttttgagcagcataattttcctcgtcatctggggaagcatcccacagcttggcttcaatatcacctgttttatcctgtaggattaccgttaaaaatggctttccattgcttgcaattcctctcgttgaggatttaattaaaaaataaagatcaacttgctctcctacttcgtattgagcaattccttttgtcatgatcttttcctccttactagttcattctatgtatttaatagcaaagctcttatcgcttcgtccgcttatttacagctctttacatttcattttaccatcgcttggcaccgaatgcacgggtagacgctttttcataaaagatgagattgcgacataacaaaatcaatgcaatctaaagaccaacaaatggcataaaggagctgaactgcttgagacaccgctgttgatttccccgcaagacttcgctttccgcgggagggcgctgagcctcctcgtcccttccgctcctgtggggcctcacctattccgcttttcccgcaggagtcttcgtcttgctctccaatacacagctagaagcagccacatatatgaaaactatggtcactatagcaattaaaaaatccgaacgagttggattctccatcaagaatctaggttgttcgttcggatcttccttcaactaaactacttttgtctcagcctctcacttctttatgtttcttttttcgttagctgcagcgcttttttaatatctttaaaagaggtagattgcccatacataaggactcctcctttatacacacgggcaccaaatatagctaaagcagtaatcgtcacaactaaaatccctatcgatacactcacttcccacacaggaacatttaacatacctacacgcaaaaacataatcatcggagcaaaaaacgggataaaagatgtgaccgtaatgattgtggtttcaggatcaccaagtccaaacatagcaattaaaaaagcggccacaatcacaagggtcataggcgtaatcatttgctgtacatcttcaatacggctcacaagagaacctaaaaaagccgcgagcgtagcaaaaaggaagtaccccaatatgaaaaagaaaaatgcatacacgaatgtagtcagcggaacatcattaaatccgagataagaaaagataccgttatgatttgtttccacactggcttttaacgatgtgtagcccacgctcagtatcactgcaagctgtgttaagctgagcagtgcaattccaatgattttagcaaacatttgtgtaataggtgatacgctcgatacaaggatctccataacgcgggatgatttttcagtagctacttccatcgcaatcatgctcccatacatgataacggcaaaataaataacaaacagcagcacatacacaagacctcttgcttgatttagctcttgttctgttttggcattttcaactaacgctttctttttaaatgaaacagggctgtaaagctgatcaatttgcttttcttctaacccgatttttactgtagccatagccacttttgtttgctgtaccgcctgttctaaggtagaagaaaggtttgattcggccaaggagttagctttgtacacagcttgaggcagctgcttatcgtttaaagataaaagtaaatagctatcgagctccccgttttttaccgcttgttttgccttagactcagacgtaaattcttttaaatgaatgtctttatccatgacatttacattttgtttgaacaaagtatatacgctttccacttcatagatgacacccacatttgttccattatcgtctgaattaaaaacgtcgataattttctccatatttgtaagagcaaatagaataagagcagtaataatcgtcgtaataataaaagattttgtttttaatttattaagatatgtatgaaagacaatgacccaaaatttattcataggaagcacctaccttttcaatgaaaatatcatttaatgaaggctcttccactgcgaatttagatacaaatgaaaagtgtttaagttcttgaaaaatgagttgcgatacggattcatgttgaatttgaacaatcatgccttcaaccgtttttttcacctttacaacgccttcaagctctgtaattctctcaaacggaccttttccgtgtacaatgacgtttttctttccaaatgaacgtttgatctctgggagccttccatacactacaggcgtgccatgatgcataatacataaatattcacaaagttcttccacatgttccattcgatgacttgaaaaaacaatcgtcgttccgcgttttttcaaatcaagcaccgcttcttttaatacctctacgtttacaggatccaagccgctaaaaggttcgtctaaaataagcagctccggtcgatgaataacggaggcaataaattgaattttttgctgatttcctttggatagctcttctacttttttggaagcatattgaggaatattaaatcgagacaaccagtgctccatttcttgcaacacgttcgcttttttcattccgcgcaaccgtccaaggtatacaagctgatctttgacttttaatttcggatacagtcccctttcttctggaaggtagccaactagatgacttctactgtaagttaaagatttatcattccattggatgtgacctgaggttggttcaatgagccctaaaatcattcgaaacgtcgtcgttttgccagcaccgtttgcacctaaaaaaccaaacacttcgccttttggaatttgcaaggatagctcgtttacagctgtaaattcaccgtacctttttgaaacttcacggatagaaagagacatttaattcctcctttgtaaataaacctatgtttattgtatggaaaaaaatgatatctgtaaaccttagcaggatttagaggaataggacgagaaatatgttgaatgcgcttacaattatattataagaggagagtagattttatgagtacttacacattaactgcttttgaaaagactggagaaaaattaatagatgaaagttttgaagcagtttctgagacagaagcaaagactatcggcaccaagaagttagaagagctttcctatttagaaaaaacgcatcgatgcgttagctctagcggaaaacttgtattgtttcatcgttaatacaaaacgccggaaagttttagctttccggcgttttatattactttacagcttcttttagttctttaccagctttaaatgccggtacttttgatgctggaatttgcatttcttcacccgtttgagggttacggcctgtacgagcagcacgctcgcgtacttcaaatgtaccgaagccgattaactgaattttttcaccttcacctagcgttgatgaaattgtttctagtaatgcgtcaactgctttagatgcatctgcttttgttaactctgattttgttgccactgcgtttactaaatctgttttgttcatttccaatcacctcattagtttctacattatcttgtgttaccactgttttgcaacttttaaacatgctctatcaatatgatagacaaaaatattggcttttaaactagttcacttaattttcggaaatatctttttcactttgattaaaaacaggcgctcgcttttccagaaacgcacgtacaccttccttatgatccgaactttggctcatagcaaactgacttcttttctcaagcgcaagcacttgctttaattgtgaaatagatgtctccacataaattcgctttgtttccttcaaagcacgtgaaggtttttttagccaatatgagagataatcttctacatgcttcgccaaatctccttcttttatttcatcaattatgccaaattgataagcttcctctgtttttaatgtctttccttcccaaattagctgttttgcacgatgagcaccgatgcgcttttctagtaaaaagtgaccgcctccgtctggaattagagcaatgccgataaagttcatggcaatttttgtgtgtctttctgcaataatataatcagaagcaagcgcgatgctcagccccagccctgctgccgcaccgtgcagtacacttatcgtcatttgagggaggctgtataaagtcagcacggcttcattaatcaaatccattacctgctcaaaacgttctgattgtgaaggtgacatcatcatattaatatctccgcctgctgaaaatacttttccgtttccttttactattaaaaaatctgcttcgctttcttcgacaacttttaaacattgaataaactgctctagcacttcttcgtttaatgcatttaacgcatccggcctgttaaacgaaattgtggcgatacgctcttgcaaaactagttctactacttttaattcgacggtcatcttactcaccctttctgataataattgaggacttgttcacgaagcgtacgttttaagagctttcctaccgttgtcttcgggatctcatccataaataaaatgtcatctggaagccaccatttcgcgaactgcggcgctaaaaattccagcagctcttctgacgaaacgatgcctttgtatgcatcttttaacacgacacaagcaactggacgctcttgccacatctcatgagggactgctatgacacaggcttcgaaaacagcttcatgggcaataagcgcgttttctagatcaaccgatgaaatccattctcctccgcttttaattaaatcttttgttcggtctacgattttgattgttccctcttcgtcaaccgtcacaatatctccggtatacagccagccgtctttaaacgtatcttctgttcttttatccttgtaatattcagaagctacccatgggccctttagtaatagctcacccatttccactccatcccaagcaatttcgccattttgacctattactttcatttcaacgccaggaactaagaaaccttgcttcgcttttacgttgagctgatactcaaagtcttcgctgtactgatagctttttaagcgggagacggtcactacagggcttgtttccgtcattccgtatgcatgcataaattcaatttgatatttttcctgaaattctcgaatgacgctttttggggccgctgatccgccacataaaatagctcgcaaactatcgactgcgtaaggccttttttctatctcttgtaaaaagtttaaccaaacggtaggtactgctgcagccagagttactttctcttcttcaatcagagaagcaatcgtctctgaagtacaaaaagcacccggcagcacgagctttgttccaaaccaaacggcagcaaaaggaattccccatgcgttcacgtgaaacattggaacgataggcatagcggtatcagcttctgataatccagcactatcagcaagccctagcgccatacagtgcagataaatagcgcgatgagaatatacaacgccctttggctctcctgtagtagcagaggtataacaaagacctgctggttcttcttcgtttaaatcttgaacaaaagaatgcgatgcatccccttgcttaatccaattttcgtaatgataaactggcaagtctgtttctggcagcttattttcatctgacataatgatataggcttcaacatgtggaagcttttgatgaatgctttcaaataaaggtaaaaagcattcatcaaataaaatgactttatcgtgtgcatggttaatgatgtatacaatttgctcaggatctaaccggatattgatggtgtgaagaacagcgcctattccaggcacggcgaaataagcttctagatgtctatgatgattccatgcaaacgtcccgactctttctcctcgcttcactccaattcgttctagcatactagagagctgctgagtccgttttattaactgattataagttaaacgatgaattccttttgaagatttagaaaccacttcttttttactaaacagtttttcagctctttccatcatagatggtacggttaactgtacattcatcattaagcggcacctcgcgtcgtcataataagaaaacgcttacaactttttttatatattcaacagattccgacatttccctgccgaaaataaaaaaagatcactaaaaagtgacctttttatttcctaaataattcatctaaaatcttgagtttctcttgtgtgtagtgctcgaatccatcgttgtacgattttgggtcttttggattcgcaaaccttgtaataattcctgtttctggatgcacgaacttactagatgccccgcatccaagaccaataattgtctgcttttcttccatgatcataatattgtacaggctctcttgaccagggaatgaatatccaacgttctctaaattacctaaaatatttttttggcgatataaataataaggttcatatccttgttcttgagtccactcagtcgctaaatccatcattttaccaatttcatagcgatctgccactttgtatttccgtttattttgagtcatttcagacgcgcgtttaaacgatagcgtatgaacagttaaagattcaggaagcaattttttagattcgtctagcgtatgctgaaattcttctacaccttcattcggaagcccaataattaagtccatgttaatgttattcatccccatttttcgagaaagatgaaatttatcaatagtttcttcaactgtatgatgacgtccaatagcttttaaggtttcttgaatataagactgcggatttacactaatccggtcaatattccatttgttcaaaacagctagcttttcttccgtaatcgtatcgggtcttcctgcttctaccgtaatttcacggatattttgtacatctgggaacgattcatacatctcttcatacagcatgtccatttcttcagcggtaatgctcgttggtgtgcctccaccataatagacggttgtaatctttacgttattgtcttttagccattttcctacttcacgcatctcataatgcaagccgcctaaaaatgacgtaacggatccttgacgtccgttaatcgcataggctgggaatgtacagtatgcacacttcgtcggacaaaacggaatgcctatataaatgcttacctcgttctttaactcatgtaaatcggggatagctgctagttgacgatccacaatatgctgcattaaattaattttgtcatcggtgattaaatattcttcttttagctcacgatgcgcttgttctttacttttgcctgactgcagtttcatatgaagcagcttcgtcggacgtataccagttaaaataccccatttttgaacaatgcttgtatactcctgtagtacagataagtagacgcgaagcaccacattttttatttgcttaaatttttctttttctgtttcatacggcgtaaacgatttagcaagctcttctgtaaacaccttgtccgtttcagcgtcatgcagcactgctttcgcataaatttcttcatgaacttttagctctacttcgactttcagctgagcttcgttatcatcctcaaaggagacgttgctttcttcaaaaaacaaatctgaaattcggtgaagcggacgtaaaaaacgctcatcttctataccttttatataaatgttcaatataatcacctttcaaatcaattctatctaagtaatcagtttacaaaacctacgtatgtccggtcaaagtgctcagctcaacagctagaagcacctacatatatgaaacctacgttcaccctaccaataaaaaaatccgaacgaattggattctctatcaagaatctcgattcatcgttcggatcttccttcggctaaactacttttgttctagactcttttttcctttatttattttaaacgaaagctgtcaatttgatgaagataaccaaggcgctgctgctttctaaataattctttcaccatataggctacaccattttcattattagaacgagtaacccaatccgcaagcatttttaattctgttggtgaattgcccatggccacacccattcccgcatgttcaatcgtttctaaatcatcatagcaatttccaattgctactacgtcttccattggtatccctagacgatttgctacataacgaacgccggcagcttttgtggctccttttggcgtaatataacacctattttcatttggatacgaaaaccattcaatatccggaactgcactagcaattgtttgctcggcgtattctctttctctacgatctgcaaaatacacttctatttttggcgtagaaacaggttcatcacgaagcgtatctcctaatgaatctacgaactgcacgggataaaagagcggttctcccgtttttaatacgcttttagctacaatattattaggaagctttacacgatttccaattgaaaacctttcatgtaaaatgcggacatgacaattaaaattctcaaaaagctgaatgagattaaatgttttttcctcgctgattctcttatctagtatcggtttgtctatcgatgttccgataaaggcaccgctatgagtaattagcattgctggatgaactttaagtgaccgagcaattttttttgcagacgggaaatgcctgtttgttactaacgtaacgtaaacacctttatttttcacaaattgaatagcgtctttcgtttcttttgtaacgcgcccttggctatttaaaatggttccatcaatattcaacgctagcaatcgataagccatatgagaaccccttctttcatagatgtctaatccgttaggatacggttataaatgaccttttcatgatagtcggcatgtgtagccttgttactaagcttatgagcaaaactgcacaattagaaggaatttccgcataaaaaaagaggaaaagatttctcttttcctctttcctctatctcttattcagccgcaccgtaaagttcttcaagtggcttcatgataattttgtttaattcaccaattaccatgctcatacgttgctcagcttccattagcttcgcgatattttgatcttgttgaacgattgcaactgtttgttgagcttgctgaacttcttcttcagtgatttcttggcccatcatctgcttttgttgcagctccatttgcattgtacggaaacgctcaaataattgttttgaaccttgatcagcgtttactgctgcatataagttttttaagtttgtgtaatcgtcgctttgacgaattgctttttctaaatcatttgctacatcatgtaagtttacagacacgttaagttcctcctaattaagttctataatttcttgacttccctaactataacaaattattatataaaattcagcttaagacctttattttctcagaaaacgataaattctcttcacagattgggctaattcctcatagtatatatcagcattcgtctactaaaggaaagaaaaagaggattcgtttatgaatacttttaccatttctctaaaaccactagagaaccatatgagcagcgacatttatattagttctgctctgttctcccgtgtgaagtgcaagcacgagtttacgttaacagtaggctctatcacgaaagaagtcgaagccaccgtgtttcagcatcgagaatgctgtttcatgatgtcagaagctctatttacagactttcgctttccgtatgaaacgcatcagctgagaggcatttatgaagagaacacgtttaggctgggacccgtaattagcatcgtaacagaagttcgagaagatgaagaactctttggctccatttctgtattttgtaaggaatttgttcaagcttgcaaggagttagggtgtttttgctatgtgagcaaattaagcgacgtgaagtcattatcccctaaaggatatgtttatcgcgctgatcaatgggtttattcagacgttccctttcctggaatcgtacacaatcggattcatgccaggaaaacggaacaaaccgctgattttcaaacctttaaaacatttttaaaagaacatgacgttcctttctttaacgcacgctacttaaataaatggacggtttttcaacagcttaaagatgtcgtacacttgcttccatatttgccaaaaacgtatcagcttcgttcacgtcaagatcttcttgacgctttggaacttcatgacgatgtttttttgaagcctgttcatggtagccaaggaaaaaacatttttaaaatttcaaaaaaagagaagtatattttagactatacaacgtttacgcagacgtatgaaaaagaatatgaatctctttatgacttatttaaaacgctttatagtcaattaaaaaggcaaggattcctcatccaagaaggaatttcactgcagacatacaaacagtgcccttttgatttccgcattctctgtcataaaaaagacgacttgacgtggaaaatcacgtccattgtcacacgtgtatcaaaacccggcaatttcgtctcaaatcttgcccgcggaggagatattcatcctcctcagcaagtgttaactcagctctatgattcaaaaaccacgcgccatatcctttcacttttaaaagagattgcgattgaaatttgcacgcagctttctcatccgtctgaactttatgcagaattcggtattgatttagcgattgatcaagaaggaaagccttggattattgaagtaaatgtcaaaccttccaaacaatctgattcaagcgctttctccattcgtccatcaacaaaagcactgcttgattattgtctgcatgcaacgaattttcaatttcccaaggaggatttacgatgatttcattaggctttttaacgattcacccacagcaagaagtggagtacgtgaccgaaattgctaaacatgcttctgagttttcgattgaaatataccgttttactccttttaacattcatcctaacaccgaaaatattgaaggcttgcgctacgatttacaacaaaagaaatggatagaagattccttcttacttccttcgtttatttacgatcgctgcttttatcgaaaagactccctgtctaaaaaggctcgccctattgtaaactggcttaagcagcgggaagatgttacatttttaggccatggattgcccaataagatagaggtctatgaagtaattaaaaaagatagctatttatcttcatatattcctcctaccactccaatcgaaagtgtagagcagcttgttcagctgcttcgaacaaacgatagcctaatgattaaacctgccaacggctcacaaggtaaagggattgtgaaattaaaacagcgcggacgtgaaattgaagcttcttatcaacaaaatgacattgtaaacaccattctattttcctcttttcaggagtttaagaactggtttacgaaaacgacccgtgatgtattgtatattgctcagccccatatttcattttttccttatgaacgcactccttttgatataagactgctattacaaaaaggaaacgatggtgcttggaaagaagctggaagaggaattagacaaggcgaacgggactccatcgtaacaaatgtaagttcaggagcatctattgtaccttttgagaacttgctgcctcgcatccctcgcgttcatcgtcaatatgtaatggatgaaatcaacaccatttgtaaaacgattccgtccgtgctggaaaatcaatttccttctctttttgaattaggtattgatttatgtatctcgagagacttcagcatctggattctagatttaaattcgaaaccgggaagaaaaatagtaatggagacagcacctgaacaaaaagaagtcatgtataaaaatgtcctgtcttactgcgtctatttagctaacacactatcgtatcgtaaggagtaatgctatgaaaaaaactcttaatcgccttgttgtagtagagcagctaggctgcgatctttctgttcctgcatctctttacaaagactccttgaaacaagcagcttttggaacaatgacagctccatgccttatacgatcttcagaacgtgaagaaattcagatttcagctgagctaatgacaaaactgcaaattcctttcgcccatatgatgcaccctattattgtgaatgagaccattcacttaggacctttaattggtgttttatcagctggttttactggttctctgctgcgaccaattggaaagcgttcccttcacttagctaaacttctttctactgcaagtataacagggggattgccttttatttttgggactcatcatatcaactgggaaaccgggacgataaacggctatttttataaagaaagcggctggacacagcatgaaatcccgcttcctaacgttgtatataatcgtttgccaaatcgaaaaacagaggggttagctccttttaagttcattaaagaaaagatgatgactgattacggcattccattttttaatcctgattttttcaacaagtgggaaatccatgagcttttaaaactgaacgagcagacagcttatttgttaccttacacggttgaaagtccttcgcgtgaacaaataaaaaaacttttgcttcttcatcaaaccgtttatttaaaaccgaaaaacggaagcttaggccgcggcatttatgccttatcttttaaggattccatgtacacgctgacttacaaaggagaaaaaggtcttcatgttcaagaaaaagaaaccttagaggatctattatcagaatttgcatatttacttactaacccttcctacattgctcagcaaggcatttcattaatcaaaaaagaaaagcgctgtgtagactttcgcgtgcatacgaataaagacgggaataaccaatgggtgcttactgctctagctgctaaagtagccggccccaacagcatcactacacatcttgattacggcggagaaattgaagctacagccaaaatattcaccaacccttcttacaaaaaagaaattgaaaataagctaaaagatgccgctatctcaattagtcatgtgcttgaacaggagttaaacggattaattggagagcttggattcgattttggagtggattaccaaggaaacgtatggctgtttgaagctaactctaagcctggtcgctctattttttcacatccttccttacgaaaagcggatcaacaaactagaaaactttctctagaatatgcgatttacttatctggatactatctaaatacacctgaaggcatcagcatatgattacaatttactatcataaagaaaagcagcagtggtttcataataacccttcagcatcttacacatggggagttcaagaaattgaacttccctttactcaaaacatttcttctacccaagcttttcttcgtttaaaaggagaaaaagtcggtcctattgtgggagttttaacgaacaaagctgttttggaaaaactgaatgtaaaacagcgccctttattagaactcttacatcataccctgcaagaaaaaggcgggcttcttgctttattcgctgaagaaacaatgtctcatcacttctttgaaggatattgctttgacggtgcaaaaaagcagtggatcagaacaactttgccgctgccaaacgttatatataatcgttatccagaaagaaaatcagaaaccaagaagctgacatctttacatcagaaaattaaaggcaagcacatcccactttttaattccgcttttttttcaaaatggaaagtatatcaattattttcaaaggatccactactatcttctcaccttcctaaaacctaccgtttaacaccagaaattgatattgctaagcttctgcaaaaacactcttccctttattttaagcctattaacagcagtaaaggtgccggaattttccgattatcttcccataagcatacgattatttaccaagatcataagcgcaaagaagaattttcttctttacaagcaattgaccttcccaggtctgcttatctcattcaagaagcgattgagacgcaaccattcaaagacaggcgctatgacttacgtattttagcgcatcacaaagatagcggatatgttattagcggcgtcggtattcgacatagtccctatcaatccattacaacacatactttaaacggcggcagcatttcaccttttcaagatcttgaagatgaagtagatacttcctttctttcgtcctttgtaaatacgtgcgggcaagtccttcaaaagtcctttcctctagttgaagaattttctcttgatatggcaaagtcagcccaagggcagtattatttgtttgaagtgaatgcaaaaccgatgatttttgatgaaacagatattcaaacgcaaggtgctaaacacatatgcaacatattttacaaattaacaaaatttttagattaaatgttttttcatctccttttctcatggtaagcttataataactaattgagaaaggagattttctttatggtttcacattttcaggttaaaccactgtatcaaaataatcgaatgccgggctggcacatctcgttttatatgaatcgggtttattatgaggctgattatttaaaagatggacaaattgtatggaaaactgcgctttcgaatcaaatagatgaaacacaattaattgattatattcatgagcttatgctttttcacgtttatgaatagtaagctttcaccgaagggaacgagcacagatgaaacagctgcacacactatttggggataaaatgattaaggctaaaatcccttctcaatttgaacgttacaaatggttttcatgtgatgaaggcttcattggaattgaacacttggctttatctcaaaaagagcaggcgttactttctgcttttttaaccccttatgatgagaaagtttctttactgacgccagagcaattgtattggtcaaacctgttatttgaaacgcctaaaaaagtcattcactctcatcatacgcaccattcttttcgcttcacccagtttttaattaaacgtttgtttgaacaaaaaatagagtttgaaaatgcgcttcacgccttgtattctacctccattactgtgttgtggattgataaacaatcaggtatcgttatcgaaacctttgatgatcctaatgacttaactgaaaatttatcagattctatcgaggtgctatgtcatgattttgaaacttcgattcagttctttgaaggacaaattcacttttttccgtcttcaccgcgattaatttttgagcgtgaaaagaaatggttttatcaaattaagcatacagtcgaacaaaaacatgttatccattttaccgacgttttaccccatttggttctgcaagagtcttcagaggcaatccaaaatcatatgatacatttacttgacttagtaaaagatgatggagatctgttagaaacgattaaagtttatttagaatgtaatttaaacgtatctcttgctgctaagaaattgtacatgcatcgcaacagcttgcagtatagaattgagaaatttattgatcgcacacaccttgatatcaaacacttcacaggagctgtgtctgcttacttagccattcttgctttaaaaaattcgcaagatggaaaataaaaagaaagggttttcgtaaatagtgcacgaaaaccctttcttttttttgtgcatgtttgccatttaccgtttcattttaaaaaattacactagagttaagaaaacggtttcacagagtacatacaagggggaaatggaaatggctgaattacgtttagaacatatttataaaatgtatgataaagatgtgacggcggtaaaagattttaatcttcatattcaagataaagaatttattgtatttgttgggccttcaggctgcgggaaatcgacaacgcttcgtatggttgcagggctagaggaaatttccaaaggtgatttttatattgacagcaagcgtgtaaatgacgttgctccaaaagatcgcgacattgcaatggtattccaaaactacgcattgtatccgcatatgagcgtatatgacaacatggcttttggcttaaaacttcgtaaattaccaaaagatgaaatcgaacgccgcgtaaaagatgccgctcgtattttaggacttgagcaatacttagagcgcaagccaaaagcattatccggcgggcagcgtcagcgtgtagctctaggtcgtgcaatcgttcgtgacgctaaggtcttcttaatggacgaacctttatcaaacttagacgcgaaattacgtgtgcaaatgcgttctgaaattgcgaagcttcaccagcgtttgggtacaacgacaatttacgtaacacatgaccaaaccgaagcaatgacaatggcttctcgtctggttgttatgaaagatgggattatccagcaggttggtacaccaaaagaagtatatgaaaaacctgaaaatgtatttgtaggcgggtttattggttctcctgctatgaacttcttaaccggaacgttaaaagacggaaaggttcaagtaggcgattctcttcttgcagttccggaaggtaaaatgaaaatacttcgcgagcaaggatatttaaacaaacaaattattttaggcatccgtcctgaagatttccatgatgagcctgtatttattgaatcttcacctggcacaaaagttacaatcaaagtcgatgtatccgagttaatgggagctgaaaccatgctttattctaaacttggcggacaagattttgtagcacgcgtagattcaagaacagatattaaaccgcttcagtctctggacttagcattagatatgaacaaagcgcatttctttgatgcagaatctgaacagcgcatccgtgctgaacacgaataaaaaagacccccaggggtctttttttattcctgtatttgcttcaattcttcactgtgacaagtagagcagtaaaagagatgaatacattggtgatttgctaagtcactaggatacccattttctacttttaactgatcgatttccatgtaagcactgtaatcatcaaaataatcgctgacttttcccatatcccccagcactcctccacatgttttgcacgtcatttgtacataactaaacccattacataaggaacaaatcgacatccgcacacctcgctttacctgatcaatatgtacctataatatgcacggaataaaactctcttactctttatcaaactccacacaaaatttctataaattaccaataaatttctatgtatatgttttttccctttcgccataatactagtaacaaccgagcacaacagctcgcaagcattgagttacgccgcggtaggcaagcagatctaatcgatgcatctgctcggctggttcaactccagctaactcaaccattacaatctattttatctaacgaggagatgaatacacatggcaaattatcaaaacgcatcaaacagaaattcatcaaacaagttagtagcgcctggtgctcaagctgctatcgatcaaatgaagttcgaaatcgctagtgagtttggtgtaaacttaggaccagatgcaacagctcgtgcgaacggatctgttggtggcgaaatcacaaaacgtttagtacaattagctgagcaaaacctaggcggcaagtactaatattaactaatttcatattatggctttagcgctccaagatttcttggagcgctttctagtttcttttaatcagcttcctcattcttattcgcaaatgattttacggaaactttgcgaatacgtcgattttctacttccttaatggtaaacaatatctcttcatatgagaaaaagtctcctttagcaggaatatgatcaaactgctcatatatccatccccctaaggtatgacacgtactgtcaggagaactaaccgctatataggttaaaaattcatcaatagggatgtcggcgttaaattcgtactccttttctcctatctggtgtacatacttaacagcttcatcatgttcatcccaaatctctcctacaatttcttctaatatatcctctaaggtcacaagaccggccgttcccccaaactcatcaactacaattgccatgtgaaccttacttttttggagctctggcaatagaacagatattttcatggattctactacaaaaataggttgtctcaacaaatcacgaatagaaatcttttttctttggactaaacaggttaaaaattctctttctgataaaatgccaataatattatcaatatgatcttcatatacaggcactctcgaatatctctcttcaagaaacatttgacaaaccgaatcaatatcggcatttacgtcaactgctgtgacatctattctaggttttaaaatttgccccaccacaatgtcattaaaattgagtgaacgatgaactagctctttttcaatattattaatcgttccttcttcttcgcttaaatctaccatcactttaatttcatcttctgtaatcgttggtgtaggagcagacgctaacaagtgagaagttccttttttcacctgtaaaaataagaaggaaatcggggttaacaatttaataataataaataacaaggaagaaatcatcagcgcaaaagattcggcatgctctttagctaacgattttggcaagacttcaccaaaaatcaaaatgatgatggtcataacgatgatactaatcacaagtgctaggtttcctttaaacatatcgagggccattttagctgccaaagaggacgcagcaatgtttacgacaacatttcctactaaaattgtcgatagcgtctgctcaaagtgttcagcaatatgcagcgcttttttacttccccgatattttttctcagcgtaatgttttaaacgaattttatttacgcttgaaaaggctgtctcagcagatgaaaagaaagctgataacataagcaaaacgactaatatcatcatttgattcagaggcaagtctcccaaaagacattcactctcctgttttttgatttttctgtctttttatcatatcaaatttttttgttgttgaatatttcattcatcaactttgtattactttatgctacgcatgctttttattatgaataagtatacagattgtatatcctaaagaatagatactatcttttatagaggggtgtagccaatgaaaattttactattaggctctacagggcgagttggacagtctttattaaaaatgatgctaaaagatgaaaacgaagttactgtacttgttagagaccgcaataagctacaggttagtcatccaaacctacatatcttacaaggcgatgtacttcatcaagaaaatatcaactttgccctcaagcaccaagatatcgtagtcagcgcgttaaatacagatggtgcagagacgatttcaaaaagtatgccgcttattataaacagcatgaagtattacggcgttcatcgtattcttactattggaactgcaggcatcttacaatcacgaacagaaccagaaaagtatcgttttcaatcaaatgaatcaaagcgtaaaacgaccagagcagcagaagatcatttaaaaggatacttacacttgaaggaaagtgatctaaactggacggttatatgcccaacatacttgcctgagggtgaaataacaggcaagtatcgagtggaaaaagatattttaccagctgatgccgttaaaatttcaacgggagataccgctcactttacctaccatgagatatgggctcaaaaattttccaaatgccgcgttggaattgcttattgaaaaatcagaagaacttttcgttttcaaaacgagaagttctacatccagaaaataccgattatagctaatccacctagaacaaaacctcctatttgaccaacgagagccggtgtcaaaacaggctttcctttttctttctctaatgtgctaatatcaagcttcatctgatacatttcttcttttaaatcttcaatctggccgtgcagcgcttgaatctgacgttcttggtcattcatccactatcttcccttcccttttttatttttatcatatgcgtaaaaaagttaaagctttacttttcggcatcactttttctaaatgataaaaactcctttccacggctttaggataaaaaactctttccttctcataataaaaaagaataaagtccttagtcactgttgaaaggagaacacgatgataaaacttgtgttgattcggcacggacaaagcgtgtggaatcttgaaaataaatttacaggctggacggatgtagatctttctaaaaatggattgcaagaagcgcgagaagctggaaaagtgctaaagaaaaacgaatatacttttgatattgcctatacttctgttttaaaacgatcgattcgcactctatggattgtcttacatcaaatggacttcatgtggatccctgtatacaaatcttggaggttgaacgaacgacactacggggctcttcaaggcttaaacaaagaagaaaccgcaaaaaaatttggagaagagcaagtgcatttgtggagaaggtcgatgaacgaacgccctcctgctttaaagacaacagatattcgctatgaagcttccaaccctaagtataaggaattagctaagggacaatttcctgtaacggaaaacttagccgatacagaaaagcgggttctagaatattggaacgaaatcattgctccttctattaaagcgggcaaaagagttattatttccgctcacggtaatacgattagagctctgatgcagtatttggataacatttcgcctgatggcattgcgaacttgaatattcccacaagcgtgccgcttgtttatgagcttgatgataatttaaagcccattagacattattatttaggcatcgagggagagattcctacacatattccttcttcataaaaaacgtgcctagattgtaggcacgtttttttatatgtttgaacgaaagtattttctatacgcccagtgattagtaggaccgtgtccggaaccaatttcaagcgtatgcttaatcgcatagtgaacaaaatccgaggcggtttgaactgcttcaaccacgcttttgcctttcgctagttcagccgtgacgcaagcagcaaacgtgcatcccgttccgtgtgtatgctttgtattcatcttttcatgcgtgatttcaacgtacgtatgaccatcatacactatatcaatcatatcttgatgagattgatcatgtccgcctttaattaccacgttctttacacctagctcgtgcatctgttttgccgcttcttttcgatcttcaatcgtgtgaatttctttacccgtgatgacttccgcttccggtatgttcggcgtaatgacttcacaaagaggcaataattcttttagagcctgtacggcttctctttgaagaagagactggccgccttttgcaatcataacgggatcaactacaacattttgcagtccgtactgtttgattttacgagccactgcgtaaataatatcagcactgaacaacatacctgtcttcactgcattaggaaataagtcagtggcaattgaatctaactgcgtttcaactgcttctaatgctaaaggataaactccttgaacgccaactgtattttgtgcagtcacagctgtaataacagacatgccaaaaacgtcacgctcttgaaatgtttttaaatctgcttgaatgcctgctcctccaccgctgtctgatccagcaatggttaatacttttggtactgtcatgcttgaaacctccatctctttcttacccaatataccgatgataaagtgactttgcttctactatatcgtttgttccatggacaaagacgcgcccatcttgaaacataactaaacggtaatcatctacataaaaagaaagcagatacggattttgttcaattttatatcctttttcttttaatcgttcacctaaagactgcagcggctgcttggctgatttgcccggacggatttgtaccgtgtttcttccgcatagcacagctgttttcgtttgattttcatattgtaaaaagggatacgtttgttcactgccgcatgagcggcaagcagatttgcgaaacacgttcacattgatgctcgtatactcatttttccatacgtcaaacgaaacaagttccctcctgagcgcattccagtctccgactaatatttttaacacttctgttacttgatgagcgactaccatttgtacagcaggactaataatccccactgtatcacatgttaaccctccaagcggtacagattcaagcaaacaggataaacacggtgtgtcactcggtatgatagtataactaattccataacttcctacacatgctccgtaaatccaaggaatatcatatttttgtgataaatcattcattacaaggcgtgtgtcaaaattatcggttgcatcaattataacatctaccccctcaacaagctgttctaaaacttgaggggtaccgtctgctacgtacgcttctacttttacatcatgattaatatcgtgaagccgttttttagcggcaattgcctttggaattcttttatcagcatctttttcactatacaattgctgccgctgaaggttgctccactctacatagtcccggtcaatgagcgttattttctttacccccgctcgtgcaagggcctcggcgttccctgttccaagagcacctgctcctacaatcagaacatgcttttcttgaatttgctgctgtccaccttttccaataggttgaaacaattcttggcgggaataacgattaatcaaccgatactcatcccttctgttggactgcttgccgttgcatattgtttcttttcaatacgtcctgcttcaaatgctgctcgtcctgcttcaatcgctagcttcatagcacgagccattttcacaggatcttttgctcctgaaacagctgtatttaataacacaccatctgctcctagctccatggcttgagctgcgtctgaagccgttccaatacctgcatctacaattactggaacagttgattgttcaatgataaaacgcatgttcaacggattaataataccttgacctgaaccgataggcgaagctcctggcataatggcatgtacccctaactcctctaaacgacgcgcaagtaaaacatcatctgatgtgtaaggtaaaacggtaaagccctcttttaacagttcttcactggcttttaatgtttcaactggatcaggaagcagcgttttatcacatccaattacttctactttcaccatgtcacaaagtccagaagcctttgctaatttagcaatacgtacggcctcttctgcattttttgctccagcagtgttaggcaaaagagtgaaacgcttcacatcaagcgcttctaataaattaggctgattttgatcaaaaatatccattcgtctcacagcaaatgttaaaatttctgtttctgactcttctaccgcttgacgctgagtcgtaaagtccggaaatttccctgttcctaataataaacgtgaattaaatgtatattgtccaatttttaacatactcttcatcctcctccgacaaatgaaacaacttctaatatatcgccatcttttaagcatgcatcgctatgttcttctttttgcaaaatgttcttgtttagctcaacaattaccactcgttcatgcaggttctgagcctgcaacaagtgctcgaccgtttcaatttcatctccaaaagtaacggtcttaccattaatgattagattcaatgaactccctccattactctcgttagctgaaatgatgtgaaaaatgaatgattcggctttttccctaacaaagcatcagccataatttttccagttgcagcacttaataaaataccgtttcggtagtggccaaacgccatgtgtagattcgctatttcaggatgctctcctaaataaggccagccatcatttgtttgtggacgaagacctgcccatgctttttcaaatgtggcttctttaatagctggcagaagcgcagaagctttattcagcaaaaattgaataccctgtgcagaaaccgtcttggtaaaatcatgctgtagcttagttgcccctattacgattcttccaccagtcttaggcactaagtaaaaaccttcatctaaaaaaatcgttttagaaagcagcggcttatggctttgaagagcaatacactccccttttacaggaaacacctgacctaaatgttcagaagaaataaatcgtttagcccatgagcctgctgcaataactactttttctccataaaaagagtctttggacgtctgtacaccttttactgtttcattttccataataagagaatgaacgtcacagtattcgaatacatctgctccgtgatacaaggctccatgagcaagagcttgcgttaacttagccggagctagctggccgtctcccggtattgtaatggctccgtatatgtctggagagagccccggttctaacaaacgcgcttcttttacatcgatccatcttacatgttcatcccaccggtggtgctgggcggcttttttctttaatacgtgtgcatcttcttctgttacagcgacttttaataagcctttttgaatgagctctacgtcgatagccgttttttcttttagttccttcaccagttcaggaaacatgcttctactcttaatagcaaggtctaaaagaggaccttcttcatcaatttcagcttgagcacctaaaataccagcggctgcacttgaagcttcacaaccaatttgattgcgctcaagaatagctactgaagctccttgttttgacaaatgataagcgatagaagagctgattatacctcctccgattaacagtacatcataatgctgcttcattttctccacctccagatgtccatatatgagaatattgtttaatcgctttgaggggatcttgcgcaagcatgacaccagacatcacagctataccgtgtgctcctgtttgaagcacctctttggcatttacaggtgtaattcctccaatggcaataaccggtatctgcacagcgtctactacttcttttagtgctgctatccctcgactttttaatcctttttttgaatgtgttgaataaatatgtccgtataaaatgtagtgagccccatctttttcagcttctaaagcctcttccacagagtgaactgactttccgacaataagagaaggaaatgcgtctataacaaacgaaacgtctaaactatgataggcaagctgtacgccttttgcttttaaagcatgcgctacatcaactcggtcatttacaataattttagagcgacaaaatggcaggctttctagtaaacattgaatctgctttgccgttttctctttttctctaatatgaacggcgtccgcaaaaggcgcgatagccgttaaaattttttgaagctcttcgattggctgcttatctgttgtaatgacatgaaatttaggaatatccacatgatcgaaacctttctattcagaataaagagaaatttcaatcacctcatcttgtgtagagggctttattacatacaaaaaaccactctacaacgtagagtggttagcatgcatcgttatgtaaacatgatcgccacttccctacgctggtccaaaccagatcaggttcaaagggtccgaaatacattcgtctcagcttcaaaaagctcccctagtgattgctatttattgattttgttttcgcacttaaaattataacacaactagatgtaaatacaatatctctttatgctcttacggctctcttccttttataggtgtatcttttaagcttctttactaagtaagaggcccggcgcaccgcatcattctgctttttatatggttagtaatcggtatagtcgtcaaattcttctttgtctttttcctttttccgatcccatataaacagcaggagtaacataataaaagttagaatataaaaaccgtaaaaaataaatgccgctacaacatttataaataaaaataaaaaaccgatgatctgacctgcaatagctacaatcaacaaaatgtatttccaaacttctgcttttctatccattctctacttctccgtctttttgtttttccctactcgaaacgttttctttacttaaataaaaacgttcctgccagtaaaccgactgtaaacaaaccaactgttccaaatgctgaaatccccacgtaagccaacatttttcgataagatttttctcgaattaactgtaccgtttccacactaaacgttgaaaaagtggtaaaggcaccaaaaaacccaatgccaatcattaaaaatattgaatcatcataagcatgactcggaacctttccataataactaccgtaaaaaagaccaagcccaaacgcaccgagcaagtttacaaacagcattgatactggaaaaggaggatttgaaactgtttttgtaacttttaaacccaaaagataacggcatattcctccagctgccccgccaagtgccaagctcactatgctcatttacttcacctcatgtactttcactaaattttcccctgccgcttcaccgcatagatagcctgctaaagcaagaaggatcccacctactaaagagacaatgacataaatagctccccaaaataaatggtgctgagtgagagaaatgacgtctcctgcaaacgttgaatacgttgtaaaaccgccgcaaacgccaactcctagtccaagctttatccattcttttggctttttccacacaaaaaatcctgctaataggcctagtatgaagcttcctaataggttttcaattaccgttcctattggatagcccgtatataataaggaaagattcagcaaataacgtgcatatgtaccagcgatagcaccaaaggcaattgatattaagtttatggctttcatcatatcgctccgtttcataaattcttctttaagtgtaccataaggaatttatttctaccttaacatttaactatatgtttattgcaccaaaagtcatgaaaaaatgaaagagaaaatcgtcgcatgaaacttcctttttactcctcaaatcccccttaaaaatccatttaatccaaattttaaaatctctctgtatccttatgacaaaccgtgtatagaaggtatatttcccttattttaagtcacattaatcgtataagttttttttgttgacttttgctgtgttcttgtttagtatcacagagtatcatttcctatcagaatactagggggtttagaaaatgaagaaatttactgcacttttgtcgctactattagctttcacagttgtgcttgccgcatgcggttctagctcaaaaaatgaagcaaacaatggagacaataaatcttcacaagaggatttatataataaagtgaaaaaagatggtgtattaacaattggaactgaaggtacataccctccgttcacttttcatgatgacaaacaaaagctaactgggtttgatgtagaattggctcaagaagtagctaaacgtcttggcgtaaaagctgagttcaaagaaacacagtgggatggcatgtttgccggattagatgctaaacgctttgacatgattgctaatgaagtgggtattcgtgaagatcgtcaaaagaaatacgatttctctgacccgtacatccagtcaggcgccgtattaattgttcgtaaagacgaaaaagatatcaaatcatttaaagatttaaaaggaaaaaaatcagcgcagtcattaacaagtaactataaagacatggctcaatcttatggtgcaaacattacgagtgctgaaggttttgctcaagcagtagaactaatgagcgcaaaccgtgttgatgctacaatcaacgataaattatcgttccttgactataagaaaaagcaccctaacgcacctatcaaaatcgcggatcaaaagtccgatggtgctgcaagcggctttatgtttagaaaagacagcggtaagttagtggatgaagtaaacaaagcattaaaagatatgaaaaaagacggaacatacgcaaaaatttctaagaaatggtttggcgaagatgtttctcctaaataatatttttcctgatggagagcgattgaatcaattgatttcaatcgctcaatcatctctcttaccaatgctaaagggagctattcaatattctattccactaacattaatcacgtttgtactcggtatcattttagctgtcttaacagccttggctcgtttatcatctataaagattttaaatataattgcgcgcatctatgtatcaattattcgaggtacaccgctgcttgtgcaattatttattattttctacggcttacccaatttagatataacaattgacccatttatctctgctgttattgggttttcattaagtgtaggtgcgtatgcatctgaaattatccgagcagcgattcaatctattcctaaaggacagtgggaagctggctactcacttggtatgacctattcccaagcgttaagacggattattttaccgcaagcagcacgtgtatcgattccgccattatctaactcttttattagccttattaaagatacatcacttgcatcgcttattcttgtttctgagatgttccgtaaagctcaagaaattgcttcgactaactatgaatttctacttctttatagtgaagcagcgctcttatactggattatgtgtacaatcttatccattatccaaggacgcattgaaataagactagatcgttacgtatctaaataaccgtttcgagtagctaaaggagttttttatatgattaacatcaaaaatttgcataaatcattcggtgatttgcaagtattaaaagggattgatttagaagttgaacagggcaaggtaattgtattaattggtccttctggatccggtaaaactacttttttacgttgcttaaatcttttagaaatcccaacacacggcacgattgaacttgataaaaaaagcatgaatttcaccaagcctgttcgtaaaaaagacattacttcatttcgaagcctaacaggtatggtctttcaaaactataacttgtttcctcataaaagtgcgcttgaaaatgttatggaaggtcctgtaattgtaaaaggtgtttctactcaagaagcagaaaaaagagggaaagaattattaacacgagttggcttaggagataagcttgacttttatcctttccagctgtctggcggacaacaacagcgtgttggcatcgccagagcaatggcgatggacccaaaagttatgctgtttgatgagcctacttcagctctagatcctgagcttgtaggagacgttcttcaagcgatgaaagacttggcaaaagaagggatgacgatggtggtggtaactcacgaaatgcgctttgcccgtgaagtagcagatgaagttatttttatggatcaaggtgtcattatggaaagaggtacaccggatcaaatattttcaaatcctcaacaagagcggacacgtcaattcttgaatatgattcattaaaaaggttgcacactttcatgtgcaacctttttctttatttggctactgcttttttcattaaatctgtaatgtacgtaaagaatgcttcagctgtgacatcatatacgacgtctacaggtcgtccctcttcagaaatttctgttcttccttggctcggtgtttctgtatgcacaatactcgaaacggtttttaccttcacaagtgttgaattccctgtaaatgctgttgtgagtacatcccacaagtaatatgttgaattggtttcaacgtgcacaagcggcgggcaggccgcgtagcactgccctacaaagtctactccttcatatcttcgaagtgaagcccacatttgacgaatagcgggcgttaaaggaacttgattcgtgctttctaaagcaaccatctcaattttaattttgctttcccatactttcgctactgcttctggatcccaaaaagcattccactccgccgttccatcgtgttcgggctcttgcacgtttcctacctcttgaaatgtaccgcccatccatactaacttgtcaattttctcttctatttccggcgctttttcaagtgctcttgctaaatcagttaacggtcctgtaaataataaagtcgttgttccgtctgtgtgctgcaatgtttcaattaaatgatcatgagcaggcagctgacttatttctgtttgtacttcccctttttcatttaaaatcggcagcgcatccacataaaacgtatgcatgcgccactcttttggaaatggattcataccgcgtgaagtagatttagctacctcgatatcataacttccaaaacgatcaataatcttttggcttgcgctgatacctggctctagatatccgtcagcgggaatgacagatactcccgttacttttacatcatccatttgcagcagtaaaaaaagcgatactaaatcatcgatgcctgcatcatggttaaaatatacatttgtgctcatttctcttctcctctttcctatgtattgctacgtaatagctataccgctattttataatgaaatgatctctttcgtaatcaaagtattatgaacttcttttactattttctataatgggtatagaagtaaggtaatctatgtatagatgtatacatctcagtatagaaaggagaaataaaatggaacaatcgttctcagcattagtagtagataaaaaaagtgaagaccaagtggaggcgtccgtccaagaactgacgctaaacgatttgccagaaggcgatgtccttattcgcgttcattattcaggggtgaattataaagatagcttagcaagcatcgcaaacggcaatattgtgacaagctatccatttgtcccaggaatcgacctagcaggagttgttgtatcttctgacagccctgattttaaagaaggagatcgtgtcatcgcaacaagctatggcattggcgtatcacactttggaggctatagtgagtatgcgcgcatacgcagcgaatggatcgtccctcttcctgaaaatttaacgttaaaagaagcaatgattatcggaacagctggctttacagctgctttatctgtgcatcgcttagaggaaaaccatactagtccatctaatggctctgtgcttgtaacaggcgctacgggaggtgtaggaagctttgcggttgccattctttcaaaattaggctacaaagtagaagcaagtacgggaaaaagctcggaagcagcttatttgaaagagcttggcgcttcctctattgtagcccgtgaagatgtttataacggcaaattaaaagcattaggcaagcaaaaatgggccgctgcggtggatcctgtgggcggagagcctctagcttctgttctcagtcaaattcagtacggaggctctgtagctgtcagcgggctaacagctggaggcaaagtgccaacaaccgtctttcccttcattttaagaggaattaatttattaggtatcgattctgtttactgtccaatgcctactcgaaaagagatttggaatagactcgctaatgactttaagcctgaaagcttcgaacctttcattcagcaggaaatttcaatacaacagctccctgaggtacttccgactttattaaaaggacaagctcgaggacgaacaattgtgaagctataaaaaaacggagaaacctaggtttctccgtttttttacgaacagaagcatgttattatgcatctatttttactattaaatccgtcactaattctttcatggtcacatcggctaagacttgttccatggcatcttgagaacgttttaaaatcaattcaaggacactttgaatattggctcctacaggacactccacattcggattttcatgcatttgaaacaattctccttcttccactgccgccaccgctcggtaaacgtctaacaacgttatctcttctaaatctttcaatagataagctccgccagctccggcttttacacccacgagtccagctttctttaacatcccaattactcgtcttataacaacaggatttgtatttacactgctagcaatccattctgaagtactaggatgactgctatctactttaattaaagacagtatgtgaacggccacggtgaatcgactgctaattttcattgctctcactcctattttgttgtaatcattatagttacaacatttttgaaagtcaagcatgcttttttaggaaagaatgtcctcttctaccgcctcataaaagcgcagcgttttcttgatttccatagcttcagaacatgctttcgttttctttttattcgcttctttatgttcgttcacatgttcttctcttgagatccacgcttgaaagaactgcttgtcttcccacttggatacaaagacatattcaactttatctgcggaatcttttttccagcattcgaacgataaatttcctttggctgcctcaatttctattttgtttttcttagctttttgcttgagctgttcttcaaatttcttttctgtttcaaaacttgcgtttacaacaaacatcttatcttcctctctaaatgaaagtaattctcattcaattattgcatagtaattttattttttcaatttatatggataagttacagaagcccaaaaagaccgctgtttaagcggtcttcttttttacaaatgttttctatgcactgtttttccatcatacgtaaaggcgattggcttgccttccattaccgtttctaaatgaatggggcggccccaaagctgatgaacgtacggtaccactttttctaagtatttgacatctaattcaattccttcataccagtgttttaaatagagctctccattttttaaatagtctccattggttactgtgatgtaaggaaatccgccgtttacgcgcatattaacaagctgatctctaacttctgtccactctttatcgacgattttatagtcttttccttgtttttggaataagtacatatcctcccgcatgactaaatcttttgttaagtaattgcggataaaggaaatatctgattcaacctcacgtacctcaaacagcttctctcttcctgatccgcgctccacgccccggcgaatcatatcttctgttggattattgtagcgctcttcaatgtcttcaaagatttttaatcctaaataatatggattgattcccgtcttagacggctgcacaacccctgcatttagcttggcgaattctatcgcttcatcactcgttaagtccatttctcgaataatgcgctgatgccagaaagaagcccagccttcattcataatttttgtttcaagctgcggccagaaataaagcatttcttctcgcatcatcgttaaaatatcccgctgccaatcctctaaataaggactgtattcttcgataaataataagatgtctttttcaggctgaggcggaaattttttaaaagactttggaggttttggttttttcttttctttataatccaaattccataaatcatcgtaaggagaaatgatttcttcttccgatgattctacatcatctatgctccaagaaagcttggcacgcataagggacggatcaatatgttcctgaatcgataggacagcatccaaaaacttttctacttcacgcttaccgtgctttacttcgtattctttaattcgatcagcggtcgctgccatactttctaccatatcccgtttagtgttggcaaaacggctgttatttttaaagaagtcacagtgggctaacacgtgagctacaattaatttattctgaataagcgcattggaatccaataaaaatgcataacaaggatctgaattgataactaattcataaattttactcaatccaagatcgtagtgtaatttcattttgtaaaattgttttccaaagctccaatgtgaaaaacgagttggcatcccatatgcaccaaacgtataaataatatctgccgggcaaatttcatagcgcatcggataaaaatctaagccgaaaccgctagctatttccgtaatttcatcaatcgcacggtataattgcttataatctgcttctttcacgacagctccccctttcactccttacttcaatctatgtacaaacatgtcaattcatgtgttttcatcaaaaagaagctttattttttcaagaaaaggggatttttatttagttgtcttaaataatggatgtaatataactgttatgctgcatcattctttgcctttcttatcatttatccggtgctgtacgtttattcttcttgcataatgactacaacctcttttaattatgcactggtcttttgcccaacatttacagcgtaagaattcccgcaaatatcatacactaatttcaactcctcaaaaggaggaacgttattaatggatataattgattatgatcgagctttatattacacacaccgttcacaatgggataacttattaattttaatggttcgaacagacgacgattttctttcaaaaaagattgaacattttttgcacgcctacaattttgaacgaaactaccgcatcattcaagaagagctttattctttactacgctacattgatcatgcaacggaatattcggagcacaacccggagcttctggaagaatcattgtactagtatttttgatacacacacttggacaaagaagggatgaattcccttctttatttttttatgttgcactaaaaatatgcatactttatttcaaaaaacatcaaataatatatgtaaacatatttatttttatcgttgacataaaagtgaattcgacgtacaatcttcagtacatacgctaagatatttcagtacatactgggaggaacatatatgagtactaataaaaggtttcgcacattagatttaacgctagccggtatgtttgcggctcttatggctattggtgcaaacattacttcttgggcaccttttttacaagtaggcggcgtgcctctttcacttcagcctttttttgttatattagcaggacttttacttgggagccgaatgggttctatttcgatgattgtatacgtattaattggcattgccggcgccccggtatttgctcaatttaaagcaggaattggtattttatttggaagcaccggcggctttttgctttcttatatcgtagcagcatttatcacaggaaaaattatggaaatgcgcggcaagccaactttttctatctttttaatttcgtcgctagttggtattgcctttatttatttaattggtactacgtatatgtatgtagcggttaattactggcttgaagctcctgcaatgacatatgcagccgcttggaagattatgtcgtggtttgcggtaaaggatcttatttttactgttcttggggctatgcttgctccgagaatttataaagctctacgatcttcttcgtatttgtcaaatacgcaatcaaataaagtatcataaaagaagcctgctcaagtttgagcaggctttacttttataccgttttcactttatctaatacacgttctacttcacccattacagctgtttgtacagcttctaaatgggcaatgctcgttgcttcatcttctgacacgacgccaaaatagaacttcacctttggctctgtaccagacggacgaaggcagaaccaagaaccgtcttctaagatatattttaatacatttgattttggtaatgtaatttcttctacttttcctgctttaatatgctgacgctcacttaatgtataatcctctacaactgaaacatttaatcctgcaatgtcagtaggaggttcatttctaaatgtagccaaaatatgctgaatttgctcagatccttcttttcctttaagcgttaaagatttcagaccttcacgatagaaaccatatttagtaaacacttgctgaagcgcttcatatagcgtcatgccctgctttttataataagcacaagcttctactgctagaatggctgcttgtacagcgtctttgtcacgagcaaagtcaccaattaaatagccgtagctttcttcataaccgaattggaatgtatactcgcccgtttgctcatattgcttaattttttcaccgataaatttaaaacctgttagagtgtcaacaacttgcagtccaaatgaacgagcaatttgtgcaccgatttctgacgttacaatcgtttttaacacaatgccattagcaggcagcacgcctttttctttcttttgagaaagcaaatagtgaagcaataaagcacccgtttggtttcctgttaataacgcatattcgccgcttggatcttttacagcaattcccaaacggtctgcatctggatccgttgcgattaagatatctgcatcaatttcttttcctttacgaacagcatattcaaatgcagccggttcttcaggattcggagatttaaccgtcgagaaatttggatcaggaagttcttgttcttcaataaccgtgacattttcgtaaccgatggattgaagcgcgttgcgaactggcttattagctgtaccatgtagaggtgtaaaaaccacttttaagtctttacctgtttcagaagctagctctggattaattaaaatcgtttttagtttctcattgtatgcttcgtcaatcgctgaaccaatcatttcaataagacctttttcttttagctccgcttcagattgaacagctaatgtaagttcattttccacagcatttacaaagccaactagttcatcagcttcttttggcggcagctgaccaccgtctggaccatatactttgtatccattatattcaggaggattgtggctcgctgtaataacaatacctccgcatgcatttaactcacgcactgcaaatgaaagttcaggtgttggtcttagctcttcaaatacatacgttttaattccgtgacttgctaatgtttttgctgcttccattgcaaattcaggggatttgtggcgagaatcatacgcaatgactactccttggttaatagcttcttcgccagcttgtttaatgtactcagcaaagccttcggaagcttttctgattgtatacgtattcatacggtttgtacccgctccaatttccccacgcattccgcctgttccaaattccaatgttttgtaaaaactatcttctaattgtttttcatcacctttgattgcgtctaaattttgacgtaattcaggatctaaatttggttgattaatccaagatgtatatgtttctttccaactcataaaaaaaagcccccttatatagatgtaaatatgtatgaaaagagaaaaacgagtaatcgtctttctctttttttaacagtcatattatatttcttcgtcaaaatttgacttcctgctattatcttatggctgtattgacaaattttgaggtacttttttattttatcatgaaatacctgtcatacggttaactttttcatctactggtacaactgcgtcatgaaggtgctgttctaattcatccgtataagcttttgtttgctcaggcgtccattttaactcttcggccatatgagcaatcacttgttttttccagcttcttacccagttgatatcaaagaataaagcgcccgtacgtcgaatgaagaagtccactggttttgaaaccatttcttcttctatgccatattgaatttgcaaaaatacactagctggaaggtcgctgttttttagctgatccggacgttcaatcatgtagcggtatactttatctacgtttgagccgtagcgtttcacaagcttttcagcagcgtcacgtgataaccctagtttgatgccttctttgactttttgctctacaaacgttgggaacccacctgaaccgcctacattacctccagaaatcggtaaatgtttagtttgacagctttcaaattcgcgtccttctgctttaaaatcttcagctacgcgatttacgacaatttcagccattttacggtacccagttaatttccctccagcgattgtaattaaacctgattctgatgtccagatttcatctttacgcgagatttcagaaggatcttttccttgttcgtgaataagtggacgaacacccgcccagcttgattctacgtcgtctactgtaatatcaaccgttgggaacatatagttaatcgcatcaataacatattgacggtcttttacagtcatacgcggatgtctagcgtcttctttatagaccgtgtctgttgtgcctacgtatgtttttccatcacgcggaattgcaaataccatacgtccatcaggtgtatcaaaataaatggcttgttttaacggaaagcgctcttgatcaataactaagtgaattccttttgttaattgaagctgcttgcctttttttgaattatctttttcacgcagcgtgtccacccatggacctgcagcgttaacgatttttttcgcatagatattatattctttattcgtaagctgatcgcgaacaacagcccctactacttttcctttatcgtagatgaagttttccacttttgtgtaattgactaagtctgctcctcttgcggcagcttccttagctacttcaatcgttaaacgtgcatcatctgttttatattcaacgtagtaaccgccgccttttaaatctttagatttcaccaatggctcgcggctaagcgtttcttctgcgctaaacatcttgcggcgctctgagcgttttacaccagctaaaaaatcatatacgcgcagtccaattgaagttgagaatttaccgaatgttccccccgtatggaaaggtaacagcatccactccggagtcgttacatgagggccattttcatatacgatggcacgttctttaccaacttcggctaccattttaacttcaaactgttttaaatagcgtagaccgccgtgaacaagcttcgttgaacgactagatgttcctgctgcgaaatcctgcatttcaactaatgccgttttcatgcctcgatgagtcgcatcaagcgcaatacctgacccagtaatccccccaccaattactagtaaatcatattgattttgtgtcatgtctaccaatttattcgaacgtgtttgacttgaaaacatacgtcattctcctttcaatttttaaagatatcaaaattttccaatatacaaaaaagagagaccacaaatcacatatatagtatgtctacatatggatctgtggtctctccgattctccaaccaatttattaacttgattaaattatatcatacatgcgcttttaattaaagtgttttcatcaaataattacttaaaagccattgttgcatgtacggcttttttccagccgctatataattcttcacgcttttcttcttccatatttggttcgaaagatttttccatattccactgcttcgcaatttcatcgcaatctttccagtagccgaccgcaagacccgctaaatatgctgccccaagagccgttgtttcattcacttgaggacgttcaaccggaacgtttaacatatcactttggaactgcattaagaaattattcttaactgctcccccatctacacgcaatgtttttaatgtaattccagaatctgcttccatcgcacttaatacatctcttgtttgataagctagtgattcaagcgttgcacggataaagtgttctttttttgtaccgcgagtcaatccaaacatcgctccccgtacatcgctatcccaataaggtgttccaagtcctacgaaagctggcacaatatatacgccgtctgtagactctactcgcgttgcatagttttcagtttcagccgcatttttaaacattcttaaaccgtcgcgaagccactgaatagcagatcctgctacaaaaatactcccttcaagcgcatattctactttgccgttaatcccccatgctaatgtagttaacaagccgtgatcggacttaactgctttttcacccgtattcatgagcataaagcagcctgttccataggtgtttttcgccattcctttttcatagcaagcttgtccaaataaagcggcttgctgatcccctgctgctccagcaattggaatgtttttaccaaaaaaatgatagtctactgtatgagcgtatacttcagaagaaggcttcacttctggaagcattgatttcggtacccctaagatatctagcagttcatcatcccattttaaatcgtagatattgaacataagcgtgcgggatgcgtttgagtaatccgttacatgcgcctttccgcctgatagcttccaaattaaccatgtatcaattgttccgaataacaattcaccgttttctgctttttcacgtgcaccttctacgttatctaaaatccacttcacttttgttccagagaagtatgcatcaattaataatcccgttttgtcgcggaacgtatcgtttaatccttttgcttttaattcttcacaaataccagacgtttgtcgagactgccatacaattgcattgtacaccggcttccctgttgctttttcccatactactgctgtttcacgctgattggtaatcccaattccttcgatttgatctgcatgaacacctgactcagataaacaagatgcgataactgctaagatagaaccccaaatttcactggcattatgctctacccagcctggttttggaaagtactgtgtaaactctttttgagctacatgtacaacttcaccttttttattaaataacattgctcgtgagcttgttgttccttggtctaaagataaaataaatttttccatatcaatatcccctattctctgtatagtgtcgtttctttattgtacatagttagatggtaaagggcattcattttttcggtactactgctgattgaatctgtgctgccttttgtttggaaacagcgtagataactgctaaaacaatcagcgctagacttaaaacaacccataagctgcttgacattttatttaaaaatgccgcttggtaaaatactgccccgattgatccgcctactaaaggacccactactggcacccaagcatatttccagttcgagctgcctttgccaggtatcggcaagatagcatgagcaatacgaggtcctaaatcacgagcagggttgatggcatagcctgttgttcctcctaatgataaaccaatacttacgattaaaaatcctactactaaaggatttaatccatctgtaaatttatttgctccaattgctaagattcctacgactaatacaaacgttccaattgcctcacttaaaacgtttgcaaatggattagcaattgctggccccgttgcgaatacgcctaattttgtaccagcatcttttgtttctttccagtgtggaagatagtgtaaataaacaactgttgcaccaagaatggctccaataaactgagctaagatgtacatcggtacttgtgaccatggaaaatcacctgtaatagcaagcgctacggttaacgctggatttaaatgtgccccactcatattaccaaccgcatatgctgccatcgctactgccattccccatcccattgtgataacgatccatcctgaattagcagcaaacgatttttttaaattgacgcccgcacatacaccagcgccaaggataattaaaatcattgttccaattatttctcctaagaatgcttgcatataaataacctcccctttgtatgaaaacgattaaaatgaaaataagaaaatccacaatacatccccctaataaaatcattaaaaggctatactgtggatctcctattctccctcacatctattaacttatctagaagtttactagatgatgaaagcgttgtcaaacagtttttttaagttgaaatactccacagttctctatttgatgttgtaacagcagaagccccggctcctaaagcgttacgaacttctttttcggttcgtattaaacctccagctaacactggaatgcctgtttcagctttgacttcttggattaaagtgggcacaattccaggaagaagctcaatataatcgggttttactttcttcattaactcgtagcttttcttcaaagccgtgctatctaataaaaagacccgttgaatggcataaatccctctttgtttagcttttaaaatgacgtttgttcttgtcgaaataatccccgcaggcttaaactcctgacacaaaaaatcaaccgcatactcatcgtgctttaagccatgaattaaatctaaatgaatgattagcttcttttcatgcttatgaacctctttcataattccttttagcatgcccacttgattgtctaaaagaactccgtactcataattacttactaaaaatttttccaattgcttcatatctcgaacagcgggtaataccgattgtccatgaaaactcatgttttcccctcttttccatggttagtccacaaaattcattgtaatagcttttattatggcaaaagttgaaataaaaaacaccatgcatttgcatgatgtttttagaaactacgttattttttatatttaatattgtaaacgtcgtggcgtcggtcttttaattgacgaaccgttcctgattgacgctggcggcgaagaatttctaaatctacgtctccaataactaccatttcaatattaggattacattctcctacaatgccgtctcgtgcaaattcaaagtcagaaggtgcaaaaatagcagactgagcgtactgaatgtccatgttttctgtttcaggcaggtttccaactgtacctgcgataaccgtataaatttggttttcgattgcgcgcgcctgagagcagtatcttacgcgcagatagccttgacggtcttccgtgcagaatggtgtaaaaataatatttgcacctttatcggtagcaatacgagcaagctctggaaattcgatgtcatagcaaatttggatcgcaattttaccgcaatctgtatcaaacacttcaactttgtctcctgggctaattccccaccattttctttcattaggtgtaatatgcactttgtactgcttttcaattgttccatctcggcggaatagataggcaatattaaaaatatctccattatcttcttcgacgaagtgagatcctccaataatatttacgttatatttaaccgctaagttagtgaatagctcaatgtactcttccgtatattctgctacgcgctgaaccgctttgcttgggatcttttcattcaagaaagacattagctgagttgtgaaaatttccgggaatacgcagaagtcggcttttgcatcataagcaacatctgtataatattctacctgtgtcgcaaactcttcaaatgaattgatctgtttcatcatatactgaacaacacaaatacgcactgggaatgacgttttaaaatggcgttttgaacggcgaacgtaatctacgttgttccattccatcagcgttgcatacttattagaagctagatcatcaggaagataaccagggtttatacgcataagcgtaaatccgttcattagctgaaaagatagcactggatcataaattttatgatgaataacttgctctacatattctctaggcgacatttcaactgaatgcttatggtaattcggaattcttcctccgatgatgatacttttcaggttcaattcacgtgctaaatctttacgcgcttcatataagcggcgtcctattttcatgccgcgatactttggatgaaccattacttcaattccataaagattgtagccttccgggttatgatttgtaatgtatccttcgtctgtaatatcgtcccacgtatgctgatcatcgtactcatcaaagttcacaatcaagcttgaacaagatccgataatttccccgtcgtactctgcacatatttgtccttctggaaaaatggccaggtgactttcaagctgttcttttttccacggatccattcccgggaatgatagcttttgaagtgctaaaatttcatctatatcgtccggtttgatgttacgaataatcatttttttctcaaattttgataaatctattgtagacatacgctaaaacaaccctttctctctcttcattaggcaattagtttccctgttttttattataataaacattattaaaaattcaaaaaatgaggttgagacataacgaagtaaatccaatctaaagacgaacaaatggatgcattagctcgtatgaatagcttgtgacaccgctgttgatttccgtgcaagacttcgctttccacaggagtcttcgccttgccctcccatcaactgctagaaggaacaaaacagatgaaacctacgttcaccataataaaaaaacaaaccacgaatcaaatattttgatcaatggttcgtttttcacttaggctaaaatacttttgtctcagcctcattttctatttgcaaatatctaattttatggatgtttttttattaggataattttcaataaatcctggtcctaaagagactttaatgccatttattttatatacattatatcgttcaccgcgatttaacgtacgaatctttacccattttcctttttcttcttttaacaaaaccatcggtgattgaatcgttacaaaaccaatttggccttttgagagctttttcgttttacaaagattctgggcgactgaagcactgcttactttgtatttgtttttaacagcgattgaatcaaaactttgagaatgaaattgaccaataaccacttttgtaccggtttgaacgcggtcaaacagccagcgtacctcttcatcatacatacgaatgcaccctgaacttgcgtaagtcccgatagaacttggattattatttccatgaatagcatacgtcgttccatatgttccgcgcgcatttaatcctagccagcgatcacctaggggattcctaggatctcctccccgaatgttgtctttataataaggccggtttttaattttattcacaatgctaaaggtaccctctggtgtataactcatctgcctccctgtcgcaactttgaacgtccttactaattttcctccatcataaaaagcaagggtgttagtagatttgttaataataataagttgatttgacgccgcagacgcattgcctgtcaggcccatccccgcgagtaaaaaaacaagcccaacaaaaaaaacagccacctttttcatttatcgactcccccaatttctcttatatctatataagaaaagtataggatgaaaggcaaaccatcagaacactttttaccttataagacaaaatacaataaaatctttcacgcacccctttttactgacaagaagcaataaatgtacataacaaaaaaacggccctttaaagggccgtttcgtttgtatttaaagcttcacttcaacttttgcatttttcttaagttcttcaacttttttctccaatgcttcttgtttcttttgttgttcaagctgctgcttaatttgtggctttacgtcttcaagctttggcatttgagattgttctttaccgccgcttgcttgactttggctttgttttgcaaattgatcgtaataatcttgaatttctttatctgttacttctggtgtttggatgtctttatctacgtactgctgatatttaatgctgtcagccagctcagattttaattgtgattgagttagtcctgcatcttttaaagccgctttaaactgtttatctgttttgaactgctttttcgtttcttttaactttttatttacttcttcatcagttgctttatagcctttgttttcagcttcttgcaatagcagcgtttgacctactaaattgtcaattgtttgctgctttacttgtttagctgcttctttagatgttgggtcttgtcccatttgttggtactgattttgtgatgtagccagggctgcattatattcttcaccagaaacttttttaccgtttacaactgctacggttttcttctcatctactttttgtttatctaatttcttctgcatttcttttgcttgcttttcctgcttttcctgagcctctttttgcttctcagtttgtgcagttttctgatcatcactttttgattgctttgcatcatcgtttgaaccgcatgctgttaaagctgcagcaattaccccaatgagcaatgtatacatcagttttttcatgattaatctcctttcataatcccaaatgattattagctattcgaaaaaatcatctagggggcattgtatatgatataggcgtaaaaagaaactatttaggctaattttaaacatatgtaataagattgaaacgttctgtaatcttatgaaaggtaaacaatttcgtttatacgacctgtctaatcataacattatttaatatgatttacataatttacagaaagttattcatagtacattcttttctttaaagctttctttacattaaagatgacagtattcgatcacataatctcatcgtttttacattgtcacttccactggaaagaagttctttatcacttgtacaacactcaatgaaatgagccatctctccaacaaatccacgaaggtaaagatctcgatatgctcctgacattggagaagcagaaggtgtaaacacacggtcgttttcttttaatgacttccatggtaaatcatcaaaagtttgagattcgtgaatagtcaatgcgtttacttcatcagcaagagcaaagccattgtcaaatgtcactaataagttttcgctttcgcgagaccacgctgtcatgccagtaaaatacaggcttcctaccgtgccattttcaaacttcagcgaaatactatttgaaatatactcaccatgattatttctgaaccctgtcacgtgaacgacttcgccgaacaagtgacggacaagatcaacaatatgtatggcagcaagcttcataaactgctcttcacctttacaaaaaggggtactgtctacagcaaacctcgcttgaaatgaacggacgtttccaaggtttccttcttcaattagctcttttagttttatatagcaaggtgcatagcgcttcataaaacctaccattacttttacgccagcttccctagcagcatctgaaatctcttttgcttctctttcattcatccccaaaggcttgtccacataaacattttttcccgctcgaatgcaatcaagcaccaaagcaggatgatcttcaggctgtgccacaactactactccgtcgcacttttcctgcttcagcattttcttataatcatcgtatggcgtaccgctgctcccaaatcgctgaagagcagcttttgatctttccatactgcgtgtggaaattgctttaatttctgctcccgcttcaataacggacggataaatgttcgttgatgcgtgaaagcctgcaccaataaaacataattttgcttttgtcatgttttcgctcctatttgttttttgtgatgtatttatacaagtttgaccatatcacaagctctttttgaatgtccaattgaaatctgaaatatgccaataaaaagaaagaagttgagacacaactaaatgaatcaaattgaaagacgaacaactagtatacatgagctgcaccgcttatgacaccacagttgatttccgtgcaagactttgctttcggcgggcgggcgctgagcctcctcgtcgcatacgctcctgtgtggtctcatctgttctgcttttcccgcaggagtctccgccttgccctccaatcaactgctagaaagacctaccctcaagaaacctacgtttaccataacaaaaaaacgaaccactaatcaaaaatctcgatcaatggttcgttcttcacttcgtctaaaatgcttttgtcccagcctctttctttaatttatgtatgaattataaaacgattcatacgaatacgtaatcaaattgttttcttttgcaaaacactcaatggaaacaggaaataagaacccgtatttttttaaaattgcaatatttttttcgaattgctcgcagtcgctttcttcaatcggccgatgttgaatcgcttcaatcacggcaattattgtctgcaggctactaatgacttgcaatgcttcatcgagtaagccattatataaatggtctgtacaataatctggatttaataattcatcaggattaagcttatctacagatacataccgaggtaacaagtcatagcgaagctgttcagtcaactcttctatgtaattctccatttctggcggagctgcttgggcaattttcatggttacccccccttttttctcttaacttatgtctctttatttagcataacataaacataaaacgagaacttcaggtagttatttcctcctaattatttacaagttcttttaaaagattaaaggatatttactagtatgtaaggaagggattaaatatgagtatacatggccaatggctagaagataaaatcacaaaaaatgatgcagggcaaacaattgaagattatttaaaaacgaaatggcgtattcctaaaaaaacgttgcatcagtttcggatgaataaaaatgtccttataaacggtgagcctttaccatggagaaacactcttaaggaaaatgatagagtttcacttcctttttttgaagcagagcctaatgaaataacaccttacaatgttgatatagagattttgtttgaagatgagcacgtgctaatcgtaaacaaaccaataaacctagatactcatccttcatcagagcaagaccaaaaaactcttttaaatgctgtagctgcttattttcaaaaaataggcctcaaaacaaagcctagacacgttcaccgtttggacagcgatacatcaggtgctatcttattcacgaagcattttgtagcaagctctgtgtttgatcagctgctggctgaacgtaaaattaatcggacttatattgccctcgtccaaggaatcataaaaaaagaggacggcatcatcaatgaacccattggacgcgatcggcatcacgctacaagaagaagagtatctagaacgggacaagctgccaaaacacgttatcgggtgttaaaacgcaatacggcaaaaaacgaaacgcttattgaactttcgctcgaaaccggacgcactcaccaaattcgtgttcatatgagtcacatcggctatccattacttggtgatactctttatggaggaaagagattaaaagagcagcagcaagctttacatgccattaagctttcttttatacacccgtttacacatcagcgtgtgtcagctgttgcacctccaactcagcaagtctttttgccttacagcaagttgttttcctattaaacataaaagaggggttaggacacaaccagctaagggcaaacaaatagaagaagtgcgctgaaccgcttgagatacctacatgaaacctgcgttgaccatatcaataaaaaaatccgaacgagttgaattctttatcaagaatctcaattcatcgttcggattttcctttaactaaaacacttttgtcctagcctctttttttctattgaattttaaactgacgaatcaagttcgccaattcttcactaatctcttgcagatgttcagctgattgagaaacagtagaaatagctctaatttgttcttctgtagaagcggtaatttcttcagttcccgctgctgattgctgtgcaatagctgctatgctttgaattgccgctaccacgtcttccttatgctcatcgatactgtccatgctgcttgtcacatgttcgacagccgccgccacttgttcaatcgtagttgcaatttcatgaaaagctcgttctgtatctcctaccacaaagtcttgagactttgaaagctcttctgtacggttgcattcttcacgcgcagcagcgacttccccttgaatcgctgcaatcgtatggcgaacttgttcagtggcctgagaggactgttcagcaagttttcgcacttcttcagctactaccgcaaaccctttgccatgttctcctgcacgagctgcttcaatactagcatttaatgcaagtaaatttgtctgatctgaaatactattaattgtgaaaataatagattcaatttttttcatcttatttgttaactcttccattacagcttgaacagcgtgaatcgtttgagacgattcagtagtttggttgcgaaggagctgcatctgttttaaacctttttcattgatgcttacagcttcaatcgtcattttattaatctgtgcattttgttcaatgacttcttcaatttgcgaagataaactcatcgttttatgattagtagagtcagcgtcagaagcttgctgcgtggcaccgctggcaatctcatggatagctcggccgatttcctcactggatgcagttgcttcttcagatacggcactcaagtcttcaacagacgtttttactgtctcaacagacgtctgaaccgtaccaatcaatgttttcattttggctaccatatcattaaataaatgagtaagctcaccaatttcatcttttgacttcgtcttcacctgaaccgttaaatcgccagctgttactttggctacttcatttttcaagcggcgaatcggattagtaatgattcttgagaaaaagatggttaacaccactgataataagatgccaattaacgcaatccagacaataacagtcagtaaatgatgagcgcttgagagcatttcattataaataaaggcatttcctatcttccaattcgtcccttcgagagtatcatatgccatcactctctcttcaccttgaaaggtatacttcatgaaatctctatttcggtctgcttcgtacatttttttcataaatggctgattcattaaatttttcccagcttctgttggatgaacgagcgctgtcccattttgatcaaataaaaatgcatacccaccgtgatttacttctgctttacctacaatgttttttaatgcatctaagtctaaatcagtagctataacgcccagcacatttttagtatctggatctaaaatagcctttgcaattgttacgaccgtcttttttgttgctgcatcttcatatggatccgtataaataacctcattaggtgattctaccgcttgtttgtaccatacccttgaagtcggatcatagtttgaaccaaactcttgtttaggaacagaatacattcctttatttttagtgcctatgtattcaagtgctaggtttggatacttttctttaaactgtgtaaactctttttgaactgcgttccatgtaaaatacggatttttctcttggtttgtttgatctccttcctgcttaacaaaattaacaattacatcattttcactatacgtcagcaaagaacgactatacatgtctaagtacgtatgaatggtttcttttaactctttcacttgactttgagactgaacttctacatctttttctatttgcgttttggtaaattgataaacagcccctgaaacaactaataataaaatagctataaaaatactaaaaaatactacgagctttgcacttaacctcttcattccctcacccttctacaaaaatctttatattactaataacggcttttcattttcatttttgaagaagtttttgtgatttatttcaaattcccgcaaaataaaaccagcgcatcctttcataacgaaagaacatgctggtcttatttttgctttttgtatgcatcaggttcaatatgaacaagcgtatctttaatttgatgctcatcgttcatcatatgttcaatttgatcagcaatttcatggcttttgataacatttaaatggggatctactttaacagttacatcaatcacgacttgattaccaagcttgcgcgctttcacatcttctacttcttttacaccttctacaagctcgatgctttctttgtagtgccctaacttctcttcgtcgaatccgtctgttaaggaatgagccgcttctttaaaaatctcgatggctgttttacaaataataattcccacagcaaaagcagccaccacgtccagccagggcaggccgaactgtgagccaaaaattcccacaacagcccctatactcacaagtgcatcagacaaattatctttagcaaccgcatataaagactggctatcaagttttttagcaagcttaatattatatcggtagacaccccccataacagcagccgctccaagacctacccaagcagccagtaaattaggcgcttcagatttgtccataaataatgactgacccgcatcaaccaatacttctagtccgatgaccatcatgataaaagaggcaataagtgaagagatatgttccgctctggaatgtccatagggatgatcattatcgcgaggttttttagagatttttaagccgactaagacggcaattgatgcaataatatccgtaacattattaagaccgtcggcttttaatgcagaggaagcggtgacacccgcaatgataagtttacatgctgataaaaagatatatgataagatactaacccaagcgcctttttgggcttgctcatagtagttctccatcccttccactcctttattcaaaataagcaaacttagtgtaacaaatggatttcgtgtgggtctatagaaacattattggctgctaacatacaaatagagaatgttaaactctttagctttctgcaaaacaagttgcctttactcaacactttaaacgtttaagatctttctaaatgtggcgcttcatgtagaaggacccttttttaaatcgccccgtaaaattgtttactattttttaaagggtgtgatttttatcacagctgaagctatttattcttgttacactaacattgtgaaaaacatcacaaaataaaattcaaaggatgatacaaatgaaaacacaatttacaccaaaaacacgaaaagttgccgttatcggaactggttttgttggctcaagctacgctttttcaatggtgaatcaaggtattgccaatgaattagtgttaatcgatatgaacaaagaaaaagcagaaggtgaagcacgcgatatcaatcatggaatgccatttgccacaccgatgaaaatctgggctggagattataaagactgtgctgacgctgatttagtagttattacagcgggcgctaatcaagctccaggagaaacacgcttagatctagttgaaaaaaacgttaaaatttttgaatgcattgtaaaagatattatgaacagtggatttgacggcatcattttagtggcaacaaatccagttgatattctcgcacacgttacacaaaaagtatcaggattaccaaacgaacgggtaattggttcaggaacgattcttgacacagctcgtttccgctacttgttaagcgactatttcgaagtagattctcgcaacgtccacgcttatattatgggggaacatggagatacggaatttcctgtttggagccacgcgcaaattggcggtgtgaagctcgagcattttatcaatactgccgctattgaaaaagaaccggatatgcagcatctattcgaacaaacccgcgatgcggcttaccatattattaatcgaaaaggagcgacttattacggaattgcaatggggcttttacgcattaccaaggctattttagatgatgaaaattctattttaacggtatctgctttattagaaggacaatacggtatttctgatgtgtatattggcgtaccagctatcattaataaaaacggcgtgcgtcaaattattgaattgaatttaactcctcacgaacagcagcagctcgagcactctgctagcattcttaagcaaactcgcgacagagcttttgtgtaacatctaaagatttttgcgggggactcccccgctcccttgttttaaatatgtagtagaggtgtatgaatatgacgtggactcaggtatataatccgttagataatatttggctttctgcactaattgcactcatccccattatctttttctttattgctttaactcttttgaaattaaaaggacatattgctgccggtattacggtgcttctttctatgattattgctatttatttttatgatatgcctgcctcaatgatcttaggagccacaggctatgggtttctgtatgcactttggcccatcagctatattattatcggagcggtgttcttatacaagctaactctcaaaagcggacagtttactaccatcagacaatctattatttcaataaccaatgacccgcgcttgcaaatgctgcttgttgctttttcctttaatgcttttttagaaggggcagcgggatttggagctccaattgctattacagcagcgcttctagttggacttgggttcaaaccgttaaaagcagcggcgctatgtttaattgctaatacagcttcaggagcgtttggcgccatggggattcctgtcattgtcgcaggacaagtatctggcatagatccaaaagaaattgctcattttcttggcacacagcttccgattatttcttttcttatcccttttttacttgtctttattatggatgggataaaaggattaaaagacgtatggaaagcaacgagcatcacagccgtttcctatgcactgacacagtatttaactgttacatacatcggccctgaacttccaaatatcacatcttctattgtgagtttgcttgctcttgctttttatattaaacgaacaagcccggcagcagctaaaagcttcagcctgtcaccaaaacagattttaaaggcttggtctccttttattctattaacgatactcgttacggcttggagcatttcttttgtcaaaacgatgcttgaacatatgaacctgcttattaacgtcccatttttacacaatcacgtaattaaagcagcgcctttagtaaaagatcctacgccttacgctgctgtcttaaaaatagacgtatttgcagcaacaggtacagcaattcttattgcttgtatcctttcagttttcttgcttaacgtatcgctaaaagtggcatggaccactcttttagaaaccgtaaaagaattatcaagacctattattactattatgatggtcattgcttttgcttttatttcaaattattcaggacagtcttctacacttggattggcgctcgctacatcagctgcttattttccatttttatctccatttcttggctggattggcgtatttctaacggggtctgtcgtatcaaataatgcgctgttcggcaacttgcagctaactacagctcagcaaattaatgtcttgccaattattctcgtagcggccaatactgccggcggcgtgatggctaaaatgctttctcctcaatcaattgccgtcgctgccggagcagtgggactggctggaaaagaaggtgaactgtttaaatacacgctcaaatacagtatgggatttttgatactaggaggatttgttacctttttattggcttggtggttatgataaaaaagctctaaaaaactgttattaccgtatttctttcatttaaacaaacgtttgattatataaaaaagtccccagttagcgctgggggttttttattctcaaataagtaaacctatgttgccaaattgtttcccttgatctaatcgttcgcaagctgcaactgcctctgacagcggatagaatcgatcaacgattggtttaatttgatgtttctctataaaatctatcatcttcatgaattcttcccgactacccatagacgtaccaagtatattaaattgaggataaaaaatggtccttagaggcaattcaatttcatttccagaacttgctccaaaattaacaattcttccattgggcttcaatatttcaaaataagtgggaaataaagctgcgcccacactatcaagtataatatctatttttctattgttgatttcttcttttagactgcttccactatctaacgcataatccgctccatactttagcgcttgctttcttttctcattacttctagaagtgaccgttacgttagctccgatagcttttgcaaataataagccataggttgcgactccgcttcctataccaggaataagtaaatcttctcctttttttaattgaccttttgtaaatagagctctataagccgttaaagctgataatgaaagaactcctgcctgtttccaagatagataagatggcttttgcaccacattatccgcttttatgattacgcactccgcaaacgttccatttgatggaccacctagaattttaggtgtaaacggaatgtcctctatacgattccactccagacttggattaatgatcacttccattcctttttttaaaccttttacatcttcccccacttcttctataatacctgcaccgtctgaacctggaataaacggcttatctcctttgcttcgattgttcataacgaacaagtctcttcggtttaaacctgctgttcttaaccttatttttatttctcctctttcagggtacatctcttgaagatttctgtcattcatacctgctattccacttttctcactatgtataatggctttcataatttcatttcacctcctcttacctactctactaaaaagcttaaaatcacaaaagaaatatgcccaaaaaaaggaaggacagttttcaccgtttcatctttatttttctgtatagtaaaaggatcccagctattttattacattattgttacaaataatattatttgtaacaataagaacgctagatgaaataaaacgcttaaaaacgccgttatttcaacatttatctacaattacactactatatctattttaaaagctaacaaaaaaccaaaaaaatttaagaaaaaaagacaaaacactttcttttattacagatttattgtaatataaatgtaacaaaagaaatataaaacatataattgttacataaataaagttaattaattaggagtgagttagaaatgaaaaaaattggactagttttatcatcaatcgctattttctttacactaagcactggagttacagcacaaacaacatctacaacactaacggatgcaaatgctgtcaaaattgcagctagtgccagcaatcatttctggagtgctctgcacggttataaaaacaaaccatgtacagaacgtacatttgaatataaaggaactgagtacgtgtatctttgccctgaatttgatacaaaagctgaactatcaagctacttatctgagacatttacaaatagtgcagtagaaaaaggattaacaaattacggctatatcacatataacggcaaacttgcacatccaatcggcgacggattcagcatgttagaatggtcaaaagcaaaaacaaagcttgtgtatcaaacagcaacagttcgctcttatgaattcacagttccaactgtagatggcggcagcgtaaaacgcactgtcacattctataaatctaattctcagtggaaagtaaataaatttgacgctgttcaataataaaaaaagcaggcctgcttgagcagacctgcttttttcttttttatcgataacataaataaaacttctacttacagcgctctaatagctgtaaatagaagttgagatcacaagtttaagtaaatcaaattttgtcgaatcctgtagaaacagtgataagttacgttttatattacaggctaaacttcttattgtcaacataattcagcaaaaaaataggacaatatattcagagcatagtaaagacattaacttggattttgttcatgttcctctggattatcatgtacagggtgcgctcctgggaataatctctgcgctttttcatgaaggtttttgttttcataattaaatgcgctatacgttcgctggccttcttcccacgaagtagatttccccagtttttgattaacaggagagccgaaaggaccgtctggaaattcttcagcggttatatattcgtggcttttttctactgtagagaaatcatcatacgatggttgtttgtgttctttcaatgatttcaccccttctttctagaagattttctactagtatgcgcacttctttgtaaaaaaacctcttaaattagtctaaatcagggtatgataactatacatttattttttaaaggagttgaacagcttggaacctagacctcagaaaggaacttttttccgagaaaaaatcttaaataataaatttgttgtatatacaattattatttttattctcagcatgactattttttcgttatcaaaaatcggatttattttaattcctatctctatttttattaaaacaatcgcactaccgattatcttagcaggaatttgcttttatttatttaatccgcttgttgactttttagaacgaaaaggtgtaaaacgaattatttccattcttgttttatacatagtgattatcggcgcattagccattattatttcatcggttattccgtctctaaaaaatcaagttgaccgccttattgataatatcccagagctgacacatgacgttcagcatgcggtgacgaacctttcgaataaccggtatgtcgaacaaggtcttcaatcggctaacacagacctagataagctttcaaaagatgcatcaaaacacttgagtaaatatgtttctggattttcaagcggtattgtgaactttgtcggcaccatcacagaaattatattatcggttgccgttttaccctttattcttttttacttgttaaaagatgggaagaacttacctaattacattgtaaaactgcttccaaaccgttctcgttctgaagctaaatttattttagccgacatgaaccacgcattaagcgcatatattcgcgggcaaatttttgttgcgatttgtataggtgtactgcttttcattggctatctgattattgggttagattatgcattacttctagcgattatcgccatggtaaccaatgttgtgccttaccttggtcctattatcgccattatcccagcaattattattgcgtttattacctctcctttcatgcttgtaaaactagccattgtctgggcagttgttcaattgcttgaaggtaaagtaatatctccgcaaattatgggaagaagcctagacattcacccgattacagtcatttttgtcattctaaccgccggaaatttattcggaatcatcggtattattttagccgtccctggatatgccgttttaaaagttattattacgcatatttaccaattcatccgtttgaattctactatgtatccagataaaaaagcataataaaaagcccctcgattttcgatgggcttaactttttacttttgttcttcttcatcttcacgatcaaaccaaaggagctcttgatcatcttcatctccattatagttgatgagaatttcttctcctgcttggatatccgtatatgcataaaaatcaaaggtatgattgtcaaaattaatttcatacgtagcattgggtgtatacgagtgattaaacagcataccgtatcccaaaagaatagccgtatgattcactccatattcaaaagcataatccgctagtgttgttttctcaataaaatcatgctctttattaggataagcgataacaggagcttcgtgaataagcgttccttttttaatatcttgcttagcaaatacacctctattaaattctccgtcgcttatcgcagacacttttatttcgatcatattcgtcacctatatattctttcctctaagatttttttcttccttaagcttgacagtttctaatggggaaatcaactgtttttcataaccacttgaatataagctgaaggagcgcttatcatgcacacatgtgtaagcacttaccttgttagaaacatgcaatttgattttattttagacatggaaaagcaatgaccttgcgcatagggcttttttgagccattcaacatgtgaagaatcgtttttctctgtgatataatcgtttatgctgcttttttatgttaatctatcactcttattaccaaatttatctcatgttagaaagaaggttttaaataaacttaaatcatgacaaagatggtgtaacgtatgcagtcctttcttatctgatgtgggggttcacgccaatttattggaagctggttcaccacgtagcaccgggggagattttagctcagcgcgttttttggtcttttatttttatgcttattcttttattgataacaaagaaatgacgtacatacattacgtttgtaaaagaaataatgaaaaaaccatccttattctggtccctttttactgcgtctgtacttattagtgcaaattggggcatttttatgtgggctgtcattgatggaaaaatagtagaagcgagccttggacaatatattaatcccctaacaagtgttttattaggtgttattgtcttaaaagagagattaagcggggctcaaatttttgcatttatactagcagcgattggcgtattaacactcagtcttcattatggtgtggttctccttggatttcgcttagtttagctcttacttttggattatatggtttggcaaagaaaaagattaaagctgattcaacaatcggattaactcttgaaacgatggtcatctcccctatttcattagcatacataggctacctcacgtttcaatcacacttgcagttttttgattctttttcaacaagtcttttattaatcggaagtggaatggtcacagctctaccactcttattattcacaaaaagtgctaaaaaagtatcattatcaatgcttggtattcttcaatatatttcaccaaccttatctctgctagcaggagtaattctataccatgaatcgctaacaaaagctcatgttattgcttttagttttatttggttagctcttattgtttatacgttttcatctattgctaaatgggggaacaaaaaatacacaaaaaataagatgagagcctaacagaagcatacattttcttacgtattatttctaaacaaattgggctgaaaggagcgatatttatgaaacaaatcattgactctcatattcacctcgatcaatatgaaccgaaaagctggaaagacataatagagaaggattcttcgttacaaacgcttatttctgtatcttccacattacagtcttgccaacttaatcaaaaaatcagccaattgtattcctgtgtgaaacccgcctacggatttcatcctgaacaaatgctgccttcttcaaatgaattagcggagctgtttgcctggatcgatcaaaacaatgaagaaatgatagctgttggtgaggtaggtctaccttattacttaagtcagacctatactctttctctagagccctatttggagctgcttgaagcttttattattcattcaaaaaaatggggaaaaccgttaattcttcacgctgtatatgaagacgctgaaattgtatgtgacttactagaaaaacattccgtgtctaaagctcacttccactggttcaaaggagctaaaaaaaccgttgaacgaatgaaaaacaacggttactatatttcagttacacctgatattgtatataagcctaaaatccaagcgcttgccatggaataccctcttgactacttgatggtcgaaacagatggtccgtggccatttgaaggaccttttcaaaaccagacaacggttccatcaatgatacatcagtccgttgaggaaatagcacgtctcaaaggagtttctggaacggaagcatatgattttttatatcaaaatacgtcttgtttttataatctctccacataaaaggcctttccctaaggaaaggccttttatatctaaattcgtttcacaagttttacgattagcacaatcactgcaatgacaagaagaatgtgaatgatgccgccgccaatatgaaaaactaatcctaataaccaaaaaataaataaaagtccaataatcgtccacaacataattttttctcctttttttatatgtagtatttgttataattttatatttccctaaatgtgcataaataaacgtacttcatatacatcttttcactgaggaaggttcacataatgtacaaaaagcactcatgttctctgtggtaaaataagtatgtaatcttatttcatttaaactatagcggagatgattaactatgacgtggattgtattactttccatcattcttgtaagtgcactcaaaatattaataacgtgtcttccaactccagtggtcaaatggcttatgactaaatttcaattacatccaacacttgatgaccaaaacgttactgtcacagttgatgggaaacatttagaaggcaaagacaaaatgcaagtgattgattattttaataaagcaacatttttaaaacaatattatgtccatgaaggaaataaggactattataaacacctagaagacagtgaaactccactggttatcgatacgaaaaaaggaaaaaaagatgttcgattatgcgtatacagttatgatgatcatgtcgatgtcgtaaaacagtataaaaagaaaattattgcttacagcctgctgtctgatcaccttcaaaagcagtccataacagctgacctagcttaaaccagtcgcctataaggcggctttttgagtttttagttttagtttgaagctatcttatttaaaaaacaccaaactttaacattaattcaaatgctataatataaattaatagaattttctaactttttttcgagaggtgatggataatgctttctttgttagggtttggaatgattgcgacttttctatttcttgtcattagtaaacgcttgtccgtggttgttgcttttatttttgtcgctatcctctttggtgtaattggaggttttagtgctgatatgggcgatatgatgatgaatggtattttaaaagtagctcctacggccattatgatcgtttttgctattttatattttggactaatgattgacgtcggtttatttgatcctatgatttctcgtatcctaaacattgtgaaaggcgatcctttaaaagtcgtaatggcaactgccgttattacaatgcttgttggcttggacggagacggctcttctacgtttttaattacagtttccgccttgcttcctttatacacaaaactgggaatgaaccgactaatactggcttgtgttattagtttaagcgcaggtgttatgaatatgattccttggggaggtcctctcgtaagagccgcagcaagtttgcaattagaagtatcagatctatttaaccctctgattccagctatggcagcgggattgatgtggactttattttcagcatatctactcggaaaaagagagaaagcgcgcttaggaaccattcatttaaaaggttcatcaatggcttttgctgaacagctttcagttcatgagacccctgggaagccacctagactcttttggtttaatgccttattaacactgtgcttaatgactctcttggtcgtagacatactccctattcctattttatttgctattgcttttgccattgctttatttgttaattttccttatccaaaagaacagcaggaaagaatcttaagtcatgcaaacagctttgtaatggttagtacgttggtttttgcagccggaatttttacaggcgtttttacagaaacaaaaatgatggatgccatggctaataccattgtcagcctcactcctgaatggctaggctctcaccttcccttagttgtagcaataacgagccttcctcttagctttgtattttcacctgatgcttattactttggcattttacctgttattagccatacagcagctaattttggtgtagaccctgtagaaataggacgagcagctttattgggacattccacaactgggtttcctctatctcctttagtacccgctacttttattctgattgggctggttgaagtagatttcggggagcatcaaaagtttcttttcaagtgggcctttgggacaactattgtcatgacaattacagccattttaacgaatgctatttccctttagactcctactataaaaaaggaagccgactaccataaggcaatcggctcacacatgtaggatattgatttaacactaacaaagtacaacacaacactagtaattatataatatatttcattattttgaaagcgatttcatatatatttttaaaaatgttttgttatttgtttttcatagaaaaaaaccacgtttcagccaattcgaaacgtggtttttttctgtaaggacttgccctacatgctataaatgtaagtaccctcattatagcatgagctcttatttagattccatggtaattactgtataatatcgttacattacgaccggttgtatttttctgtccatgtgcagcgtattccatggctcatcctgttcagcaagcctttcgatgaaaccttgtgaagtccagaatgggatagcccccggtaaaaaaggatgagtatgcagatacagcgtgtcataaaaatgattttgagcaaattgtttcactgcctttaacagctgctgtccaatgcctagacgccggtatgctggatcgacatagcattttacaatctcggctgcagttttatgttcatatcgcttttttaatgcatgaaaccttccatcgtaagcgtataaaccaattgttccaattacttgttgattttccgtgacagctgcaaaaaaagcagcgcctttcgcttgaacataatgttcattaaaatgaagcaaatccacaggcagctgatttttttccagcataggaaatagctcattccgcatattcatgacaaactgaagcacttcagcatccttttcttttacttctttaatttgatacatttgtacttcttgcacgtttactgtcacatccttttatctatcattgtatactttctctttttcctataggaacaacacaatattgactatggcgttacgtctaaatgctgagtcagcatataatactcgcttggatttgttgtccagtttttcactttttgattataagcaacaacaatgtttggatgcacaatcgatgacgtcagcatttccccattaatcaaagcggttgcttgcttagctaactgatctcgctttgcgtcatctacggttgaatttaactgctgaatcatttttgttagcttatcatcattaatccggctggcatttaaaccaccgcccggcaaatagttcgcacttaaataatagcttgcatctcctctaggtgcagtgataagactgtacagtgctaaatcccaatcgtcttttgccattaaatattcatcgctgtcctcaacgagatgaatcttaatagtaattcctaactctttcgcattagactatataagctgagcaatcaaaggaagttctggcaatgaactgtatgtgacaagagagagcgataatggctttccatttttgattgctttgccatttttgatttgatagcctgctttctctaaatattttttagcagatggcatacctctttgctcattagcattattatcagcaaaaggaaattggggtaaaaatggacctcgagccgctgccgcttgattgttcattatgctgctgacaatttcttttcggttcagtaaggtatcgatagcttttcttacattttcgtcttttaatgcgtcattggtttgattataaagtaataaatgagtacgcacactaggtactccacttaccttaaaagacggatctgtttgtaaagtgcccaaactttctaaaggcgggcgataaataatatcggctgttccagattgaagagcagcaactcgcgcattagcatcttcgttaaatgccaaagtcgcgtttttcaatctcacttttccattccaataatcctcatacctttctaatttcacttgatttccttgatcaaaagacaagacgtgaaatggacccgtgccaatgggcttcttagctatatgagaagcattaacgtctataatggctgtgtttgggtgcactaattcagaagggaatttaggcattggttcttttaacgtaattgccagggtgtgaccgtccgctttcatttctttgatttttaaagcgtttctcatcgcatagctttggtctattgctctttgaagagaagacttcacggcatttgcatccagcgcttttccattttgaaacgcgatgttttttcttatcataaatgtccatgtaaggccgttatctttcgtttcccacttttcagcatgccaaggctttatttttaaatcgtcgctgattttgacaaacgtctcccccactcctgcacggactgccgtataatcatcatcggtatgaggatcaagggttgcaggtgtaaaattaaataaaaatgtcacacttttatccgttttctttcttttatacttatgctctcttcattaggagcgcaagcagtgaggcaaagtaacacaagaaatatcatagatacgagttttttattatttatcattgatttttccaccttctattttaatacacaaaaaaagcacctcgaaaaagaagtgcttgtcttcacaacaaattcagataaacgtatcccttgtttatcttatttttgattctgccaaaatacctccctatcctcgtaggttattgtgtgctgcgatttatggcaggtctcctggcttcaaatcattgccttataccgccttcccgtctctaaatagacagtggctttttggcataaagctccttgttacagtggcgggaccgctccggatttgtaccggattcccttttaaggcaattgaaaaacaattgccaccataaaagctggttatttaatttagtagcgtgctctggaaactctagaagtagaagctgatggtgaaacatcttcatcatcaaatccagtggcaataacggttaccatcatttcgtcctttaaatcttcattgatcacagacccaaaaatcatatttaagtcctgatcagaagcagacgtgacaatatctgctgcttcctgtacttcgtaaagactcaagctgctgccgctcgtaatgttcaacagcacgcctcttgctccatcaatcgatgcatctagcagcggactagaaatcgcttttttcgctgcttcaattgcccggtctgatccggaagctcgtccgatacccataagcgcaaatccttgattagacatgattgtttttacatcagcaaagtcaaggttaatcagccccggaacagcgattaaatctgaaataccttgaataccttggcgaagaacattatctgcttcacggaatgcttcaagcataggcgtctttttatcgacaatttcaagcaagcggtcgtttggaatcacaataagggtatctaccgattcattcatcgcagtaataccgcctactgcttgcttcgtacgtttatttccttcaaacttgaacgggcgagtgactactccaattgttaaagcatttagttcacgggcaatttgggcaataaccggagctgctccagtaccggttcctccgcccatgccagctgttacgaataccatatctgcgccttgcagtacttcttgaatttgttctctgctttcttcggctgcttctcttcccacttctggattagctcctgcacctaatcctcgcgttaaggccgcaccaatctgcattttcacatctgctttagataagttaagcgcctgagcatccgtattaacggcgataaattctactccttgtacaccgtgttcaatcatacggttaacggtgttatttcctccaccgccgaccccaattactttaattcgcactagtggcgatacatctgcatcaaatccaaacattctaagttcctcctcaatgatcaaaattactttctcttattatccgaaaaaacacgtgaagaaccttttactcctatgtttaacgcgtaactgttcttttgttttacagattttatacacttctcttttaacctttaaatctttacatctttatgtaaatttattgttgttctaaaattagtacgccgaactcttttatggtttttccactcaaaatggcatataagcttattgtatcattcatttgacagatgtctgtatttaattttgagtaagatgtgactaagagaataatatttttatagacaaaatgagaaaaagcccttagaaataagggcttctctagataataaaccgttttataatttcccagttaagaattgagcttctcccatgccaaagctccagtcagcattaccgttttcaacaatcgaaatcataatgtcgtttggctgaatgccgcagctctctccaagctcttttacaattaatctgtaaagagcttgcttttgctcttctgttcgctgtttactcgttacacttataataaccaaatccttgcttctctcaaagccaagacctgtatcttcaataatcatttcatgagcaggatgctgatgtacaatttgataacggtcgcgctccgggacgccaaaggcttctagcatcgctcggtgagcagcgtctagtaatgtttttaactctttttcatctcttccttctattacatcaaatctaagtaatggcatactaagtaacctccagctttttgtctaatgtattattgcttcatcatatcacaactatcatttgttaaaaaaagatatgctatccacaatgtgctctctagtgaaggagacctcaaacgcttcaataaaagctgaacctaataaaaagaaatgagcagcatagcgactcatttcattagtacaaaaacatttataataagagctaaaatacatacagatacaatggcgatgagtacgttcatcacaaggttttgcgaggatgttttggcttgttttttcatatcagcccgactcatctgttgcttttcatgatcacttttagacatcacgtagcctctcctattcatcaaaatgtcagcagtgtgtaaataatttttgagaaaccttgatccagttcttttgtatagacagcagcacatgcaggttatcaccagttattttagcatgttttgtcaaataagtggactatgtagcgcttcaatttagtattcacggccaaatatatttaaattcgttgcttttctcttcttttctcgctattgtttgagaagaaggataattagatacgataaaggatgatacgatattgaataaccatacgcagctgcctcagtatatctacacatacgcatgcagcgaagaggaactctcactatgtcaattagagagacgctctctttttgaaattgaaactgagaaacctatcataagaagtgccgttaaacttgatccaagcagaagcccttttatcaaagagcgattagatattatgtatgaatcagatgaccttgcagatatttgtaagcaagtaaaagatattgaccttggagacaaaacatttaaactcattttcatgaaaattaatgacttggaaaaagatcaaaaaataagttataaaggtcagcgtgctattgaacgtgatgtgggttggcattttgtagcagaagcagacttgcataaccctgaccatttgtttggcgttgttccatttgaaggacgctggtattttgggaaatatcaaaaaagcgaagcggtatggctgcatcatttgaagaaaccgcgtgaatactctacagcactcagtacccgccttgcaagagctgtagctaacattgccgttccaaaccctgaaggaatcaaagtgattgatccatgctgcggtatcggtacagtccttgtagaagccctttcaatgggcattgatattgtaggacgcgatatcaatccacttgtgaccgacggatctcgtgaaaatattgcgcatttcggcttaagcggtgatgtcaaaactggaccgatttcagatgttacaactcactatgatgtagctatcatcgacatgccttacaatctctacacccacgcgacgcctgaagatcagctttctattttaaaacacgctcgccgctttgcggataaagtagtcgtgattacagtagatacgattgaccatatgattcatgaagctggcttttctatttcagatcgctgcgtagcgcgcaaaagcgtattttctagacaagtagttgtatgcgaataaaaaagacaccagtctaacaggctggtgtcttttgatttaccactctttaggttcatagtctaattctttgaatagctgcgtacgctcttttttcgttaaatctctccattgcccaacaggtaagttgtttaaatggatattcataatacgcgtacgctgaaggcggtatacttcatatccgagcacttcacacatacggcgaatttgacgatttaaaccctgtgttaaaataatttgaaactcatacttagacagctgtgtcacttcacaaggaagcgtttttgtgcctaaaatttttactccctcagacatgtttttgataaactctggtgtaattggcttatctactgcaacaatatattctttttcatgcttgttttctgcacgtaaaatttcattaataatatccccgtcatttgtaagtaaaattaagccgtctgaatccttatcaagtcgtccaacgtggtgaatacgcaaagggtgattgactaaatcgatgatgtttccctttacttttttttcactcgtacttgtaatgccgactggtttattaagcgcaatatatacattatttcgagcaatccgaagctgttggccgcttactcgaatatcatcgccgggcttaacttgatctccgacttttgcaacctttccattaacggttactcttccttcactaattaacttatctgccccgcgtcttgacgcctttccagattcgctaataaatttattcagtctcaggtgaatcacaaccttacatttaaaaattttaaaatttgtctcttctattagaaacagacatatgccaatttctataccgtccctatcgtaacatgctatacgcttctcgtcttcttttaatttcattacttaatcatatttttttaacagtaatagaagtataggtctaaaatactttgtaaccttattcttaacatttcaatcaatgcttacacctgtgaagcttgcatcaatcttcacttatatacaagacctaaacgtctggattgactgatcagtatagagttgctaccattatactgaccgatcaactagtaattatatcagggagctgttttcatggaaccaaccaattcaaaagaaaaaattttaagcgcagctgctaaactttttcgcaaaaaaggctatcacgccaccagtctaagtcaaattacaaaagaaagcagcgctccgagaggatctatttattattattttccggatggaaaacaacagttagcaaaagaagctattcaaaaaacgggagaaagagttaaagcttatatcgaaaaatccctcgcttctcatgaagatgccgcgtcagctattcaatatcatataaaactgatggctgatcgaatgtttgaacaagtggaaaatgaagcggatatctctctcgctgctatgtcgagtgaagtatggtcatcaaacgaaacgcttcggatggcctgtgaagccgtgtataacgagtgggagcaagtttatgcagataagttagtttgttcaggttatgaacaagaggaagcaagacagctaggttcagctatacagtcttggattgaaggggcttatactctttcattaactaaaagtagtacagtccctatgcaaattgcagctgaccaaattggtaagctgtttgcaaacaaaaattaatttagtaaaaggaggtcacttatgacacaaacagaagaaaaaatgagtacacaaagtaagcttatccttttcattttgattctaggaaattttttatgcttaattagtgaaacggtaatgaacgtggccttgccaagtatcatttcagattttcacattagaacgagctcagctcagtggttaactaccggatatatgcttgtaatcggcatctctgttccggtgtctgcttttttaattcaacgattcacattaagacagctgtttgtgacggctatgagcttttacttaattgggtccttcattggatttattactccatggttttctctgctttttgtgggccgtatgattcaagcattagggacaggcattattttacctcttgtgatgagcacaatgttaacactcgtgcctgttagcaaacgcggcaccgtaatggggatttttagcgtagctattttatttgcaccggcaataggaccggttctttcaggagtaattattcaatattattcgtggcaaattatatttctaggtcttttaattgcagcggcgcttattttcctatttgctcttttcaagctcagtaacgtttctgaaacatctagaccaacaattcatatcccatctgtgattctttctacaattgggtttggaggagttgtttatggatttagcgcagctggtgaagagaccggatggagtaatcctatcgtatggcttacgctcataattggcgtcatagctcttgctttattcgtcagacagcaaagcaagttgaattctcctatgattactatgaagccttttagatcgtctgtgttttcaagatcgattttcttaatgtttcttattatgatgattcagttttcaatgatgttaattttgccgctatatttccaaacggctgcaggactgtctcctttgcaaacaggttttcttatgcttccagggggcgtaacgcttgctctaacagctatggtgggaggacgtttgtttgacaaaattggatttaaaccgttgcttttaacgggcttagtccttttaacaattatcttaagtttgttcactactatttcaagcggaacaagcacgacgactgcagccatcttatacgcagcctttacaattggcgtaggtttaagcatcgggcccgtgatgacgcttgctttaaatcaagtaccaaaaccgcttcatgctcacggttcagctatttcaaatacgattaaccaagtttcaggcgcgattggacccgctttgtatacaagtattatgaccatggcttctcagcactttattcaacaatcaaatgaaacgaataaaacgctgttacaaataaaaagtatgacaagcggggttcataccgtctattatgtagccattgctttcgccgtcgtttcgttcctgttcgctcttacgttaaagaaaaaagatcagcagcttgaaacacaataagtaagaaactgataagagctgctcataatttgagcagctcttgttacatgcagaatttatattataaatgtaagagcaatcatagatactattaaaacaaggataacaatacttctctttctttcaaaataatctaaccggataattcctatttccttacgcaaaaagagcagaacgcaaacgcgatctgctcttttcacatgctagatatgagtaatttgtccatgcgtgaaaagctcttcaataaataaggggtttatcactacacctatagaataacaaagaaaaaaagatgtggctgtgagatttatcacagccacatcttttttatccaactagcttattaaattgtacacgtttattaattgccgccataattggtgctccaacaagcataaccatgaactcaccaacggccgttgttaaccatgtaaagaaaaatggtaaatcaaatgctaagtgcagttcaaacgcaataataaacatcgtgaacgtaaatacaagtgtattaacaagcatacgagcccacatatttttaatgtagcgcatagaaaaaatggtaatgagtaatgatagcacagattgtcctaccccaaacaccagatcataagcgaccattggtgaaaaaaacaaattcgtcagaaatactcctagcacaatgccgtacacgtactttttattaaacacaattaagtgattgaacatttccgatatacgaaattggatattggtgaagccaaacggctggattaacatgctgacagcaatatacatagcagctaaaagaccgttgacgcaaagtgttcttatattcatcttactattctctccttagttttttaacgtgggatggttacgaaccacgtaaacactcaaagaatcatacagcaagcttaagctttcgtcaatctagctgtttacaaactactgccggtttctatatcttgcatattgacggctcttttttcttacttttctttagtataaaatagaagacgtatcagtatacataggtgacatcaagtagttaacccttttgatttgaaatacgaaaggatttgtagcgatgttagataatacagataaacgcatactagaagagctatcaaaaaatggacgtataaagatgaaagaattaggagaaaaagtgcatttaaccggacaagccacttctgctagagtattaaagttagaagatgaaggcattatcaaaggctatacaattaacattgatgaacgaaaactgggctacaccatccatgcatttttaaatatctatacgcagagcattcatcaccacccctaccttacatttttagaaagtcagcaggagtacgttatcaacaactttaaaatcagcggcgatggctgctacttattagaatgcaaatttcattcaaatgaagaactaaatgattttttgacagagctaaatcagcatgtgaattacaaactttcaatcgtcattaacaaataaatttttttaaaaaataaaggtatattaatttatgaaaatggtaatcctaataacatattccccctattccaataaatttgaaaatcctttgcgccatcgcaaaggattctttttttcatgtaggaaaccgccttctattttttgaaaagttgaacatctctcacagcgttgacatagcggtcagaggtttatataatcggtgacatcgaagcatagaaaagcaggatcaagacctatacatgtatcgtaattcttcgtcttagtagttgatcagttttataactagacaatttctaagacgttttttatttcattatttgtgaaacactagtaaaaacaagattccacgtgaaaatatcctaataatcaaggaggtttgcatattgaaaacaatctataaagacatcatcttaattattgccggagcacttttagttgctgcatccattgatttttttgtcattccaaataaattaggtgacggcagtacagtgggtattgctcttgttttatattatttatttcatatccctacaagtattagcacatttcttgtaaaccttatatttattgccttagcctataaatttctaaccaaaaaaacgattctttatacgattctaggagccgtcatgacgtccgttttcctcggtctagtcagctatattccttttcacgttcacgacatgattttaggaattgtattcggggctttactaatgggaacaggacttgctctcatttttatcgcagatggatctaccggcggaacaactcttttagcttatttattaaactatacaaaaggctataatatttctaaaagtatgttctatatggacagcgtcattattttaggatcggtttttgctattggcgtcaacaacacgctctatacctttatattcgtctatctttgtgccaaaatcgtcgacatcgttatcgaaggtttccacaacaaaaaagcaatgacgattatgtccgatcaatacaaagacatagcacaagttattaccagtgaatttggaaatgcagccaccatcttttacggatatggctactacgccaacaaagataaacgtattatttacgttgttattaaaaagaacgagttattaaaaattaaaaagaaaatccagcaaattgacccgaattcttttattgtcatccacgaagtaaaagaagttgtcggcgggaaatttggatttatcggcaattcgcctcatgaaacaaaagccgctgctaaataaaaaaatccacctcttggtggatttttttatgaaaaaaccgttaagaaaaacgaaaagatacctgctaaaaagtaaaccgaccctaacgcaattactcctgtaacgaccgtaaatacacttaatccgatagccaccttcattttcatccacatccctttttagattagtagtataagtatgtccaaggataggagatttataactatgccatcttatttatttcatatatcgatgcaacaattatctattcaatgtgttctaaaaccatccctggcgacataatgtataggaaggatttcatatacacatctttgtatcacacatatcatatgaaattaggtgagataaaatggtggctgtccacttttttgaaaacagaaagcttctattaagccagctgagggaaaacattccttctacgggtgatgatttaaagattaaaggacgaaaaggaaccgtcgtgcttgtgaatgacatcgatgaaaaaaatgttcacgtagaagttgctttagaaaaagtagtgaaaaagaacttagcgttagataacgctaaaaagaaaaggagataagcgacttacgcttatctccttttctttttaattcatatacgaatcatctgtatcttttgcttctgttccccaaaaaaagagactcctaaaaaggaatctgcagcaaagagcgatatcatcgcctgaatattaatacaagctatattttaacatataaaaacatattttacaaaaatgaactattattttacgcataattatttttcattcgaggtttttcaacatttgaaacccatttcgtataaagatctttatttatttttcaggccaaatttttgcatccggctctaataaccacttatgctcttcttccataatacggtctgtccacggattattgtcgagatggcgaatcatccagcagaagtacatcgcatagccgggagccgttgcttgaggatgatccaattcgccgggaattgtaataaaactgttatcaactacacggtaagcatcttctccaaccattgcgcagccaaatccttgtggcttgtcaaaacgatagtaatacacttcgggctggtcatgatgatgaggcggataactcgaccatcttcctggataagaaataacttctccaataacaaggttagagtaaggagcgttattgtagtcaaaaattgttcgaattacacgttgagcagtaccttcccatactccttcaccagccacggtgttttgacaatcttcaggcgtatataattttgatgaaaactctttttcattatccgttttttgaattagcacttcactatcggcaagcccggtaattttaaccgccacattttttgaaacgtgcaaacaccaaggctcttcttcaaatagggactggcgctgaatttctttcgaatggccttcccactctagctttacctttccttctagtaaaagaatagccgtttcattgctgctgtctagcaaagtttcctcttttccttgagacattttataaattccaatatccatcagcatatctttgtgctgaccagtcatttctgtaagtacgttgtatcctttatttaattcacctaatttacctaacatgcttaaattcctcctttatgtagtagcgcaataataatttacgtatcactgcgatgatttttggtagccgcaatattcttcatgatgttcaattatttatataggctctcacgtctcttcgcaacggagccgttgatttccgaacaatcaattttggctcaagaagcaaatgttctttatgaatcgctggatatttcatttctctaaccagcaaatccactacgtttacagccatttcttttgtcggctgtgctaccgttgtcaacatgggtgtaatggtagtagaaagaaccgtattatcaaagccaatcactgataagtcttgcggcacatcaattttgaattctttggcggcttgcataacgccgatagccagtaaatcgttacaagcaaaaatagccgtcactttctccttcattgaaagaatttgcttagcactttcatatcctttttgaatacttgcttcggtcgtaataacgtgctgaggcggcacgatggttccattttcttgcatagcgtcttgaaaagcatctaaacgggcgtgattactttttgcattttctgtaataatcgcaatttttttatgatgcaaagacagcaaataatcagtcgctaaatagctccctttatagtcatccactgtcactgtattaacggatatgtgaggaatttctgaagcaataacgctaatcggtatatcttgcttaagcatattttttaaaagattagcattgcgaaaagcagaagctacaattaaaccgtcgattctctgacgtattaacagcgatagatactttttctctttttccgcatcgttatcggtattgcacattacaacgtggaaacctcgctcatgacttcggtcttctatgcttcttgccaaatcggcaaaaaaagggttggagatgtcaggtacgagaagcccaatcgttttagtgggttttcctgttaaagcagatgctacgacgcttggatggtaattcaactgcgccataacctcaattactttttgtcttgttctttcactaatatgaccggtttgattgatgacttttgatacggtagaaattgatacacctgcttcttcagccacactataaatagttggcttcatttcctctcctcctttcctttcataaatacataaaaggcgtaaaatcttttacaatggaaattaaagaccgcttttttctttaatgaagtttcttgcttttaacgcatattcaaaaggattagcaagggctggatcctgttctgcttctacgacaaaccatccgttataatccgaagtggcaagcgtagtaaatacttcatcaaattcaatagctccgtcacctggaacagtaaaggctccttcttttaccgcttgcaagaagctcaggtcttgttctttgactcgatcaactacttcttgacgaatatcctttaaatgaacatgcttaatacggtgcagatatttttttaagatataaagaggttcttctcctgaaaagacaagatgaccggtatcaaatagcagcgaaacaagctctggattggtaagctccattagctgctcaatttcttctgttgtttgtacacctgttcccatatggtgatgatagacaatatgcatatctttctctcgtgccagtttcccaagatggtgcaggccttctgcaagtctgctccactctgttggcgtgaacacaggcttttctttaaataaaggaacatccatcagcccttgaatgctgtgcccttgttcagacacaacaattacttttgctcccatttcgcataaaaaatcgcgatgttcaataaatggcgtcaccgtttcttccagcggctttgttgttaaaaatgtactaaaccatgcacttgcaatttccaaattccgaagcgataatgccttttttaagattgaaacatttcgcggatatttgtttccgacctcacttcctctaaaaccggttaaagccatctcactgatacactgttcgaatgtattttcagctcccagttcaggcatatcatcatttgtccaagcaattggagcaatccccagtttgaccgtattttccttgaacatctcttcctctcccttatatgaaattaaaacctcttttatatttatcgaatgtttctcttcaacaacctcattttctcctgcttcttaataaactcttgccatttcaagatttttcaccttatcttcataagcttcctgtacatgctgatttttagatacctctgctactcctacatgccaccatgattcataaccgttcgtcatagtttttggcagcactttaatatcaattagcgtagaaacctcttgtttttgtgcatcttctatcgccgtttttaattcttcaagagaacttacgcgatacgtttttacaccgtagcctgcggcgctggctgcaaaatcaattttcatcacgtttccgtttagttttcctgtttcatcgtttcgataacgaaactctgtgccaaagctccccatgccatttgacatttgaaggttattaatgcacccgaagccggagttatcaaacagtaaaatgtttatcttttttctttcttgaaggcttgtaataagctctgaatgaagcatttgatagcttccatctccaaccatcgcatacacttctttagctggttctgccagcttaactccaagtgcgcctgatacttcatatcccatacatgaatatccatattccatatgataggtattaggtttattagacttccacattctctgtaagtcgcctggaagacttcctgctgcacccacaatgacggagttgtcatcaaggagcttattcacctctccaattacttctgtttgcgttaattgagtaccaagtgattctgcatattcacctaagctctcatctaaatgaccttgtatttccggaacaaaatctgcaccagtaaaacgtatgctatgtagacgctctaattctgtttcccatgcgtctttagcacttgtaatttctattgtataaccagactgatagccaattgattttagctctttcctaagagcaagcaacccttcttttgcatcagctacaagtttcacagcatcaagtttatttgcatgaaattcagacgtgttaatggtaagaaattgcacgttgggatgttgaaaaagctgtttagatgctgttgtaaaatcagtaaatcgagtgcctactccaattactaaatctgcttctttagcgattgtattagcagctgagtttcctgttacacctattccgcccagattatagcgatagtcactttcaacggcacttttccctgcttgagtttctccaaatggaatatggaactcactagcaaattgttttaactcttgtgcagcttctgaataccgaacgcctcctccgcaaatgatgatgggctttttctttgttttcattaattgaattgcatctgctagactttccctggtcggaaggcggcgctcaatgcgatgaacgcgcttttggaagaaataagctggaaaatcccatgcttctccctgcacatcttgaggcaaacaaatagttacagctcccgtatctgcaggattcgttaacacacgtatcgcattaatcatagcagtcatcaattgttcagggcggcttacgcgatcccagtacttactcactggtcgaaaagcatcgtttgtagaaatagataaatcatatgactgttcaatttgctgcaaaacgggatccggctgtctagttgcaaatacatcaccaggaagcagcaaaactggaatgttattagctgaagcagtagctgccgttgtaaccatatttgctgaacctggccccactgaagatgtgcaggccataatctgctttcgatgtttttgttttgcaaaagccatcgctgcattggccattccttgttcattacgtccttgatatacatctagatttcctgggtcttcttccaaagcttgcccaagacctaccacatttccgtgcccaaagattgtaaaaatccctttaataaactgatgctgctttccatcaaattcaacatactgctgatttaaaaacttcactaatgcttgtgccgtcgtcattctaactgtttccatgcttctttctcccttctagtactagattgcgattttaaaaaaggaagcataaggaatatctttaattcctgatacttccttttaaaatgagatgcgatttttaatgaatcacttaccagcgcgttgttaccattttctttcttgtataaaactccacgccgtccgtaccatttgcatgaagatcaccataaaaagaatctttccagccagagaatgggaagaatgccataggtgccggtacccctacgttcactcctagcatgcctgactcaatattttcacggaactcacgtacgcttgcgccgctgtctgtatagatacaagctccgtttgcgaatcgagagttattggcaacgtcaattgcttcttctaacgtttttacacgcacgatagaaagcaccggtgcaaagatttcgtcttgccagattttcatttcttgtgtaacgttatcaaaaatcgttggtccaacaaagtagcccttgccatttactgctgcatctgtgcgaccgtcacgaataagctctgctccttcttgcacgcctgattcaatatagctgagcgtacgctctttatgattttcacgaatgactggtcctaagaagacgttttcttctaagccgtcgccaattacaatatcatttgcttcctctactaatctttcaattagctgatccgcaatttcttcttgtacagtaacaacagatgctgccatacaacgttcacctgctgaaccaaaagcagctccgataatttgttttgttgctacgttcaaatctgcatcatttaatacaattgaatggtttttagcaccggctaaagcttgaacacgctttaagttttccgtaccttttttgtacacgtactcagctacaggctgggaacctacaaacgaaatagctttcactaatttatgttcaagaagaccgtttaccacatcatgcgcgccgtttacaatgtttaatacaccttttggcaaaccagcttcttcaaacagctcagctaatcttgcagctaacagcggtgtacgctcagaaggctttaacacaaatgtattgccgcaagcgattgcaagcgggaacatccagcaaggaaccatcattggaaaattgaacggcgtaattcctccaatgacgccaattgggtagcggtacatgccagattcaatgtctgttgcaatatcaggaagctgtttacccatcattaacgtaggagcacctgccgcgaattctacgcattcaataccacgctgcacttcgcctcgcgcttcgttaaagctttttccgttttccaccgtcactaactttgccaattcatcccagttatctactaatagctgctgatacttgaacaaaattcgtgcacgtttaggcacggctgtttttgcccatcctttaaaagcttcatttgctgcttgcaccgcttgatctacatcttcttttgtagaaagaggcacctgtgcaattaattcacctgtcgccgggttatacacaggttctgtttttgatgaagctgattcaatccattgtccaccaatatagttttttactgtttttactgctgtttgtgtcatagaatatctctccctttatctgattttaataagcttctattcctttaatcttttaagatttttcctatatctgttaagcttcctgcaaaacttccgttgctgtctccataaagttgaagagctcaacgcttgtcggcatagcatctgaacagctgtgttttgaaattacaatcgaagctgaggcacctcccaatcgcattgcctgcggaatttcaagcccttgcatcaatccgtaaataaaggctgaagcataagaatcaccagcgccaaacgttttaagaacttttgttttaaatattcctccgcgatgagaatcgccgtctcttgtataggcaatggatccttctccaccatgcttaatcacgacgatttgagcatggtgagaaaaccaccgctctgctgttacttgatcattagattcttcatagtttaataatttttccatcatatcaaactcttctcttgtaccaataattacatctgatttttcagcggctaaattaaaatagacggctgtttcagcttccgattcccatgtatatggacgataatcgatatcaaaaaacactacaacttcatgcttgcgtgcgtgttctagtgctaaaaacactgcttcacgagaaggactttgtgcaagagccgttccagatattaaaagtgcctttgaccgtttgatatattcttcggatacttctgtaggacttagctttaaatccgctacgttatcacgatacattaagatactgcaatctgtagggcttttgatttccgtaaaagctagccccgttacggcccccgttttatcaataacaatgctatctgtattaatcttatttttttgcagataatccgtaatgaagcgtcccatttgatcatctgatacttttccgataaaaccggtttttaagcctagccttgctgctccaatcgcaatattagccggagagcctcctacatatttagtaaatgttttagtctcttccattggacgctgtgtttcatttgcatttaaatcaatacataaacggccaacagcgatgaaatctaacccacgattttctttaaaaacaagcggattcatctttattcctccttagttaagcgctttcctaaaagggtagaaagaccaatttctttcatccccacgtttaccctcattaattcactgcgtattttttatgttcaatctttactggctgcccggatagtaaagattcttttgctgctttagcaattcgttctgcttgtaacccatcgttccctgtacaaataacgctttgtttttccataattgctcttgcaaactgtgtcacttccgttatgtacgcttgtgtatagcgctcaagaaagaaatacagcggcttctctttcactacactttcgcctgttgatatttctactgtagtaggacggcaattgtcagcagcagctgcacctttttcaccaaaaacttcaaggcgctgatcgtaaccgtagacagcttgacgactgttatcgattacacctaaagctccatttgcaaattttaatgacacaattgctgtatctatatctcccgcttcttcaatagcaggatcgatgagcgtcgtgccgtaagccgatacttctactacttcgctgcccattacataacgagccatatcaaaatcatgaatcatcatatccatgaacaatcctcctgaagcacgaacatattccggactcggcggctgaggatctctagacgtaatttttagaatgtgcggctgtcctacttctccttgctgtacaagatcatgcacttttttaaagttgggatcaaagcgtcggttaaagccaacttgaagctgaacatcatgttcttttactacttctaatgcttgaattgtttcttctactgaaaaactaacgggcttttcacagaaaatatgttttttcgctcgagcagcttcttcaataatcgatgcgtgcgtattcgttggcgaacaaatgaaaacggcatcaatttctggatcagctaataaatcttgataatttgttgttaacgtcgaaatttctttacttgcagcccattcatgtaaatgatctactaccacatctgaaaccgctttaatttttatttgcggcattaattttaaattatcaacgtgtaatttccctatgcgtccagcaccaattattccaattgtaagaatccccatcttattttcccctttaattaaaagttaagaaaacattcgctcaaacctctatataggttaagcgctttcctgattacaattatacataacgttttctgaa

SEQ ID NO: 14 - DNA, 116203 bp, Priestia aryabhattai
  source 1..116203: mol_type = genomic DNA
ttacacccaaaaacagtcgtttttttagtttttttgtatagtcatatttcactttaaatagaatataaggaagtaaaaaataaaacaaaaacattcttgaagctaaaaatatcgcatgaaataagattaatataaatattatccaaagcatcttctttatttgtttttggttaactctatctcttgtatttggatgaaataaaagtaaaaaataaatagtggaacttaataagaacacgttgttaaatgaagtaacacctaatttactattttcccttgccgtgtatgcatattccaacaaccccattgattgaaatgaagtttgaaatatagacttaaaattaacaatacttggatatatatatactaactctgctattaaaaaaatgaaaaagcagcagtttgctattaacattaaggatttaatatctatttcgcttttattaactctaaatctagatatagaaatgaatggtatttgccttaccctgccgaagaataaacctaaatataaggttaggaacaatattgtaaatatcaatattgatttggtagtcacaaatcttgctggtaccccctcaatagtaaagctcccttgactaaataagatccatataaataattgaattatatatattaaagaaactaaatataatggatttaagataatttttttaaaattaaaactcatcgaataacctcttcgttaattaaattcaacttcttttaaaattgaaagcgccacttcatgccatgacagtatagtgttcgtatcaaattgaggaagttcccttttagaatatttttctgctttgtcaaacacctctttgacattatctagcttttctatattataatagaatgtattttctcgctgcgtttttagataactcggtgcaataactggaatattgcaatatgaatattgtaatattttcaaagtatcagttagtgattcacttcccacctcatatgttcgatttgcaagaccaaaatccgcattttttacatatttaattgtttcgtgaaaaggcatctctccataatagattatatttttatttttcactttttcttcaataggtccaattatatggaaactaacatctggaagtgcattagctgcggcttttagaaaattataatcaaaatgagagttacctacaaagatagcgtttttttcttttaagtaaggattatcatactctaaatcatatacatctttatctatcccatgataatgcaaatgaaccctagaaccatcaccaaatatatccttcacatatttacatgtaacactaattaaatcgaaagaatttttaatcttgttctcttcctctataaccattggatgacaatgcaaaaaacgaatatcatctgaaactctataaacatattttgccgtagaattaatttttttaaatttctccattaatagtaaagctggcgtactctcaaaaattattaaatccatttcccttactatattctttatttttctcatgctatttgatccatagtatttaaaaataggtactgacaatttatttaatattctcttttgtaaatttccagcatgaaacaaagtaaaaaatacataactatagacatttctttcattagaaacctttttcaatttatttttttctttcaatagagggtactgaaatttatgatctttctttattactgacatgtaacttataggagcagtcacaaaatatatttcgtgccccatttcggaaaaagcacgcgctaacctatggaatcctgcttttctttttgattcgtaataatgacctgacactagcattattttcattttatttccttcctatttcagaaatcatttatttatttgttaatataggagcttaattaatgaggtactttataattctaccttgacaaagttatacttatgtaagtattaatataaactatatttatattataggagtatagaataactaaaataatagcttataatggtattgacttctaataagctcctgttcgattaattactaatttaattgtttttattaaaatacttatatccatttttgcactttgatactctgcatagtagaattctaactctgctctctccggatagccaacttgacttctaccacatacttgccaatatcctgtaactccaggttttacagacagaaatatacctaatttttcattatattctttgagttcatctactacaactggccttggacccacaagactcatttccccttttattacatttaacaattgaggtaattcatccaagcttgttttccttaaaaacctacctattttcgttattctaggatcatcttggggttctaatttgtagttattttctatatactttctatagagctctttatcccttttcaatataatttctgcatttactaccatagaacgaaatttgtacataccaaattcttttcctgattgacctacacgaatttgtttaaagaatactggccctttatttgccccaaacatgtagaataacgtaataaatgcaaatacaggtaacgtaattattaatgccaggaccgctcctacaatatcaatacatcttttggtaagaaagtacatttttttgttaccgattctttctataaccaagccatctggttctttggttatggatttcttttgagctagttgacctctcattaattttttttcctcccttttattaatatgatattctcaaagttaattgctatatacttataaatatacaaattggaactttaagaactactctcttaatttattattaatttcctcaagatatatacaattaataataagtgtttattaaatcactaagcaccccaatgagttaataaacacttattataataattgggcatctaaccccccctcacacgacacttttgacaacatacgtgtctaaggtacctttgtacccacagtgtagccgagtgcctcctttgatactggctgaggagacatcaccatacattctatcctttatgttactcgccttgaatattcatccactactgaacaaaaattaaaaacttgtctttaatttcaacaagtttttaaggatttgataaatacatatctatactgcacctttaaggctcttttaatttatctatttacaattatttccgtttgagaaaacagacattagacccataacttatgtctgacatgcaaaactaatgttatcacaaaaaaaggaaaagagggataagattttttgtcgaaatttgcgatataacaaggtttttgaatgaaaagataatattttctctccaaaagacctttttatgtcgttaaatgttgatagtcttacctttttctatattaagtaagttgttagaacttctgtcatacgcagcaaaaataatagatatttctatatgaaaatatcttaatgtattgtgcgaagataaagatacttaaggatatttcttgcattttccttgcttttctcttacgatatgaagataaatctaaaaataaaaggaattttttgtatgatattaaaaagaatttgtgttgttgcgatgatacttgctatttctcatttttcccacacgcctcatcttcaagtgacggatccaaactcttggagcaatgcttcagtctggaatcataaagccactctttggtctgtgctacatcctggcagtgaattttatacgtcttatacatacggctttaatttagaatttatcttacgtaaaattgctcacatttcattcttcggcttattagcactattaatttactggaatttgaaaaaaagttcttggagatatgtaaaagcctgggtttcactcgcttgttttgcttttttagacgagttgcaccaagcttttattattggacgtgacggccgaattatcgacgtagctattgattcgtttggcggtgcactgtttttatttcttttataccgatataaaaaaaacactagataaaacttctaaaaaccagaaaataaaaaacgtttaaaaaccgttcacaagtttatccgtgaacggttttttgacttttccttttaatatagatatgcttctgctttcacaacaaaaaacttaatttcccttatttcaccaaactccatgcatatggactataaaatccatcagcttttatcaccacgtatatttttgtacctgctgactgagctgggatagtcacattgtatactcctgaagcatttgtgttacctctagctaaaatggctgctgagctagatcctgctttcacataaactaatgaccctggtacggctgttcctgaaatagctgtagaagttgcagtaacagcagagatactaggtgctttaggcgctgattgagctttaacagtagttgaagtatacggactgtattttactgcattttttacaatcacatagattttcttccctgcattttgctttgaaatagagatcgaaaagcttccttttgcatttgtttttcctctaaaagcaatgctatttttactagaatctaattttacatataccgctgtatttgcttctgcttttccggttaacacggtatcggcctctgtaactggatcaatcacaggtgccgctggtgcagaataggttttaacagtaacacccgtatacttgctgtatttcacagcatttttggcaataacatatacttttgttcccgccgcctgagctgggattgcaacagtaaagtttccttttgcatccgcttttcctctggcttcaatctgtccggaagtagagccaaacttaacatacacaagtgcatttgcttctgttgttccttttacggctgtatccgtttcttttaattcatttacggccggatttttaggtgcagctattgcttttaccacggttgaagcatagggactataattcacatcattttttaaaataacatatatttttgttccggctgcttgttttggaatagaaaccgagaagtttccgttgctgtccgctttccctctcgcagcaatcgcagaactcgtggagttaaattttacgtagacaagtgtattcgcttctgcttttcccgatatttttgtatccgtttccttaattgaatttaaggcagctgcatacggagctgttttataagaacgttctgctttcgtgctgtaatattcagtaagagctgtacctggataataaaatgctaaaatctctttataatccagcccttgatttgccattacgttcgatccctgctgactcattcctacgccatgtccaaagccttttccatgaatagtaaacgacgtatcaccttcatcaattgaagttacgtacaggtttagcatagatgaaccttccattagatctttaacggtcttagcactttctcctgtaaaattccaatcgtgaataagaattttaccgtctttatccacatcatttttcttaatataacgaacgcttagatctccttttgtaacacgctggcctgacgcacggtcataaaaatctatttttgtaatgtcagtaattttgatatctttcgtgtctaatccgttagctttcattttgtttttaatgttatccgtcatttttaaatctttttcgtttgtttgactccaccacgtatcagatgcagctaaatcttttgttgataaatcaatttgctgcttatttacgacctttttccacggcatttgaggatcgtacggatcgtttttcacttgaaagtaaggtagtggagcactattagtccagtagttagagttggactcaataattccgccattacttgaagaaaaaagggtttctactactctgccattatacataactacttcaccaaacgtctcttcaacagcttgatcagtaagaggtgtaatagataactcttgtttccctccataaacttgcctgctctgtgtatctgtaaggtttgaatcattcaaatgctttaacgcatatgaacgagctgctactgcttgagctttaaatgtatttaaagaagtccaattttttaaggattcttccggaactacaccttttaggtagtcttctatcggcaatgtattaatgggacgaacgtacttttgactttcattcgtgaatgctacatcacctaagtactttcttccttggatacttaatgtcgcatcatatgtagaaggagttacttcaaagctagggaattccccaagcttctctgttcctttataaatagctgtgccattagatgttactttcacttcataatcttttttggcgcttaagattaaattagtacctttaatgcgataaatttctgatggctgaatcgtaatcgagcttttgttacctaaatagtttgatagtttcactgaaattaatggttctgtttcagctgcttctgctttgttcacaacgtttaaagcaataagcataacgatgactgcaaagaaaattttccctatttttttcattaatctttttactcctttttcgtttttaataatcctcctcgtagacctcctgtttaatatcggcacgaaatcggaaataataacaaaaatcaacatattattctataaatatacaaatagcttgtcacctaataggtgacaagctatgatcaaagctgtattattttacgttcaataccgaggttcttagtagtaacagaatgactatttaatttatccaataaagatattttcttatttattttccaatttttaatgacttatgctatctattcatgctataatatcaaagatatctttatatcttgcttgataataaaaccgaaaaaaagtctgtttctcatatgagaaacagactttttttcatatgaataattatttgcttactagtttcactttgatttttgctaaatttttaatgaacgcatctacttttattcttgcctgttgctatagaagcttccatcgatatctttccatttctaaaccctcttaaattctaaatcttgaaatcaattcctgcagttcctccgacatattggctaaatccatcgcagatgaagcaatttcctccatagaagcaagctgttcttccgttgtagctgacacgttttgcgccccggctgccgcttcttcagcgattccatttacttcgtgaatcgcctgctggacttcgagcgtacctttggctagattatgaatagcgttccgatttgctgaatttgctccactacgtgctgtacggcttcgttaatttgcataaacgatgtacctgcttgttcaactactgctaggccttcttttacttctttagtggtgaccgccatagattgaagcattcgagctgtttcgcttcgaattaagctaactagatctttaatttgattcgctgagttggatgagccttctgctagttttcgtacttcactcgccacaacggcaaaaccttttccgtgatctcctgctcttgcggcttcaatagctgcgtttaaagcaagcaaatttgtttggttggcaatggttgtaataacatcgttaatttgactaatttcagctgagtgttcgctaagatcttgaaaaacagatgagagttcggtcacattttcgttgattgatttcatttgttgggctgctgtttcaacggtcgctgttccactatttgaaatcgaagccgtgtcgagtgctcgcttggtgatttgctcgacgttttcaacaacttctgatgtttggttcgtaatgccccataacatttccccttttcgctgatgtattcttctgctttcacttttacacttcgttatatctatcggtcatagggagtgttctatccatagtacgctcgtgactttttatcgacataaaaaccagcttcttataaaaagaagctggtttaaaagtaatttctctacttagatttttgtcccggagactttccctgtgttatccacgcttagcttccagctttgtccgtcaggagatttaagaatcaggctgtttccttgctgaaactcaagatttccgtacattttgcttccagacgttgcaatccaagaggaacctggcatcatagcagacgtaccgaatatgcggttaattcgaaaacgcttgtggtcttttgtatattcacttagcgtaagtctcattttatacagcgtattagctcgcacttctgctgttaccgtgtttcctaagttgttttttacgtctttggctgttgtccacgcaccgtctagtgctgttagatattcaaatttaatatttttaggtgactcgccccatccaaatgaaacgcctgccatgttaagcattttaattggattcgagctgaagtccatttcaatcacaacaggagcggaagctggcacgtcgagataattcatgctttgttcatcaactaagctgaagcagttgctgatgctacctccgtaaggggcttttccagcaatttgtttgacggtatattttttatcagcttgtacgaaaatatcgtcttgattgccgataatatcaggttttcctggaagtcctggggcaaatatatttcgggtttgttcaaaaggagacgtaatgtcattatactgtccgttgtttaaaatcgatgtggataaaagattagaggcaagctgatttcgatgtgcgatactcgtaaattctacaggcggttctcctccgctcattaaatacgtatcccaaatatgcccttcaaatatgttgtaagcacctgaacatttaattgctcgtttcgtttggctgcggcactgcatttgaaaatgaacaaagctgtttcctgacgtttcatacggcacgtcactgatgccggccacgtcaattccatactgacagccgtcaatcgataaatagctaaagttattcgcgttaatccatgcaggcgtattgatgttggtgattttttcagtttgcagcaacacgcccctttcaaagttgcgaaggtgtacaaaggatacattcacaaagctgataaaatcccacgctttctgacagtaaaaataaatgccttttccgttataagcaccagacgtattaatcatgctgatgttgcttatcgtcgttttattccctgtttctaattgctgtgatccgtgaaggtaaatgactgaagatataaaggaaggatcggtcacttcaaccgttccacctgaaatagacgcatctttttgcagggtaaatacatgataatttcctgttactttaagtttggttccgctgtccatttcaaacgaaatagacggcttaatcacaatgggcgatgcgatggcgtacgtatagtttcctgttagtagtacgcgtgataaattgttgctaactgcgtaatcgattgcttgctgtatcgcaggtgcatcatccgtcacgccgtcccttgtcacgccaaaacaagcggcgtcgactattctttcttcactgcagttttccattaaactcatctcgctttctcagcagctgtaaagcatgtactgcttctattactttatgcgttttgactacctgtggttcacttttttcatagaaaaaaagcttcccgtttagaagctttttgcgttcatatttacatattgatcagcagtggacgcaatcatttgactcgacgtaaagtgctgttcgactttttttctagcgcctttggcaaaccgctgcttttgttcttgctcggcgtacagtgccgtaattttttctgcgaatgcttgaggtgaataagtggggattaaatagccagtatctccgtctgctattgcttctttcacgcctcctacatcaattgaaatcatcggtgtaccaacggccattgcttctaaaacaaccattggaaagacttcacggtgagaagttaacagaagcatatccattttcgtaataaatgcttcagggtcttctacttctccccatatctttatcttttcggataagccctgctggtgaataagctcttgaattcgctgaagctcaggacctcctcctccgatatgaaacttcatgtgttcgttacctttcagcagtgaggcgatttcgataaacagctcgtgatttttttcttttgaagctcgtgccaaaaggccaatatgacagtcgagtgaagcagctttttctttaaacacaaactgatctaagtccactccgttataaatcgttgtcactttactactattcacgccaaggtgcattaactgctcttgttcaaagcggctgaccgtaatcactccatgcacataagagtttacgagtttacaaaaaaagctttttgccttttgttcaagcaccgttacattatgctttgtataaagtatttttactttttttcgcagcactcgatttacgcacactgcatacatcaccatgcgcaggctgttggcatgaatgatgtcaattttacacgttcgcacttttttccacagtacataaaggttgtgaagatgattttttctgcttaaaggcgtgaacctttttttatattgaattttgctgtacagttctcccattgcagctgctgtgtatacgataatgtccggatgattcaactgattttcgagcttgcaaaaatacgtttctgctccgcctgtaatcaatttatctgtgattaaaagtacgtttttcaagacttcacatcctttacgattttgagaggtttttgcttttagcgtacgcattcacgctatactggacaaaataagtggcgcttttccatagtggcagcctttcttgcttgcgcagaagcttccaatacctcgttgctgctttcagcttgtttctagaaaccgagtgagatacaagacgataataagcaagtgactcttgaaggccgtatgctgtatagccttttctcagcagtgacagccaaagcgccgtgtcttccggctgaatgtttggcattgaaacctcggaaatttgttttttatcaagcatcaccgtcaaacagccgataatagtgttaccagctagcgtcttgtaatcaacactttttggaatgtttacttcaactcctgtttcttcacctttttcattgataatgctgtagcctgtataggaaaaagcgcagtttttttccagcataaaggccacttgctttgtaagtttttccgtatgccatagatcatcactgtctaaaaaagcaaggaatcgtccgcttgctgcggttataccttcattacgtgcggctgcggctcctgaatttttggtaagctgaagcagctgaatgcgatgatcctttatactaaacttttttactagttcagctgtttcatctgtcgaacagtcgtcaatcacaagcagctcccagttgaggtaggtttgctgctgaacggatttaatagttgatgaaatgaaggctgcgcagttataagcaggtgtaacaattgaaacgaggggctgatccggttgaaatttaaagttattcatctcgcactctcctcactttgatgatttcgtaaatagcctgaaagcagcgctaagtacaaaaagaacagctcatttacaattaacgaaagcgacatcatttgaagcaaaaaaccaataaacgttaaaaataagtaaggttcttgtttatgaattttttgtttcaaaagctgaagcaacacaagaagtaaaaagctaaaatataagcaaaaaccaatcatacccgtctctgataaaatttctaaaaacgtgttatgaacgtacagcgcttcgccgtaataaaacaagttgtactctgaaaagttaaaagcgccaattccagcaaacggatgagatgaaaaaaactcaaatgcccggctccacagcgaaaaccttccgcttcctccgtcatgtaaaaaatcatcggctcgttcggttaaaatggtgaacacgttaaaattcgtcataaaatgggcaataaaagcaagtacaccaaataaaaacacaaacgaaagaacggttttgagactattaagcgaacgagtaataagcaagtacaaaatcaacacagccaccatagcgattaatcccccacgggaaaacgttaaaacgcttgttaatgtgctaagtaaaagcccgactttatttttagcactatagctattggttaaaaagtaagtgaaaaacagcgtattataaaatacgtaaatattaggatcatccagcacgccaatcaaacgcggatagctgcggtcaatcatcacgccccatttaataatttctacatccgatgcaaattgaaaatgaaccgcttgaagacccgcaatgtaaagcagtaaactcacgccgttaaaaagaatgccagctccggttaacgcacgtttgatgctgccgctatgaaattctgctatcacatatttcattaaaaagtagcaagcaaggataagcaaaacgcctagcataatacgaagactcgcttctgggtacagagaaaacgctccggtcatacagtaaaaaagataaaataaaagcagcaacacttcatacgcctggagcttatagacgtaaaaagaagcaaagctaagcagcagaagtgcaaacaaaaaaatcatgtacggctttaatgaaaagccaatattgacgttatatttacttagtgttacaagaacaaaaaggcaaaacaaaacggtcggttttcgattttgtatatatacactatccattttgtgcctcctttctgttctctacgtttactggtttgtttttttgcaggtagcctaatgcttgatttctaatctctttatctagcaacgttaacaaaaacactagaagcatgtttacgcacagcgcaataaacgggtgctgtgaaaatagcagcgtggtaaatacaattgtactgccaaataagaacacaaaaatcggaaaggttttacgcatgatgatcagtctttctggattacataaccagcagccaataaataaaattccttcaattaaaagcgcagcgtatacggctcccattacagaataagcagagcttaaaaagtagtaaaaaacaattcccgatacaacagcaactagctgaacgcccgttcttcttccttgaagtccttttgttgttaagccgtctgctaacgctacgcttaaaccctggaaaatcagcatcagcgacagccactttaacgcatctccggccgcagcccatttatccccaaacaataaagacacggcaagatcggataaatgataaaaaggaagagccgttagcatccctactaaactcataagcttcacttgcagaatgtttaattctaaatgtttgtctgtctgctgatgattgtagtgtcgaaataacactggataaaaagcacctgccacaattcccggaacttgatacagtgccgatggaatgcggtacgcaactgcaaacacgccgacggctgcaagtgaaattgtattttctaatacgattggtccaagctgcggcagcagcataatcagcagtccgcttacaataaatgagccgatattttttagtagcccgcgttgaattttcttttttaaattaaacgatactcttttccccaccatcctcagtccgtacactcctgctagaagataagaaaagccaaacaaaaacgaaataaaaaatgggcttgtatgcatcagcattccaaccgtcagcagaaccaccagcaaaagagctgaatagatccgaatcgctcctaagtgatgcatttgttcagtaagctgaaaatacgtaatcccgatgctttgcatcgcaagtcctgttaccatcggtataatcaagtagtacatcatctttacaagtgatgcttcgtgataaaacaaggaaatcactatatacgcccctgcaaatgtagcaagcaaaagtaaaattctcatcttcacatacgatgacaaaagatgattcacgtccgcttgttttttagacccttcgcgaagcaccgtgttgcttaagccaacgtcggtaaagtagcctaatatcatcgcaaaagctaacgctacgctgaacctgccgtaactagctgcgcttaaatactgtgccagtacgataagcgcagctgcatttaacaaacgtgatacaaccgtgctaataaataagtgaacaatgtttttccaaatggagtttttcttcatacatccctcttactccatcgttttagcaaattgctgagctagcgtttcatgataatagtcatacgttttggctaatcctttttcaagcgtaaaagcaggtgaccacttcaataatttgatgctttctttattgcacagcctgctgtctgcaatatcaccttcacgcacgctgtgataagcaggtgttaagtgactgtcggatatgcttttcattgtgaaaaaaagttcgttaatgctgatgctgctattattggaaatattaaacgtgccgcacccttcatactgaatggcttgtaagcacgcctggctcacgtcttccacgtaaataaagtctcttgtttgacggccgcttccgtaaataatgggctgctggttcgtaataaaccggtcaaaaaagattgagattacgccgccttcaccctgtgaattttgccgcgggccatatacgttgctgtagcgaagaatgacgtagtcaatatcatatagctgcttggcaagcttcaaatattcttcagacgtaaactttgacagtccgtatggtgaagctggactcgttggatgagtaagcgaaattggagtaacgttcgtatttccgtacacggccgctgatgaagcaaaaatgattttttcagctccgtgctttttgcatgcattaataatgttgatcgttccttgaatattaacattggcatcatgatgaaaattagtaacggaatgagccacgcttacttgagccgcttggtgaacaacataatgaggtttaaactcggcaaatactttatctaattcttcactcacaatatctccatagtgaaaagaaatgcctcgattttctaagtttgctatttttcccgttgagagattgtcgattacctttacttcaaatccgttttgataaagaagctctgccatatgtgatccaataaaaccgcatccgcctgtaactaatactcttttcatgttatccctctcctatcttgatccgtctcctgttacaatgactcttagcgtttttatcataatcttcacgtcaaaccgtatattcgtatgttgaatgtagtaaagatcgagctccagcttttctgctggcgttagctcatatcctccgttaatttgtgcccagcctgtcagacccggcttaacggcaagccgctggctaaatgcaggaagtgtttcttggaattcttctataaatacggctctttcaggtcgtggcccaacaatcgacatatcgccttttaacacattccatagctgaggcagctcatcaattcgcgtttggcgaatcagctttcctactttggtgacccggctgtcatttttaacggcccactgcgctccgtttttttcagcatcactgtacatcgaacgcagcttcatgatggtaaatgctctgccgctttgacccaaacgctcttgaagaaagaaaggtgaacccggtgtttcaatcatcacaatgagcgcaaacagcaaaataacaggcagcaaaaccacaagagccacaaacgaaatcacaatatcaaccatgcgtttacacagcgagtaaaaaagcggaaattccttttttagcacatcggaatcactagtcgttttcgagacaatttgattcatcgtttcacttccttccatataaagtgatgagctagtgagatggactccaaataacgcctagcacatgaatacgcgctttctccagcatatttttcgttttaacaacggcatccattttcgttttacgttcttccacaacaagcatggtggcatcacattttgctgcaagaatatgagaatccgtctcctctaaaaactgaggcgtttcaaaaagaatcaaatcgtattcttctttccacctttttatgagctcatcaaaatacttggatacaagtagtgtggatgcgtttcgaaagtgagatccggccggaagcacgtccagtcctttgtatgaagtttgtttaatcggtaaatgacggcttttcctgtttactaacacatccgttaacccttctgaactaccaagatcaaagagctgatgaagagaaggacaatgtacgtttccgtcaataagaagaacgttttttccttgttcggcaaatgaaatacctaactttgctgttataagcggctttttatcgttcacttccgctgatgtaattgtcaggcatttggcttcactattcagcagaacctcaacattttttcgaatcatatttgtttggttaatcgttttggcatcttgatacagtgaaaatggatactttcttcgtttaaaactcaaggttctccctcctagtctttggctgatcactgccttgcttttggtttcgcttcatttttcgaggctccagctcgatatgtccaataatcggaagtccgataagttcttgaatatcttgttcatttcgaactgtgctatcaagatattctcttagcatcgctcccgctattcctaccaacagactgactaagatagtaatagctgcaaccggcagcggctttggaaatactttaaggctctgagacggctcagttaatacttgaatgttgcttcctttcattaacttcatcgcttgatcttttgaaagaagagctactttatttgcgatttcacttactgttttcgaattctcgtttcttacggtaatcgttacaaattgagaattttcgttatgatcaatcgtaatttgttcactcagctttttgttagaaatagttaactttaattcgtcttttacaccgtttatgattatcggacttttaataaaatcgatatacgaagaaattaattgggtattcagctgcgtaatattagcaatttcatctacattcttagatgttgcttgattaacaagcacttgagtagatgcttgatacgtaggctttagtagatagaaacaaatggttgtgatgctcatactcgtaattactatgactaaaagcatcgtaagccatcttctttttaaaattcgaaaaaaatcctttagctgaattttatcctgcatcgtaaacttacctccatacgctttatctctctgttacttacgactcactgctccgccgaaaacaactttgtttcttgtcaggaatttccctaatctgctggaaggcttttcaacaaaataatacgtgacggaagccatcgccagtgataaaaggaaacaaatgcttaaaatgctccaatacggcaaaagcccgtgtaacaaatacatagctgaaaacagcacgatgagatgagttaaatataagctgtacgaaatcttacctaaaaacgacagcactcctgtgcgtaaaacctttgaagctgccggcgatgctaaagcgataataatgaacatacagctccctagcatcactgccagattgcggcataaaaagttattggtgatcgcgtaatttcccataatgccttcagataaataacaggtaaatgcaatcagaacgacaagactctttttaaatgtgctaattttcagataaagttgaataaaaaaatctcgatatttcgccgtaactgcacccgcggcgaataaaagcaaataatgataagaaagcaagaagttcgtaggttctaagtttgatttattaagtagtaatagcgctgatgatgaaacaaacacgaaaaacaatagcatcacgattttttttgcgtccattcgcagcaaaagaatcattaaaagaggaaaaataattgaaattctcatttcatgaacaagcgaccaaataacattgttgtatgcgtctgtgttaaatgtaccaattaaaaagaaatgctgaagaagtaaacttggcgactcgtttgtgatccatgagttattaaaccagtggcttaactgtgagatcccgccttgactaaataagactttgcatagaatagccacacacaccgcaaacaagtaaggaagataaattcggcaaattcttcttacaagatagttctcatatcgaaaagaagaacgtccataaaacggcagtgctaaaacaaatccgcttaagacaaaaaacaaaacaactgattcatttccactgctaaacaatagccgcagcggactttcttttaccatggacagtaaaaaagaagaattaccgtcatacctatactcactgaagcttggataaatcatgagataatgatttatcacaacaaaaagagctgctaatcctcttaaagaatcaagttctacatatcttttttccatgtaatctcctatcctaatgtaataaataatgttatctctttatcgcacaaggatcatttcatatagcgctagcgtactatacaaaacgttcactatagcgaataaaaaagtgataaatcgacaaatattcttaataaagaacaatttgtaagtgaagtatagcataatatacccgtatcaagaataggtattttaacctattttattctttataaagaacaaaatattatttattttatatttttatgtacacaagatgcacaaacatgcgttataatgaacaaaaaacctataagaagaggatgaactgaatgtgataggagaaaagattaagaatttgcgactaaaaaaaggctattctattacacgcttggctgaagaagccaatatttcaaaatcgtatttgtctcatttagaaaaagggttaaataataatccttctcttcaaatgcttgataaaattgcgtcttctcttcacacaacgattgatgaattaattgagggagacatcagctgtccagctctgacttcaaagccagccctcgatctagagtggcttcatttaattgaacgagccattcaagacggcatgaccaaaaaagaatttattgaatttcagtattatttaaagttccgtaaaacaaactgataggtccattcacgaacgtttaatttttttgttacaatcgacctatttcgacatcttttacaaatattattttgtaaaataactgtatactaagaacactattacaaattatccagataagggcaaaactattgaaaaatagtgacgcaaagcttcaggtctaaggccgctttcggctacgatagctgggttccctggcaaagggtggatgaatcgtaatgaaaaaagaacatgtactgtcaatcgatcaagagtgggtaagtcttatggaagcagctcgcacgctgggactgactatcgaagaagtccggaaatttttatcggagcttaagcggaactaactgtaaaaagcacgctctaatctgagcgtgctttttacagttaatattattcttctaaaagaaagtaaaacacactcctattaaatgcgaattccttttggcttgcgttgatcaaacgtataaatctccgtaaatccgcactgttttaccatttcaactgcttctttcatatgtgctcctacggtttcggcaaagtgtgaatcagatccaattgttaagatttgtccgcctaaatcgcggtacagcccaacaacttcaagtgccggcaatgtttcgcccagcttccctctcatacctgaagtgttaatttcaattccaatattgcgatcaattgcttttttcaaaatatccgccagaatatctttgaattgatgaaagtcgtaaatgccatattgctcaaacgcatagcgcttcattaaatctaaatgtgccaacacgtcaatgtccgcttcacttactagcttatacatttcattaaaataagcgcggtaaattgcttctttatcgttcagctccaaatgtttacgaagcttgatgttattaatgttatgcaccgaccctaatataaaatcaaagttctcttgcttcatcgtttcttgatacttctcttttaaatagtgcggctcgcaaatttcaattccttttttaatcactagctgatcttgaaactgatctctgcattccgctagttctcgttcgtatttatcaaaatccatatgaccgtacgttggcgctaatggatttaatgaaaagtgctcggtaaaacaaatttcgtttatgccgttttttacagcttgttcacaaacttctttcatgactgcctgtgagtcaaatgaattatttgtgtgatgatggtagtctactagatacataatttagtcacctctcatttcattatacatctctcttgctttccctgcacatagagaccctttatgccgcctatcctgcctttattcgtccataaaaagaatttccactaaaaaaagacgtttttcctcttccagtatcccttgttttcttataaactaacttaatatagcagatgttctgacatacaacttgacaaacaacttttacttacaaaagagaaaggaaagaagaaatgcagattgaaaaaagttttgctcaaacaaaaagcccctttctgtcttacttaagctcttatgcgaaaaagatgaaaggagaactaaaagaagaaccaaaaatcaattatagagatgcagttgtttcttctatcggaggcttaattgcgattattatcagcagcgcgattgcactagcgcttggttatccaatggcacttgctccgattggcgcaagctgcgtgcttgtctttggggcccataaaggtcctttatcacagccgcgtcacgtacttggaggacacttgctcgcaacggtttcagcacttattatttggagtttatttcatcgaagcctaatcactatagcgattgtgcttgcttttgttcttattttaatgattcttacaaaaaccgttcaccctcctgctgcagctagcgcaattgtagctattaatactcaagcaggctggggatatttaggtattattatgatttgtgcatgtgtggttgtattgatttctaccgtgtataataatttatttcaagaccggcagtatcctaggtattgggtttgatataaaaaaagacgtcttctcgtagaagacgtcttttttatgtgtttttgcttactacactatgtgttttgctgtttcagggttcatttagcagctcttattttacttcagttgaactaataagctggtaaacccctagacttccatcagataactcttttactttatgaatactgttaaattttttgtatttaacagatccgtctccgtacgaaatatcatactcttctgttgtatatactttatacatcgaatcatcaagttttgttactctatttacgttaaagcttaataaattttctgttattccttttttgattaagtaagctgtatactctttttgttccttgtattttggtccgttagaatcgatatacggctctgcaatagagaagtctccgctgttaattgatgaaattgtagcatccatatattgttcaataaaactagacacttcgctagtagatactccagaatcagcttttgaatcttggtcatccgactgttcttccttagaaggagctgatgcttctgccgtattttcttcgtcaaaattaagcgcaatatcttctattccttttttgattgatacttcttccgttttcttttctccagaatcaaatttacgttttgcatatacttttacagaaccatccattggcagtggacctagataatcaatatcgccaatttctgtttttgtatctttgccattaacgaacagggtcgcgtcatcataatctgaagaaacgtataccgcatgacctgaccaatcaaactccacgttcacatcttctccgttggcggcttcaatctcttgttcactttcaacttttccataatcattttgaacttctccttttacggtgtgcgtaccaggtaaaaatggaccaatctttttagatgaatcactgcttactgttccagcttttttcccgtcaatatataccactgtcgcatcttctgtagactgaacttttgcatatacaggatttacttgtaccgtgtaatgatcaaagattccccatttctttccgtcttgttctagcttagcatatgaagagtggtcttcgcttgggactcccgcttcaagcgctatgctatctgccgctaatccttcagagattgatttcattacatccggattttcgtgtaaatatgtaataaatgattttgtttgctcatcgttggcttctaattgaatttgaccatcatttaaatatttttttacttcattaacatcattgccctttactgaagcaatgaatttttctgatactgctttaggagccatcattgttttatcaattccataacaagtcccgccaagtatagcagctgctgctatcactgaaatcgcaataacctttgtttttttatttgaaggttttaccgagtctctgccctcctctactgaaggtgatgcaggttctacgtaacgctgtgattgtgctccttcactagaagccgctctcctttcaacaggatgtccacactctggacaaaattcatgctcatttgttaactgatgtccacactctttacaatagcccaatttctacactccttttttataatggtatgaaaaagcatcgctgtacacgatgctttctgttgacttaaaatagatcattccattcagtgctgtttcccattcttgtaataatggttttggcttcttctcctaagccattcgcaatgaatgtcagcacaatcgtaattactacatacacaataagagtgctatagatacgatctagtccatttgctccgctttgcttgaagctagcaattgtaaatggaaccacaaggaaaatactcaacaaaccaaaattcataaaataagagaagtattcaacatgtagaaatgcaagcacaagcccaattaaaagcagagctgttggaataattaaaaacgtgccaaagcgcgagaaaaattctttaaaggaaacgtctacctttccaaactttgctgcaacatatgttgctccaataataaccgcgagtccaataaaaataaaaatcccttgcttaaagacaaaatcggtaaaattgaagtggatgatgctgttgatatctgtagcttttatcaaatcagcgcctgtattaaaatcctccatgtcagatggagccagctcttcactgataataggaagcttgaacatgctccgaacaaattgaatcaacaatagcttccagcctacatacagcataataggtatactaagagcataaagaatgactgtaataagagcattaacaaattggctttcacctgctgcttgcgctgtagctgtcggatttttaattccttctgcaaaataactaaaaaatgattttgacacctttttcgcctgacgaacacgctgattaggttgttgaggctcatacgctgcttgcggctgaggttgaggctgaggttgaggctgatattcagatgctgctgccgtctggcttacagctgcctcttcttgtaatttatgaccgcatttcacgcaaaactttccgccatcattaaaatggccgcaatttgaacaattcaaatgctccttcctccttcaatatattgtttaaaatatagttatatagatttacctatatgtaatctatataattctatattcataacttttagcattatacaccatttttggtatttcaggagaggtgttttcagcagattagcttaaaaagtttctccttaaacttcttcgcggaattctttcttttatttctacatgcatgttgcatataaaccttccttttatgcttttagttcaccaataaaactattttatgctttaactatcttgttttaattttcagaattgtttatactcaaaacatctttgtttttttagaaaagcaatggaggtgaatttacagcacgatttatacatactggagggggatttttttatgttgaaattaattggggttttgttagtggcagtgggatttttatttcgtctaaacacactgcttgtggtgactgttgcaggcatcgtgaccggccttgtatcaggcttatcgctccacgaagtgattacgatgtttggacagttctttgtagataaccgttatatgtctatggctattttacttactcttcctatcttcggcgtgttagaaaaatacgggttaaaagaacaagcagaagtgctgattaaaaaagccaaaaacgcctcttctggaaatgttttacttatatatctttttatccgtgaaatctcagccgcagttggcttaaatatcggaggacatgctcaatccgtgcgcccgttagtggcacctatgtctgaaggtgcagctcgtgcaaaatacggagagcttcctcctaaagtaaaagaagatattcgtgctcatgcagcggcagctgaaaatacgggatggtttttcggagaagatatctttatcgcaacgggtggaattctcttaatgaaagggttctttgattctgtaggcattcacgttgacgtgtgggatatggcgctttggggaattccgacagccatctcagcgctgctgatcagtgccattcgtttccgtcagttagaccgacgtattcacaaaaaaatgacgaagcacaaatcaacatcatcttcaaagacggaggcgagctaaatgaaaagtatcctgacgcttgacacgatttactacttactcggtattattgtcgcttttatcgcgattcgaatcgcacgtgaccctaaccatcctaaccgtttaggatcttctttattttgggcgctgttttccattacgtttttatttggcaacgtgattccgcctttttatgtaggatgtttagtcattatcatggtgctgcttgcttcatttaaccgcgtgactaaatcgaatgaagcagaaacacctgctgaagaacgagtggctcatgcgcaaagattaaaaaataaaatctttttaccggctttatttattcctatttttacgattatcggtactcttctttttggaaaaattaaatttggaaactgggcgttaattgacccggaaaaagtcacgttaatttcactggcaatcgctgctgtcattgcgtttatcgcttcaataggcgtcactaaagcgaaaatggacgtacctgttaaagaaggaagccgcttgcttcaagcggtcggctgggcggtgattttaccgcaaatgctcgcagcgcttggcggcatcttttcaaaatcaggcgttggaacagtagtctcagatattgtaagtgacgtactaccgactaactacgcgtttgttgctgtgcttgcttactgcctcgggatgctgctatttacgattgtcatgggaaatgcgtttgcggcgtttgccgttattacgggaggtattggacttccactgattgtacatatgcacggcggaaatccggcgattatggcagctcttggcatgtttgctggctactgcggaacgcttcttacgccaatggcagccaactttaatatcgtacctgccatgctgcttgaattaaaagacaaaaacgccgtgattaaagcacaggttccgattgcgctatccgtttttgttgttaacacattattgatgtactaccttgtatatcacttttaaaggagactagtagaatgacaactgtattactaaccggttttgaaccatttgaaggtgaaagtattaacccgtctttagaagcggtaaaagctttagacggtgtaggtgttgaagactatcacattattgctaagcctcttcctactgtgtttggcgaatcaatcgcaaagcttcatacgtatatagaagaaatcagcccttctatcgtcatttgcgttggacaagcaggcggccgagaaggaattacggtcgaacgggttgccattaacgtagacgacgcccgaatccctgacaacattggccagcagcccattgaccgccctattatcgaaaacggtcctgccgcatacttttcgacactgccaatcaaagcagctgtcgaaaatctgcgccaatcaggcattccaagcagcgtctcacaaaccgctggaacctttgtctgcaaccacgtattttacgggctcatgaacatgattcaaaactgttgtattaaaggcggatttgttcatattccttttcttcctgaacaagccgtgaatcattcagggaaagcgagtatgccattggatttgattgtgcaaggaattctttctatcgtaaaaactaccattgtaactgaagatgatattttagtttcaggtggagctactcattaatattaaaaactagttcagatggagaactggtttttctttttatatccgcaaatttttcattaaataaatcaataaaagctataaacaaccttctctctcagtcgatatatagtatgaacatattttcaaaagatgttcaattacttttatcccgcctaaagacgggacacttcttgtatacaaggatgtaaaccgagaagtaaaaccattatacggaggtaaggaaaatgagaattaatcacaacattacagctttaaacacgtaccgtcagtacaacacagctaacaatgcacaagcaaaatctatggagaaattatcttcaggtcagcgtattaatagtgcagctgatgacgcagcaggtcttgcaatttctgagaaaatgcgcgggcagattcgcggattggatcaggcttctcgtaatgctcaagatggagtatcaatgatccaaactggtgaaggtgcattaaacgaaacgcactctattttacaacgcgttcgtgaattggctgttcaatcaagtagtgatactaatactgcagatgatagagctgaaattcaaaaagaagtgacagatctaataagtgaagtagatagaattgctactgatacagaatttaatactcaaaaattattagatggtacaggtggagatgctggaaagttcacttttcagatcggggcgaataaagatcaaaaaattgatgtaacgtttgctaaaatggactcaactagtttaggggttaacgctattgatttaagtgcagatgccgctacatctactgctgcaattgatacaatcgataaagcaattaaaagtgtttcagatgaacgtgctcaacttggtgctaaacaaaaccgtttggatcacacgattaacaacctaagcacatcatcagaaaatctgacagctgcggaatcacgtatccgtgacgtagattatgctttagctgcttaagcagcaacaagcacagtcgtcctagctggtaacggctagcgagtataattgggtggattgctggaaacccctgagagcttttcttaccacagcgtagttggaaacaacaggcgtaacggtttgaaaaaagaaaagattgggcaatcagcagctaagctcctgtgaggaaactctggagaaagttcaacgactaagatagaccgtctaaggcagcctgctatgacgatgaaatctgtaggataaaaatatgctgttccgcttatttatatctgaagtgcccaacccctactttttagagggtgaagatatagtctggtcatttgtgaaagcaagtgttcgcacgatggcgaaagaaatgatggaacaaacaaagaattcaattctatctcaagcttctcaagctatgttaagtcaagctaatcaacagccgcaaaacgtacttcaattgttacgttaattggtattttaaaagagtcttcgttatgaagactcttttttgtcatgtgatttcatttatttcttcctaacatattaacgctattaattgcttgaataacctcacctcaacaaaagctttccttctcagcaaacttccaaaaccttttctgacagtttacaacgttatctaccgcttcgaataaagcaggtggtgtttttctttgcggcaaaacgtgcggatctttccagttcacatctacaccggttagtccttcaataactcccatggtggcgataggaagatatgctaagttatatcctccttcttgtgctacaatgagccttccctcgcaatatgcttctgctaattctcgcattttgtttgccatgtatttgaatccttctctcgttaccattaaacgagaaataggatctaatgcatttgcatcttgccccgctgatattatgataagctcaggctggaattgtttaataactgttgtaatgatggattcaaatacatatcgatagccttcatctccagtcagggaaggcacaggtatatttacattatatccttccccttttccttgtccggcttcatatatctgaccggattctaatggaaaataatcttcttcatgaatcgaaataacgagtacgtcgtcacgttcataaaagatgtcttgcgttccgttaccgtgatgaacatcccaatctaagatgacgactctttttaacccgtaatgttcaattgcataagcagcgcctacagctacgttgttataaaaacaaaagcccattgcttggtctgaagacgcatgatgccctggcggacgtatttgagcatagactttttttgtcgtttcactttctattacggtatctactgctttcatgacggcacctgcggatagcctcgcgatatgttctgtttcagaagatgcgtaagcttcaggtccaatttcccttattcctgctttacatgcttcttgaatacgctggatatggtcgttagtatgaactcgaagtaaatcttcatccattgcttcataaggtgattgtctaactaagtgatgtgctaaaccgcttttttcaatcatttctttgatcacggtcattcgatgtttgttttcaaactcgtcacaaggctctattatttctccaccttcaaatacatactgaatcttgccggtgtcatggcgtaaaaaacgttcatcccaaatccagcttgttttatgtaccattctgtttggctcctttctttttatactagaaattaagcttatacatttgaaggcgtgcggaatgcttctttttttaataataattcatacgtatctggtcttctgtcacgcataaactgaagcaaattacgtgttgaatcaatttcttttaagtcaacttcttgaatcaaaattccttcttcatccgttaaagattgtagaatttctcccattggattgcttacaaagcttcctccgtaaaagatcatctctttttccgttcctacccggttcaccgcagccacaaaaacaccatttgaaataccatgtgctgaaatagctttctcccatgccggacgagttgaaagttcaggatgatcaggctctgaaccgatcgcagaaggataaaatagaatatccgctccttgcagcgctaaaattcgcgctacttctgggaaccactcatcccagcaaattcctactccgattgttccatattgcgtttcatatacaggatatcctgtatttccgggaacaaaataatatttttcgtgatagttcggcccgtcaggaatgtggttctttcttgtaattcctaagcaagttccgtctgcgtcgaatacggctgcactattaaaataaacgcctctagcggctttttcataaaaaggcacgattaatacaacttgcaggtctgctgcaaggtctgccatttcgtttaatacggagctctctgctggtatagccagctcatatcctgccggtgaaacactttgagggaagtactgagcgttaaatagttcttgtagacaaataatttgagctccattcgctgcggcttctttaatttttgtgaacgtgtagttaatattagcttcaacgctttcttcacacttaacttgaataagaccaacttttactgtttctttcattttaacctctccttttatgttagaaatttcagataattattaacgtacattatcaagatatatgttcggttttgagctggtttggctctgttttttcatcaaaagtaaattggggcggtgcttttgtaaaaaatgacgtcttgtatactagataaataaagcctataacaacccaaacaatccctaacgaaatagattttatatctaagcttgtccatagccaaattgtaaagcctgctccaataatgggactgattaaataacggcatgtgcctttaacatctctttgttttccgcggagataatagtgaaagataacagagatatttacaaatgtaaatgcaataagcgctccaaaattgataaaggaagcagctgtaacgacgtccattgcaagtgcacttaatgaaagtactccaataaaaataacgtttcgcgatggtgttttatatttgggatgtatatatgcaaacagtcttttaggcagcattgattctctgcccattgcataaagcagccgtgaagcactggcgtgtgaagaaattcctgatgcaatcgttgaagtaataattccggcaagaaagacggatgagaagagtgttcctccaatataagctgctatttcaaacgaagctgaatctacaactttaaatgaatggtagtttgggtaaacaagctgggtaatgtacgaaacgagtataaaaagtattcctcctataaatgctacaagaaaaatcgcttttggtacatttttctttggatcaactgtttcttcagaaagtgtagtcacagcatcaaacccaaggaaagataaacaaagaattgaagctcctgcaagaacaaaagaaaaagaatcctctgagccgaaaagctgtaaagaagaaaagaacaaaagatcactttctccttctatcattttcttaatcgataagataacaaatagagctgttacaagaaattgaaaaagaacaagtattccattcacttttgctgtcatttgaataccaaacacgtttatacaagtaataataacaataaaaagtagaatccaaagagacgatggaatagacggaaacgcagctgataaaaaagttcccgctaacaaaaaattaatcattggtaaaaaaagataatctaaaagcacagaccagccgacaataaatcctaggtgaggacttatagatttttgagtatacgtataggcagagcctgacaaaggatattctttagccatatgtccgtagctgtatgcggtaaatagcatcgctgcaagagcaagagcatatgctatagaaaccatgccatgcgtagtttgagctacaactccatatgtagtaaaaaccgtcattggagccatatatgcaaggcctaaaatgacaagtgatcgaagcgttagcgtacgaacaaatgtagtacttggcttactttccatcctgtttcctccattcaactaatataattctcgtacacgcccccttctattttgatgcacataaatgaatgactatcattcatttatgtttaatgtaataaaaattcataaacagcaacaagaataatgaatgactatcattcattattcttctattataatcgataactttttctttgtcttcacttttgtcagaattttcaacatattacacttaactatatattccgttttataacctccaaaggctatcatttatcaccaatcaccctcacaccacgtctattaacaattctatagagctaatagcttagcatcaatcacggaccttccgctttgccactttaatgaacataaataaaactgtgtacatcattaacagctttcctattttacttttatcgaattttgtcaaatcttttttagggtaattcaacctgtttttatggtaaaatctaaaaaaaggtattcgttatatagcatcattatggatatttcgttctttaaaagaaacgaaggtagtgaacttaacttgttcagttaaaggcaaaccagtcgaaaggctgggacgcaaaacttcaggtctaaggtcctaggactaggatagctgggtttcctgatacatcagggggtaaaggaaaacatgaacaatcagcgtgtcgttactggaagtattggagcttcgtatatgaggccgcgcattgtggcatttattccggcgcacaatgaagagaaaacaattcgcgactgcttggcaggattaggcgatccgcttcttccgaataatgtggggcttgatgtatttaaaacatgacttattttctagaggttcttttcaaaccgctgcttttctacttcttttctcgcctctttttactcgtttgtttcagcaaagcgtatgggcgtatataatggtttcttctatcatcgttctttttaatttcatcaccgagtgtattctagtaaaaagaatcagtgctgttccgaagaactacactgcttttttccaaacgatttgtctgcccgtgaacatacttctgctatgtttcttctactatgttacgtaaaaaagcatctatcgatttgatagatgctttttgatattatgactttttcaaaaggctcgatacatgcttggctacaatcgctccttgacctgccgaagagctgatactagaaaacaagggagtcgtgcacgcgtctccaattgcgtaaatagatgagttgctgctttgatgcacttcattgatgacgatgagcccgctttgtgtagtggtgactttttctttaataagttcaatattgggcgctacgcctagtctaatcagcactgcgtctactgataggttcttacattcactgcttttacttttcaaatcgatcgatgtgacgtgatgctttccgtggatagccgtcacttcggtatctgtcatcactttaacactaggattggaaagaactttttcaacgtattgctctcttgctttaaaatgcgtagagcgatgaatcaaatatacttcttttgcttgtgatgctaaaagatgtgctccttcaaaagcccggtctcctccgccaatgagagcaacccttttaccttttaaccgttctccgtccgctgaagctgaatatacttctcctcggtccatcatttgctgctcacccggcactccgagctttcgctgactagagcccgttgctaaaataagatacgtatagccaatttccttttctatttcttgctgcttcacttttactgttttagaacgttcgtcaatggaaattacttttgtattcgcttcatataagcagtccatatcgataaaatgctgaaccattttacgctgcatctcgattccattttccgcttgtattccgggataatcaataatctcattataaatcgtaaacagctgtccgcctaactgtgcctgttcttcaagaagcaagcactcaacgcctagccttttacaccacacggctgcagagataccagcgggtcctccgccaataatcagtacgtcaacatgttgcatacagctcacctcgcttctgcttctcagcttatatggctttttgtttctttacatttggcgatgtaaaagagataaaaattctcctcgaacctctggtttttccataaacgttcctcgaacggatgaagtggctgtagaagctgaagattttttaattcctcttccgcacatgcacatatgctttgcttcaataatcaccataactcctttcggctctaacacttcttcgattgcatctgcaatttcatttgttaaacgttcttgaacttgaaatctctttgcatatccttctaccgtacgagcgattttagatagacctgtaatttttttatccggtatatacccaacatgagcaacgccaaagaacggcgcaaagtgatgttcacacattgagtgaaattcaatgtctcgtattaacactaattcattgtgattcacgtcgaatgttttttccaaatgagctttcggatcttctcggtagccttccgtgtattccaaaaatgcctttaacacgcggtacggcgtctcttcaaggccgtctctttccggattatctccgcataaatcaatcagttctttcaccgcattcataaatgtgtcagcttgaccgatttttttatctatttcagtcgaatttgttcctaatgtttctaaaaatttttgagcaattaaattttgtgtactaagtgccatctttttatgtcctcttcccttttcttagtaagtttattttcaaatgatggttttgcttcagctatttaaaaacgctgcttcaaaatcttctgcagcaagaggcttgctaaacaagtatccctgcatatgaacacagccatttttcattaaaaatgctttttgatattcttcttctacaccttctgcgattacctgcaactttaagctttgagataagctgataatcgcctgcgcaatttcactgttgctgtaatcttcttgaatatcctggataaaagaccggtcgattttcaaacaatcgattggtaatttttttaaataacttaatgaagaatatccggttccaaaatcatcgatagaaattgatataccatatttcttcaatagatgtaaagctttaatcgtttcttccgcgttcataagcaatgtactttccgtaatttccatttcaaaccatgtgggatcaaatctatggagcgaaagaaattgctgtatttcattaaccaacacaatcggatcttgaaattgccgcggagaaaagttgaccgctagcgtcattttttcatttagctccttgttccatttgctgacttgaaaacaagctttcttcatgacaacttcccatagagactgaatcaaaccagcttcttctgctataggaataaatgcttccggagaaacaaacccaagctctgcgtcattccagcgaactaatgcttctacgccggttattacattgcgctttgcttctattttcggctgatagtaaacgtcaatgtcacctttttgaatcgcttttcgcaagcgcgtttcgatctgaactttttcagcttgtttttgatttaacgaatcattataaatacttactttactgccgccttgtctttttgaagcatacatggcgacatctgcatacgtaataagcgtgtccaaattcgtagagtgctccggataaaagcttaacccgctgctgatactgacaaaaacttcatcattgtcaatgtagcagggctgttgaacatacgcaatgatcttctcggtgatacgttcaacttcttccggtgtaaaatcactgaataaaataacaaactcgtctcctccttgccttgtaagaaagctgttagcaggaggcagacattctttaatacggttagctatcagctgtataagccgatctccttttgaatgccctagcgtgtcattaatatctttaaaccggtctatatccataaataacacggctacgtgacgaatggacttttccttcgactcaattaagcgtctgtttaattcttctttaaaatatcttctgttcggcaatcctgtcaaaaagtcgtggtacgcatgatactcactttcttcctgacttttctttaaatcgtctacatatgtttttaaaaagtgagaaaggtggttgatatttgccacaagtcctcccagctcatcttttcttcttgtattcagcaccttgccgaaattgcctttggcgatttgatttacgtgctgcataatatgtttaattggccgcgtaatggatgcagagaagacaaagctgataataaggacaataaagataaacggaagagacagcagtaaatgtttgattaattcttgctgcagctctttttcaataagtccgtagtcatacactacgcctattacgtaagctggagagtttttttctttaatcggtaccagtgtttttaatacttttttatggttaatttcagcagtatagctttgtgattttcccgtttttaaggccttttgaatggactttttgtcacgttcagtatttcgataggtgtatgtaccgtaccaaatcggctgatcttttattctaatatatttattgccgttcaaatatacgttttgatttctttttccgaaatttttcgggttaaaagccgttagttcaagaacgccttcaagattttccgtaaaacggttcatcacgttcgtagggccaaaccttttttcaaaatccaagacgtgccgatcacgaaaataaggatcaataatataattagtagacccgtcgtaataataaccccatttgtcaatgtgattagggttactggaagctacttcaatcggaccgctccaatagtgaggtaaagtcaatccttttggtgtcgtgaccggctgctgagaaagaagctgctgaaaagatgtataccagtagccccactctttggtagacatattgatttccttaggatcagaagattttacgcctataatatcaccttctacgggtgctaataatgtaatatgagataccatcagttttttagccaactgttttaactcgtcattgctgatatcatggtaatcagcaggcaaagactgttgaatcgcaatcgaagccgttcgtaattcctgtgccatccgatcttccatataggaagcactatttttagaattttcgacttcgtacgcaatttcttctgttaccagcgttatttccctttggttaaactctgttaatctattttttgatcgaatgtagtgcaaagtgttattcgctagtagaatacacaataccagcaaagtaaagaatacggacaactttttctttatcgacactagtgatggcctcctgttttaaagacctgatccgacaggtttaaaccctgttcatgtgctctagctttacatcggatgatcttctttaatttccataaagaaagaatgaactcatacaaaaaaccaaccgttttggttggctctattcttaactaattataaaacatattcgatacatacttttatttacatgggtagagcaaatttgtattactataatattttaacttcttttgtcaaaatatcaatgcgtaaaatttaactttctttatccctgctgctactttttaaacttcttcaaaattcggtgataccaatagattccgactcccgttaataaaataatgaggccccactgatgcggtaaaaacttcagcagccatatggacattataatagtcgctaccgttaagttactcagccactgttctcggcttagctttttcttattcacgatcaccgccacgtagccaataggcggtgcaaaaaaacacagcagcatcagaaatttttctgaacgatgccaaggctgttttttcattttttctcactttttcgatttaaaataaactgatagccaaacgtcacaatgatccctgtccaaaacatcgaaagcgacgatactaactcagcaccattataggcatacatcaatgtattcacaaacagcaggagcaaaagtatataaaaacctgccgacacagctttattccaattttgatgctcccgcttagaggcatcctcaaaaaacttcatagaaactccccttttacattcaacacatcttattcatttaggaattctatctttatgttagcatattgggtagttttggaaaacagatagaggaagcttctttggaatataagattgggaaaaattatcttgagattccctcaacaataactatagaactaaaaaaagataataaatgtaaataaataattctttttaactactattttacacacaaaacgtccaaattagtatacaataatctcaaaatatgtttttaaaggagataaaaggatgacagctactcataatcagctaacaaacgcttttcaccgtacaccgcatgaccaaaacacatttcattttttggatgaaaaagtaacgattcttgtttcaggtgaagatacaaacggagcttacgctgtggcacacgtagtgaaaccagcaaaccaaggtccaccgcttcacctacacgaacgtgaagacgaaacgttttacgtaaagcgcggatcaatgattttctacgtaggagaggaaattattgaagcaaaagcaggtgactatgtttttgctcctagaggtattcagcaccgctttgtgaccggaccagaagtaaccgaatttatccttactgcttctccagcaggctttgattcattcgttaaagaactgggtacttcggttccagaaaatgctcctctgccgcaagtgggaccgcctactgaagaagaaattataggtttagttaccgtctctaaaaaatacggcattacctaccctgaaattgaacaagcactgaataaaaaataaaccatttacataaagatctgctttttaccgagcagatcttttttctattttaatttcaatttgcttatggaatggtttaacatatccttgtccacactatacttatctgttttttcatagatacgaggaaagcctattgaacgtagaaagcaagcgaccgcaaacggatgtacgttttccatgccaagacttgacctgaaacgcgtttcatactttattctgtatttattctcatcagccggcgtgacacgaacggtggcgttacggctgatatgttatccaaaaaaatccggtatgttcaccggatttttttatatgcttacatattcatttcttttttatacaccaagtacgaatacagataaggaattgccacgcacagaacgatactaccccacatgataactgacttatatccatcaggtaaaaaagcgctaataagaattagcagtccgccgataaaaaagatctttccagataaacgatgcgtctttttccatacggtttcattgcttagcgtccatggtgtacgaatccccataaaatagttcgagcgcacgcgctgcaaatagtttccgataatgataaaaacgagtccagccataattggagcaatgtacgacatcggcacgttatagccaagcccctgtaaaatagtgctcatatttacaaaaaagaataatagcagtacggcgtttaacacgatgttatacgtttttgaaaagtacttataattttctttacgcgggtcaattcgcggaacaaatgcgatgataaaataaataagtaccatgattcctactgttaagatcattgcatttatcttcgttgcaaatccgtctgcttctccatttgctccccagtggatgggcatcgtagctggaagatgcggcagtgcaactagccatgcaaccagtgttaaaagggtaatgcttaaaggaaatacgtgctttttcatttaactctctcctttctgaaagctgaaaaaccagccgattaaatcttgaaaaacggttgtatttaacgaataaatcacaaactgccctcttttttcatcttgaacgaggtccgcttgcttcaagatttttaaatgatttgagatgcttggtttggtcatattaaaatactcggaaatttctcctgcggttaaatcccgctctttcagcagctctaaaatctttctgcgagtaggatccgctaaggctttaaacgtttcattcaattgaagttcatctccatcatatttaagtatttagataattaactaaatactaaactatgaaatatactatgtcaatatcttgaaaagagaacacctgcatttgactcatttttttgttgcttcaaagcagtccatgcatacaaactgcgcttcttgatgtagaaaagctttaatttcggtcatgcctcttttacttggatacttcatccgcatccatacttcttcattcggctgaatttctttttgacaaacataacatcgctcttttattccaaacatactatcccttccatttccttatctaattatacgttgcactagtaaaaaggtttcataaaaagaggataggacataacgaaacccatccaatctacagacatgaaacctgcgttcactctaccaataaaaaatccgaacgatttatcgttcggatttttttcacctaacatacttgtgtcctagcaccttttaaacattatagcggcgttacgtcttcctgctgcttttgctgtattctttgctttttcgattttctgaaatgaagcagttcatacacaaccggaatgactacaagggtaagaagagtcgcaacggctaatcctccaattacaacgactgctagactttgagaaacaaggcttccgctttcgctttgtttaaataacagcggcagcatcgcacaaatcgtagcagcagacgtcatgacaattggacgcatacgcgtagcggctgcttcgacaatggcatcgcgcataatcattttcttttcatttttcttcacgcggtctaatagtacaatggcattcgttacaacgataccaatcagcatcagtgctcctaacaaagccgttacgtctactggaatacggctgattaataatcctaaaacggcaccaatcgctgcaagcggaagcgaaaataaaatcgcaaacggcgtgcggaccgttttaaacgtaatcaccataattaaaaatacaataccaatcgacacaagcattgtaatgaacaagtcagagaaatcttctccttgctgcgtgcttgctccgccgattacaacgtcaacatcttttgaaatcgacagtcctttattcttaccgtctccaaaaattgttgtttgaatgtctttattaatctctgaaagcttttctggattgacatccgctgttacttgtatatacgggtctccatttttatgaaactgatttgtcggcttttcagcttgcgttagtgaagccacttttgaaacaggcgacggtcctgtctctgtcataatagaaatatcttttaactcttgagacgatgttggatttaggacagattcaagaaatacgtttgcttgttttccttctacatccactgttccaatcggcgttttgttcagcataacgccaagctgctgcgctacttgctgcgtattcgcttttgttggatctacatctaaagagtaaatggttttcttttcatcttggttggtagaaactttgtctactccttttatatcgctaatttctttcttgatgctgcttgccgtcttttctaatttgttcatgtcgtttccaattacatcaacggtaatggaagtagtggcagctcccattagtgaagcagcactgacgctaaggtcccctccgtcatagagtttcttttgattttgaattcggttcatcagcgaatcaatgttttcactgtcttttactataatcgtatacgtagcttcagtaggcgagccaacgtctccccactttgctccttcgtctgtattaccaagctgcatatatacatctttcacttctttttgagctaaaatatagcgttcaagctgcagtgatttttcttctacggttttaattggcgtattatttggatagcttaacgtcgtgcctacaaagtcagatgaagagttatccaccgctcctttaggcatcatcgtgtacgcgccaatggatccgacaaataaaagcagcgaaagcagcagcacaacccatttatgattaagcgaccacgtaatgacctttgtaaaacgaacgggctgtttgtgcttgcgaagtttttcattttttaatagtcccgcactcattaacggtacaacggtaagtgccacgattaatgaagacagcagcgaatacgtcagcgttaaggcgaacggaagcataaagtcttgaagacctccgtttacaagaccgattggtaaaaagacggccactgtcgttaacgtagaagcagtaatagcagagcctacttcttttgtcgcatcaataatcaagccaagcgaaaacttttctttttgcattttccgaaagatattttcaataacaacgatgctatcatctaccagtcttccaatcgctaccgctactcctccaagcgttaaaatattgagcgtgacgcctgatttggataataaaaaaagcgtaaagcaaagcgatagcggaatggatacaattgtgataaacgtagagcgaacgctgcgtaaaaacagcatgatgacaacggtcgcaaaaagtgcgcctagcaacacttctttcatcatggaatgaacagagttttgtacgctgtcccctgttgcaaaaaatacagaagcattcacattattatagtctttgttaatttgctgagacagttgttttacttcttttgtaatgctcacggcgtttgagtgactgtcttttgtcacaataagtaaaagtgcatcttttccgttaatatgcgtcacgacgccttcaggctttttcacttctacttttgcaaggtcgcccagtattacatttggtgcaaccggcagctttttcactttgtccaagctgtcaattttacctgttacgttgatgttgctcgacttgttattaatgactttttctccaactgcaagcgacgtgttttttccttctaacacgctgatgactttatcaatagtcacgttcttttgtgacaattttttattatcaactttaatagacacgtaggaatccgctgttccatacgtttgaacacttgcaatgcctttaacgtctttatatttagggatcagttttttctctgcaagatccagattgtctcttgttaatccttctttaaatgtgagtgaaatatctgcgatgggaatcatagaggtatttaattgaataacattaggctttgatacgctggctggaagctgcaccgaagacagcgcttcttggacgtttgtttttgcttctttcatatccgttttagattcaaatgaaatatcgattttggaatagccgtctcccgtcgtcgaatacacgttgctttttcctttaacaccggctaccgcttcttcaatcggtgacgtaacttgtttttccatggattctgcatccgttccttgccccataaccactactgacacctgaggctgatcagcggtcggcaggaattccatcggaagtgtaaaataactaatgactcctaaagctaaaattaaaatagacataatggtgatagccgctttgtttttaaacgaccatttggtaagccatgacatgaaatttcccctttcactttttcgtacgaactcagtcaaacatttctaaaatatgctaaataactactaaattatacctaatgttccttaccatttaaagacttatttttgtaaaaagtcccattatttgaatgaaatcgtttatgtatatgcttttggttatataatcagtctctttacagcacaaaaaaaagacgccgatacccggcgtcccacatgtagtaagtgaaagaagaagaagaatatgcctacgatttctcaggcaattctatgaccttatttggtttcttcccgtttttttatgaaataaacatatttagcataaattccctcaactagcagctcggctgtgctttgattccgtatcattttgaatttttaaggaagttaataaagccacgatgcttcctgcaaagccaaataaaaacaagtgatgaatgcctgccatgaagcttccgcctgaagtcagcaacgcacccataatggtaacgccgattgctgttcccatgtttctgcaaaacataaaaaatgacgttgaaatacctctttcatgtcctcctactaattgctgtacaccaatgactccaaccgtagaaagcagaccaaacgatagtccttgtacaatcatgacgcaaaacacataaaagaaaccgtgactttcatttagcataagcagaagtgttcccgagccaaccagcagcacatttccaattaacaaaagctttctgtagccatgttttaaaatccatttacccgccggcacggacacagacatccatccgaccgctgttcctaacagggccactccgctcataaacagtgacaaatgcgctacctgctgtaaaaataacggaatgtagcttgacgtaccgaataaagccactgtcccaataaacgcattgatattaatccatgacagcgttttgttttggaacatagacagcggcacaatcggagaagcatgttttcgttcatgcagataaaaaatgactaataaaaaaagtcccgctactgtatagacaattcgattctgttccactaccgtaacaagcagcagtgacgtaacgcccgctccaaacaaaatggcaccgatgtaatccacttttgctcttttcggctcatagctttcttgatatggcattaacgtcaaaaatgagacgatacataccggtaaattaataaagaaaatccatctccacgttaaataatccacaaaaaaagcgcctaaaagcggagctaacacagctgataatccccacatcgttgtaaacagcgcctgaattttccctcgtttctctacgggaaataagtctccggcaataatagcgggaaacgccaccataaacccggcacctattccttgaaccgcacggaaaagaacaagctgaatcatcgtatttgccacgccacaaagcatcgaaccaattaaaaaagcaataattccaaacccaaatacttttttgcggccaaataaatccgataatctccccgctactggagataaaatcgtacttgcaatcatgtacgaagcaaacgaccacgcgtacaaatcaaatcttccaagctcttttgcaataacgggcatcgtcgtattcataatcgttgaatcaagcgaagccactagcattgccagcacaatactaaccattacggacgttctgcttttcatttgacaatctccttatctatataatctgagcatttagtttactcctgcttgatagatgttgtctagatttgtgcataaaaaagcagataaaaagctgaactatagctttttatctgcttttttgacaaggccagctaaccccctgattgtcagcaatgtaaaactaacacttgcaaatgtatgaaagatggtccactttttccatttaaacagattgctatttctctctaaataccactggctgatactcatcggaacgctccacatcaagctttttagtaagattgcaggaagcttgtcttcataagattgtctaacccaaaccatacttagcaaaggaaaaaacagcagatcatataaaatattagttgaaaaaatgcgaggatacggccgaacaggatatttgattcgattcgtgtttacagcataagcatcaataagcgtggctaaaatcccttttgcaaaaaagacaatcagcatttctttaaatttcggtttttttacaacaaaaggaaacagaactgtacataacacagttagcccttttagcagtgttcgttccatttgcaacactcttttctttgtgaatatccattagtatgtacgattactgcctaaaataataagctggaatataaaaagcttctcaccgtaaaggagaagcttttcttttcttattttacatcttcgcttaccggctcttggtcagacagttctttgtttcgagccataaccgcaaatccagccatcacgatgatgctgcttgaaatgccgtataggattggcgtggtagaagaaagtccttcaattaatagacctccaagtactactagcgtactgacaacaatcgctgaaactcctgcttttggatgaatgtctttccaaaatagcgacacaacaaacggaacaaaaatcgctcctgataaaatggcatacgcaacgtctagagcgacaagcacgtcttgaatccaaagagcaaaaataatagcaagcacgccaacaataagcgtatttacgcgcgttaaaattaaataatttttctctgaaatatttttaagccacacttttttaataatatcattactaatcagtgtagaagacgcaagcagcgttcctgaagcagttgacatcagcgccgaacaaacgcccgctagtacgagacctaataacccttgaggcaggatttgaattgcaagcgtcgcaaatatgctttgactgctttctgcgtttggcagcagcaaatacgcacacattccaattacacttccggcaatcgcgtaggcaatgctgtacacgcctgcaaaaatggagccgtttcgcgcaattttttctgttcgcgccgtgaatacccgctgccaaatatcttgagatactgccataccaagcgtatacagaaggaaatactgaaaaatttgactgtatccaatggatgaaaaatcaaaataagatgatggtaaatctcctgtaagtgctttgagccctcctgcttctgatacactcattggaagcataaacccaaaaatcgccaccgtcatcacaacaaactgaataatatcagtgaccgttacgctccacatgccgcctaaaatcgtatagaacagaacaaccgaaccgccaattaacatcgatgccgtcatgttccatccaagcaacgcatgaatgatcgttcccattccaatcacttgagtgacagataccatgagcgtataaatagcggcaacaacggcgctgataatttgcgcttgagcgttatatctttttcctagcagttcgctgatagtagttactttcaaagacgaaatccgcttgataaaaatcgtgccaagcgtaatgattccaagtcctatcatcgtcacgaaccaaatgccagacagtccgtgttcatagccaagctgagccgttccaatcgttgacgctccgcctaaaataacggcagacaaacaccctaaatacatgaacatccctaagtttcgcccggctaaaataaaatcttctgatgactttgcttttaacgagccaataataccagctacaaccaatacgccaaaatagacaaacataaccgtcatatccagtccgttcataacagattcctccttattatgggttaatctatctttcattgaaacaaagagcttcctaaagctttagatcacgtgaagacttgtgatttctgtcaatgcttcgtctaacacgcgaagcccggcatcaatttcttcttttgtaatcgttaaaggaggaatcattcgaatcacttctccgctatttccgcaaaggtaaaacagcacccctttttccaaacatttgtctaaaatctcaagaagaaggcttccgtcaccttgctttgttttcggattaataatttcaattccaatcattagccctactgaacgaatgcttccgataacttcatgcttcgcttttaaatgctgaagctgatccgctgcatatttccccattgcttttgagttttcaatcagcttttcttcttttaatacgtccagcgtcgcaagtgctgctgaacaagcaatgggattgcctccaaaagttgttccgtgtgtaccaatcggccacttttccattagctgtttggaagctacggtagcacttaacggaagtcctgatgctatgccttttgcgatggccataatgtcaggcgtcacgtcaaacgtttgagctgcaaaccactcgccggtgcgtccaaagccggtttgcacttcgtcaaaaataagcagaatgccgtgtctgtcacacacttctcttattttttgcagccacgctttcggagggatcacgtagccgccttctccaagaaccggctctacaatcatgcacgctacttcttccggcgtgacttgatgcttaaacaaagtgtcaaaatctctttccagcttttccacgcagtagatttccggatcttctccttttggacactgagtcacgtctgcataaggcacttgatacgttaagcccgatggctgaagaaatttccggtatttgctttttgatgtcgtcacactaagcgctccgagagaacggccgtgaaagcagcctgtaaacgaaaccgtataaggtctttgcgtaacgtactttgccagttttaacgctccttcaattgcttcggttccgctgttggcaaagaaaaagcagtccaatcctcttggcaatactgtttttaattcttcggcaagctgtaaaatagattcgtacataatcacacctgacgggccgtgcataagatggtcaacgctattcttaagcgcttgtacaactttagggtgacgatgacccgtattcgctgttgcaatacctgatgtaaaatctaaatacgtttttccgtccgctccgtagtagtagcagccttctgcttttaccacgggtaaattagggtgatcttttgccatgcttggtgctagtaaatccggtagactgttcattaactgtgtaagtgatgcctgcgtcatctgacttcctcctcgcaatctatcaagtaatgtgtttgtacttgttttacatgcaaagagcgtgccaaagacgttaaaaaacggaatgtttttttaattttcttacaactgaaggctgactgattccaagtgcttcacctatttctgttgtcgttttatactgtttttttgcttttactaatatctctttttccagctcatttaacgcatcgttaagcttcatttccccatgttcttcaacgtgttgaatccgttttcttctatgcagagaatgcggcaaatgctccattgtaatcagcgtttgtgaagacacaaccacggcgtgttcaatcacattgattaactctcgtacgtttcctttccactcgtgggcaagcagtgcgtgaataaccgcattatcaaacgttctttttcggttatatttcttttcaaactgctcggcaaaatgtgtgagcagcggaaaaatatcttcagagcgctcgttcaaagatggaattgtaatcggtacgacgcttaaacgaaaatataaatcttctcgaaattctttttcagctacggctttttctaaatctttattcgttgctgcaattaagcgaaaatccacggttttaggctttcttcctccaacggaataaaactgtttttcttgaatgagctttaagattttcacttgatgcgccggtgacagttctccgacttcatctaaaaaaagcgtacctccatctgctaattcgaccagtcccactttcccatttttagatgcaccggtgaaagcacccgcttcgtagccaaacagttcagcctcaaataaatgatctggaatcgccccgcagttcacttcaataaacggccctttgcttcttgtacttttgttatgtatcagcttggctaagtgcgtttttcctactcctgactgccctaaaagtaaaatatttacgtctacattcgaaacgtgaacagccgtacgaagaacgtgctgcatcttttcgctgttgcatacaattccttctgttgatagattttggttccgcagcagcataagctcgctctttacgcgctgcatttcgccttccatcgcatcaagatatgttttcatttccataagctccgtcacatcatgagaatagctgacgattcttttaatctctcctttttcatctttgacaggaatgcctgtaacgagcacttgcttgccttgtttagttgtttgtacaagcgtaattttcttctttgtttcaagcacaattggcgtgacgattggcgtaaacaacccttgtttttcaagctcataaacagactttcccagcagtttttcagcttttacatcgtaaatgtttcccgttccttcatgtattcggacaatgatgcctttttcatccgtgacaagcaaatcatcttttaatgaatgaaggatccactgattttcattccattctgaattcatgtatgctccccgctttctattcatttttgaataaaatacaattcgtttttgaataacggcatttatttttgaataatcaatttattatatcacgaggacttctttttattttgaaacagcaattgaaatgaagttaaaaatgcattaatatatttttatgaagttataacttctctttttctaggaggctatatgaatcaatcatttcaagaattaattaaacataaattctctgacctttctcgcggtcaaaaaaaagtggcggagtttctcgtcaattttatggaaaaaggctcgctgtacacagctgggcaaattggcaaagaagcaggtgtcagtgaaacaactgttattcgtctagcttacgcacttgggttaaatggtttttccgatttgcaggagctaatgcgaaaagaatggctttcttctgccgaatcaaaagaagcagctagcaagcctgcagctgattctgcagcggaagaaaagaaaccttttagtgaatggctttcccccgttgacgaaaaggaattatctcaagcagtagatgcgcttatcaaaagtgatcaagtgtatattgcgggtttccgcgaatctcatacggcagcttactggctgtattataaaatgaatcagcttcgcaatcatgttcttttatcttttccaacaggatttttgcttgaaacgctatgcaatcttactagtgaatctgctgttgttgtattttcactgccgcggtatacaaaagaagcgcttgaagtagctcagcaggctaaaaaacaaggagcgaaagtaattgctattacagaccgccgtttgtctccggtaggtcaaatcgctgatatcacgcttttagccggaacaaccgaacatattttatcgcttcttgccctatctcaaattgtaattagcagcatgcaaaaaagagaggaaaaaacggctggaaaacgacaagaacacttggaaaagctctatgctgagcaaggcatctttttagaatagataatagaaaggaagtaaacaaatgactgaagccttaacgattcgttcacttacaacaaccactgaactagaagacgtacgtgcattagaaagccgcgtctggggagaagaagaagcaacgcccgttcatcaaaccttaaccgctgttaaaaacggaggtcttgtgctcggtgcgtttttagatgaaaagctgattggctttcaatatagttttccagggtttgacggaacgtgcgtctacttatgttctcatatattagcagttgaccctgcctatcgcagcatgggtatcggtgctaagctcaagcatgcgcagcgccaggaaagtaaaaaaaagggctattcatatatcagctggacgtatgatcctctagaaagcgccaatgggtatttaaatattggaaagcttggagccgtttgttctacatatattgaaaactgctatggagacatgaacgacccgttaaatgccgacttgccttcggatcgctttgttgtagaatgggcatccgcagaggatacaaaacgagctcagcctctttatacgccagatcaaataatggacgcatcgcttactcaatggacgttaacggataaaggatttccttctgttacagatattgataaaaaattgttggatcataacgtcgtgtctgtagctattccttctgcttttcagcaaatgaaagaagtctctccttctcttgcattggactggcggatacgtacaagacacgtatttcaaacgtgttttgcaaaaggatttgaagtaacaggcttcatgaagtatccagaaagcagcgcacccgttcatttttatattttaatgaaaaaagaggtgcaaaaatgaacataaaacacgtcattttaaggcatttaaaaatggatttacttcatccgtttaccacaagtctcggaaaagaagtggatcgagattttattttagtagaaattcaagacgaagacggacgttccggctgggctgaatccgtagcgtgcgcggatcctttttataaagaagaaacgctcaaaacaaactggcacattatggaggattttttaattcccttgcttcaacagaaagaaattcagcatcctgacgaagtatctcaacgctttgctcatattcgaggcaattacatggcaaaagcggcgttagaaggcgcagtttgggatttgtatgcgcgcaggcaaaacctctctctatctaaagcgctaggaggcagtaaaagtcaaattgaagtcggtctcagcgttggcattcagcctacgtttgacgaaacgcttcgaaaaattgaagccggcttgaatgaaggatataagcggatcaaaattaaaattaagccgggctgggatcttaacttgacgcgcgcggttcgaaacgggttcccttctattccgctgatggttgatgcgaactctgcttatacgcttgcagatgctgatcaccttgctcagcttgatgagtttgatttaatgatgattgaacagccgttggctcatgatgatttaattgatcacgctgaactgcaggcccgcatgcgcacgcccatttgcttagatgaaagcattcattcagctgaagacgttcgaaaagctattaaacttggaagcacacaagttgttaacattaaaattggacgagtaggcggactaacagaagccaaaaaaattcatgacctttgtcaaactcacggtgtgcccgtatggtgcggcggcatgctggaatcaggtatcggacgagcacataatattgccattaccacacttgctaattttaagcttcccggagatacggccgcatcatctaaatactggccgcgtgatatcgttcatccggaaatcacggtcgacaacggtattatttccgttcctgatacaccaggcatcggctatgaacctgatcacgatcagatacaagcgctaactttacacgaaaaagtctatacttgctaatcttaaacaggcgggaacaaaagtatgttagctgaaggaaaatccgaacgatgaatggttcggattttttttattgatatggtgagcgtaggtttcatgtatatagtggcttttatctgtggattggcgggcaagacgaagactcctgcgggacaagcggaaagcaaagtctggcatggaaatcaacagcgttttaaaaagcaatgccgactagctcctttatccaattgatttctctttagagtgaatgggtttagttatgtcccagcctctttttcataggctcctctcccgagatgatacgtgccttggcaagataaacaaacatattagcaaaaatggtcttatgcacaatccttctagtaataaatgaatataaatagagtgtaagggacatgcaagggtatattcattacaaattttagaagaaaggagcatactgatgaatattgaaattggaattgccattttcgtgtttacaatgacaatgctcgtcattttttggaggccaaacggcatcaacgaagcatggccggcatccataggagcagccattatcctgcttacaggcattgtatccaaatcagacattgttgatattttcggaaagataagcggcgcttctatcaccattattgccaccattgtcatggccgtcatattagaaagtttcggattcttccactgggcagctgcacggctagtgagtttatccaaaggctcagggtaccgattatattggtacattcaactgctttgctttttaatgactttactatttaataatgacggcagtattttaattaccactccaattttaattctacttttgaaaaaccttcagctaaaaccccaccagcagatcccctaccttttaagtggagcgcttattgctaccgcttccagcgcgcctataggtgtaagtaatattgtcaatttgattgccttaaaaattgttcatatgtcgctttatatgcacacggcgatgatgtttgtaccggcgacacttggtttattatttatgtcttggctcatgtatacggtcttaaaacgccatttgccaaaaaaactgccgcatgcttcaaaagatatagaagaaagtttctttacgaaacagtttcaccccttaaaaggaagcatttctgttgaaacaaagcgtaaacgcacacaatttatgctgaaagttttattatttgtgtttattatgcgctgtctcctatttgtcgcctcttatttcggcataccaatcgaattggttgctgtactgggctcactgatcctacttatttggagatggtatcacttacgtacaaacccgattgatattttaaagaaaacgccatggcacattttcgtttttgcattttcaatgtacgttattatttacggattgcataacgtaggattgacagagctacttgtaaaaatttgcgaaccaattgtgaatcgtgggctttttgaagcaagctttatcatgggaggacttgtttccattctctctaacttgtttaacaatcaccccgccctaatggttggaaccattaccttgactgaaatggggctcgatcccattactcttaaaaccatttatcttgctaatattattggaagtgatatgggctcgcttttattgccgattggaacactggcttctcttatttggatgcatattttaaaagaaaatcatatcaaggtaaaatggaaagattatttaaaagtatcacttatcgttatcccgcttaccaccatcgttacgcttttcctcctattctactgggttcagctcattttttcttaatactgatttacaggacggattgtactcttttgaagcttacagtccgtcagaaataaacaaatgtctctcataaaaacccactatatttttctattgttttttcatagatacacattcacctaataaaaacatttttttacattcactaattatttagaacaatttaaaaagaaaatcaataaatatattgaatcgaatttccttcatgtgataagatatggttatattgttactttaacaatacatagagcgaatgaattagaaaatatgcagttgcatagaactttctaaaccccacacgcaacatttagagagtgacattcattttctcagtaacacccatacctttctgaaaagagtgagtacattagacttgctctttttgtctttattactagcaaggtgcacttcttatgtaaggctttgttttgcaataagacaacaaaaaaacaggtaactaagcatgccgcttcttacctgtttttatatgctaaaatgataaaatcaaattctatcgcgcgaacgcccttcacgaaattgattttaattcttcaattaattgaaaaaatttctctttgtttctttcttctaatgtttgatcgacttcacgtaaaatttgatctcttctaaaatctcggatagccttatttaataccattttagcaaatatagaatcgaggatatccatacggatgggctgcgagtctgtcgggtgcttttcgatataaatcaactcctatcctttcctctattataacaaattctagcaatgtatcaaaatttcatcgggatatgtgctgttgtaaaatagctttgtattctgtttctagctcttgaagcgtaagctcatatagctgcttgtttccttttttataaacccctgcatccagcaataaatcaatcattgatgtttttttacattgtatgtgagagcaagcttgttttgtcatcgttacaccgcctattttacacttaaaaatgaaatgatttctctatctttcacgacctttctttatcatacggcccgtcctttagcttactgtgaagaaaatgttaaattcatgtaataatgcataaaaagaggccgggacataactaaatgaatccaacctaaagacgaacaaatgagatacatgagctgaaccgcttataacgctgcagttgatttccgtgcaaagcttcgctttccgcgggagtcttcgccttgcccttcaatcaactgctagtagggacgaaacagatgaagctgtattcaccataacaaaaaaaacgaaccactcatcaaacttgttgattaatggttcgtttttcccctgggctaaaatacttttctcccagcctcttagttcttctattaaaaatcaaaattatccggatctggacctactcggtgattttggtttaattcattaattttacttacgtcttcagcatccaattcaaaatcaaataaggatgaattttcaacaatacgatgttcttttgtcgattttggaatcgttacaactccgttttgcagatcccatcgcagaataatttgagcaactgatttaccgtgtttttcagcaatttcttttaacacatcgttatctagcaattctccttgcataagcggagaccatgcttctagctgaatatcgtgcttttgacaaaaagcatgcagctctttttgcgtcaaacgagggtgatactccacttggttaataacaggcttaacgtctgtatctttcattaagtcttctaaatgatgaatttgaaaattacttacgcccacagctcttactttttcttctttataaagcgtttctaatgctttccatgctgctttatacttaccttctaccggccagtgaattaagtatagatctaaatatgctaagccaagcttttgtaagcttgtttcgtaagcagccagcgtctcttcatagcctaaatctgcgttccaaacttttgatgtaacaaaaatgtctttgcgtgaaagacctgcttctttcagaccttggcgaattccttctcctacaccttcttcatttccataaatagctgccgtatcaatgctgcgatagcctttgacaatagctgttttcaccgcattcactaattcaggcccttcttctactttaaatacacctagtccaagccaaggcattttgactccgttgtgaagtgttactgtatcttgcaaatgattactcattataaaaaaccccctactaatttctttacatttgttattatgaaacagaaaaaaagaaaaagatagaacccactttaaagtaagttaggcacttcaaagttctaaggtaactttttagtaaccttctatcccacttaaaaatcactaaaaaaagaatcctccgcagagaattcttttttgtttttatttaacgtttatattgactgctgagcttgtatttccagctgcatcttttgccgtcacagccagctttacgcctgctttttgttttgggatagcgactttaaactgtcctttgccatctgctttgcctgatgcgatcagctttgtaccgcttttaatcgtaattacggcatttgcttctgtttttccagagataaaggtggacaaagacgtaacggcattcactgccggaggtgccggcggcgttgtgtcttgtacttttacaattttatacggactgtatcctactttattttgcagaactgccgtcacttctgttcctgctttttgggcaggaatttttacgctgaacttgccgtttccatcaatttttccactcgcaataatctttccgcctactttaatataaatagacgcatttttttctcctgttcccgttacggctgtacttttttcagtaagagtgttaacggttggaagcgctggttttgtctgcgcggcactgaccgttacaaacgcgttggagctgtagttattagctgcatcttttgcaataacccctaattttgtagaagcaggctgctttggaatggtgatgctgaacgttccatccgattttgtatttcctttgccaattacttttttgtcaattttcacatgcacttctgcgcccgcttctgtgcttcccgttactactgtatcttgattgcttacagcgtttacttttggtgtagggggtgctgttttatcctgcacggttacagttataactggacttacgcccgctgtgtttccagccgttacagacagtttgcttcctgctttttgttttgcaatcgagatgctgtatgttcctttggcatccgctttaccagctgcaagctgaagacttccgtttttaatgataaccgtcgcatttgcttctgctgtacccgtaacggctgtacttcgatcactcacttcattaactgtcggttttaccggagctttttgctttgctgtaacgattacagtcgatgcagagctgttatttcctgctgcatcttttgcttgtacgcttagctttgtattcgctttttgcagagaaatggcaacagaaaacgctccgtttgcacctgctttagccgttcccacagttgttgttcccacttttacagtaaccgtcgcatttgcttctgctgtacctgtaacttttgtatcttgatcacttactgcgtttacttttggcgcggctggtgccgttttatcctgtacggttaccgcagtggctgaacttgttccacctgcattttgagctgttacagacagcgtgcttcctgctttttgtttcgcaattgagatgctgtaatttcctttagcatctgcattgcctgctgcaagctgaagacttccgtttttaacgatgaccgtcgcatttgcttcagccgttcctttaagcattgcgtcttgatcacttactgcatttacttttggtgcaagcggtgcttttaacgtagatttaaccgcaaaagaaggagcttgactttcgtttcctgctttatcttttgcacttaccgctattgttgttccacctatttgtactggaattgaaacagtaaatgtaccgttaccatccgctactgcagagaacgttgcatcgcccgcttttaccgtcacggcggcgtttgcttctgttacgcctgttacggtcgtatcttggtcacttacttcatttacaattggaacagaaggcggcgtttgatccgttacggtcaccactgtggccgtgctttcattttcagctgcatctttagacgttaccgatacttttgtatctgctggctgcttggcaatcgtaattgcaaattttccagcttcgtcagcaagacccgttccaattacttcattttccacttttgcaataacagaagcatttggttctgtcacgcccgtaagcgatgtttggttgtctcctagtgtactaactgaaggtgcatcaggcgcaaccgtatctttcggtacttcttgctcctgctcttttcgcggatatttagttgtataaaaacttaaaagagtagttgttggataataaaaatctaaaatttcacgatagtcttttcctacgcttgccattttttgagcaccgtattgactcatcccaacaccgtgtccatttcctttaccattaaaagttgttgatgtgcttgtttcatttgtttccgttacaagcagactaagcattgcacggctgtttaacatcgattttagcttcgtcgatgttaagcctgttaattccaaatgatgaaccactagtttttgcgaactgtctacatctcctttaacgagatagtccactgtaatcgcacctttagtcacacggcttcctgatgaagcagcataaaaactcacctttggaatagacgtaattttaatcgttttaccaggatgcttattggctactaaccatgacttcaaattatccgtaacggttttatctttttcagaaaccgtattccaccaagcgctatagttagctaaatcttttcctgttaaatcaatttgcgttttttgaatagctaacgtccacggtgtctgcttgtcgtatggatcttctttcaccggaaaataagaaagctgagttcctccccaggcattgctgtttgattcggttcttccgccgttgcttgatgagaaaacggcgttgattaatttattgttgtacgttactacttgtccgaatgtctcatctactgctttgtttgtgctgtcataccacgtatagccgccgtatacttgatagcttaccgtgtcattgattacttttcctgcatagctcattgcgtatgttctcgctgctactgcctgagtttttaaggcttgcagattccaagatgtatagacttcatttggcacaacaccttttaaatagtcttcaatcggcagcgtattaacaggtctgacgtaagttcccttttcatttgtaaacgcaacgtcccctaagtactgtctgccgttaatagatactggatttttataaagagacggtgtaatttcaaagcttgtaaaatcacctaagacagtgcttccttgttttagagtgacaccttgagttgtggcggttaccgtatactctgtatttgcatttaagaccaaatccgagtttttaatagtgtataaataagacggcttaattgtaattgcatgctgatctcctaaatagtttactaattttacagacacaactggttctaccgtttcagctttcacgctagcaagcggcgtgaattgaaacagcagtacgcttagtactaaagctaatgccgttaactttctcatcttgttcccccattttcatgtactgtctaacgcattttaatatcactcgttatatcgacacagttttataaaaattaaagcattttacccagttttcttctttactcgtccattttttgtcgaaaaaaggcttttttatatcatatgaacgacaaaaaaaaacgtgtgacataaatcaattgatttagtcacacatttttataggtcttttcaccttttaatttgtcatttcttcatatgccgctataccatctgcaatatgattcatcagctttgtaagataagcctgatcagacaggtgccggtcttcttctggatttgtcatatacccgagctctactagcgttacgggtacagtcgaccagttaaaccccgaaagatcactgcgataacgaatgccgtctacttcgacaaactgatcttttttcacctctgtcaaaatagcttgagatgcctgcagactgttttgataaatagacttcgtataggaattatcttttgcaggagtgagcacagaaaatccttttacagaagcattttcagaaccatctgcatggatacgtacgtgcagatcagcttttgaattattcgcaagctccgctcgttcccggttgctgatatctacattatcaaaactccgagtaagctttacggttatgcctttttcttcgagcagctgttttaatatcatagaggcttccaacgtcagcttgtattccggcttcttggtcactacgcctgatgtgcctccggaaacctttaattttgtttctgctgatcccggtccgattggctctttctctaggttagcctgagattgatgaccagggtcaatgtagactaaaaaaggaggaggatccgctttttcagtcatgttgttttttacatttttcacttcattacctgcttcatgaggctgtactgcccggaactgtgagatggactgcttcactctttctccctgcgcatgagcttttggtacatttccgctaacgacggctttctctgtttgacctttcatcataaagaaaaatgagagtactgctactattgcaacaatacctattccataactccatactaagcgcttcatcttcgctcaccaaactttcgaatagagtgggatattccttatgttaaagtacaaaatgtgttaacgttattatctcatagaatatggatttttttgtataaaacgttaaaaaacaatatcggcaatacgttatgtatatgcaaacaaaaacaacactacataatgtagtgttgttttccaaaaaaatgacggatggttaaatccgttttgcaccaatataacgtgctttccagtagctgttgctaagagatgtaatcgtcacgcctttagacgtagaagcttgaagaaactgattatttcctaagtacacgcctacatgtgaaggaccttttttatacgtttgaaagaaaactaaatctcctttttgaagctttgcttttgaaacgcttgtccctactcgatacatttgttccgttgtgcgcggaagtgtttttccagcctttttgaaaatgtattgaataaatccagagcagtcaaaaccttttgttgttgtgcctccccatttataaggaacacccattaattttttaccagtagcaatagccgtgtctttgtatgaatatgacgctgcttctactgtttgagcaggtgcaataaacggactgcctccgctaaataagactgtcactgccgttatagacccaatgatggcttttttcattttcttcctccattatgtaaccgaacgttacgtttctatgaacttatttttcaatatgttcggtttaattataatgaaaaaagcctcaaaaactattacgctatgattaaataatgttacaaaatggttactgaggtatttttatcttccgatgtatatagaagagattgagacataccgaaatcaactcaactaaaaacaaacaaatgagataaatgatcgggtataaattacttgttacaccgctgttgatttccgtgcaagacttcactttccgcgggagtcttcgtattgccctccaatcaaccgctaaaagcaactacatacccgaaacctacgtttaccatcatcgtaaaaaatccgaacgagttggatcctccatcaagaatctccattcatcgttcggatttcccttcgattaaaacacttttgtccaacctctttttcttttacttttctttttgctgtttcaaaattaagtcctgtttcgctttagcatcatgatgctgcgctaactcacgtgaaaattcttcatttgcttgatcaggagcaatttttaactcttttggtgtttgaggcagtgaccctttgttgttatgtgatgatttgtgattatttgctcttcccatgttgtgacctccttgtatcaatcatttgtttttcatctttagttactattcccaattttttaaagcaaattcaaacgaaaaaagattgagacataactaaataaatctcatctaaagccgaataaattggatgaatgagctggtatggatcacttgttacacggccgttgatttccatacaaaatttcgctttccgcgggagtcttcgccttgttctccaatcaacaactagaagcaactgcacagataaaatctgcatcgacatgaaaaaaatccgaacgattattcgttcggatctttcttcaactaaaatacttttgtcctagactctttgttgttacgatactttttttgttacttcgttaatataagctttcttatgttcgtcgttaaattgtccttcccacttcgagatcacaatcgcgccaagtgagtttccaattacgtttaccgctgtacgtcccatatctaacaaacggtcgattccagcgataaatgcaagcccttctaccggaagtcctacagagccaagcgttgcaagcagtacaacaaacgacacgcccggaactcctgcaattcctttagatgtaaccattaaaattaatatcagtgaaatttgctgtgtgatgctcatatcaataccgtacatttgcgcgataaagatcgcagcaagcgcttgataaagagtagatccgtctaagttaaacgaatatcccgtcggaataacaaaagatgtaatcgctttaggacatccgaacttttccattttcgcaataatacgcggcaatactgtttctgaacttgcagttgaaaatgctaatagcaattcatcttttagcacttttaataagtggaagatgttaacgccagcccatttagctacaagtcctagtacaactaatacaaagaaaatcattgtgccgtaagcaacaattacaagcttactaagcggaatcagagacgctagtccaaattttgatacggttacaccgattaatgcaaatacgccaaacggtgcaaacttcataactaaattcgtcacccaaaacatcgcttctgccgtgccttcaaagaatcttaaaaccggcttgcctttttcaccgattgatgcaattccaagtccaaataggactgagaagaaaataattggcagcatgtcgcctgcagcaattgactcaaatacattcgttggaacgatgtgaacaaatgtttctacaaatcctttttgctctgtagcttctgccgttgatgtgtagctgctgatatctgatttttcaagaccgctgcggtccacaccagtaccagggtgaagcaagttagctgctaataagcctacaacaatggcaaccgttgtaatgatttcaaagtaaagaattgtttttccgcctaatttaccaagcttcttaatatcaccaacacccgcaacgcccacaatgatactagatataacaatcggcaccacgatcattttaattaaatgaatgaatacgtctccgattggctggagcacctcaactgctttaggatttccgtaaaaaatagcccctacaataatacctgcaatcaaaccaattagaatttgtcctgctaatccaagctttttgaacatatctttgcaccttccttcttttttctaacagctcgaagctgtttatttgcacttaatgtattcaagagatacaattccattaagaactgtttattaagtagttcttttattcataagattacattatcacaggcatcacaaaatctaacaaaaacctactgaaactaacaaaaagtttttagaaaattgcaaaatgaaaacgctatagtttttttactacagcgtttgtttgacttcataatagagcatttggataaatttttttacgtttatgcgactcggagtgctgctttttcccgtacctttttctatatctctcatgcgctgatgcaccattgaaaaatcgaaaaacttagaagcgtaattttcaaatttaggattaaagaagtcaaccatgccaagagaggtcaaatgatttaaagactgataaatggctcttcttactcgctgttcggctgctttcatttctttttgcagcacgtcttctgaaaaagatgaaccaagctttctcacggtaattttctcaaaaatttctttgagagaaggaaaatgctgttcatacatcgtgcttttttccgtttgatgcaagtaattgatgatttcaatcaaatctttacttccgctttctcctaaaatcccaagttctcttaaaagaaacctgcaggcttctgccggatcgctttcttttttaccaaaagaaggcgttttttgctggtttcctacattaagtacggtatttaacgattcttgaattttctccattgattgttgaacatgaattcgttcaattactttttgaatgaccatgagcacttccatacgattaagcggcttcgtgatatagtattcaatgccaagcgagtaggcttttccaatcaaatctttcgtttctacttgtgacatcataataattttccctttaaaactatcctttattttgcgcacggtttcgattccgtcttgaatcggcattaataaatcaataaataaaatatcgatctgctgcaataaagaaaattgatcatttaacacaatcccgtcttctgcttctcctataacctctcctagatcattatcttcaataatttcggctaacattgaacgaaagacttcgtcatcatctatgatataaaatcgcatattagtccttatcccccattaacgtagaaataggtaaatctatagcaaattgaacaccggggcttggagacagattaacaaattgaatattccctcccagctgctcggtcatttgcttaacgtagacaagcccaagacccgtagaaggcgtcccgtcctttgcatacttggatgtaaatcccgctttaaaaatgagacgttcatgcctttttttcactccgggaccgctgtctcttacatacaataaaatacggtcttcttctcgacatacgtcgataataatcgcgccttctttttcaatcgcttcgaccgcattcgttactaggttattaattaatgataaaaacaagtacacatgatagcgaggatgctctcctaaaatcgaatatgaaaaatgaatatcttttgttaacagcgccgcatatttttcattgctgcgcatgacgatttgaagcagactttcgatttccatatactcagaaaattcttcttttgtaatgaccttggacagtcctgctgatatccgctggttgtcttttttaatatcatgtacttctcctgcaatttgtaatgctttttggctaaattcgtgcagcgaagtaagctggtgaatatccgcttcgtgtagttcttcatataaatcatacgactttttcgtaatccgctcagcgtcctgcagcgtttttttcaaatgaatggattcctcatataaatttgaaagcacaacaagcagctgatcatttttttgagagatttgtcgttctctcagctgaccttcgtaaagtttgatcatgctaaacaggcataaaacaaagaaacttcgaaagacgcctacaataaaaatttgcatgaactccggaaacacaatctgatgatgaaccattacatacataaaaaacaattccattccgcctgaaaccgtttcgatgatgatgctccatatgccaataatccacggctttgaatgaaaatcgttaatcttaaaccaagaaaaagcaattgcataaacaagataataaacccctgctgagcaccggatctgcaaagaatgcagaaaatcaaatgattcgtagttataccagtcaaggtacatccgaaagcccactatagcactcgcaactaaaatacctggtattacaggagaaactcttcttaaaagcagcagtgaaaagaaaaaaataggcactgcaaagctaactctgtacgtatcatgaaaaggataatatttaagctctcctgctagcggcacaacgactatcatcaccagaatgagtaaaacatctttttttactaccgtatcaactttcatcgttcacttcctgcactttttgaacataagtatatagtttagcaatctaaaagacaatcgctcttctctatatttttttacattcctacttccatttataaatatagcccatatataaacagttatttattctctttcattattctctgtagttttttagattttcttgttttattttgtaatttttgttgtatagtagaagtaccttttaaaatgtgaggctgtatcacaactattcaattattattacatcacctgatagctacattaaaaaggaaaactattattttatagggggagcttattttacaatgtggatcattaccgtttactcgaaaaaccaaagtccgactatgtttgaatttgaatcagaggtagaggcgaaaaagacatttcaggagattaaagggtgtaagatcctatcggaagttatttactataacgaccgagttcccgctttagcgtaaatcagttgatgtaggaaattttacaaattattggttaaaagccacatgaagagccaaaggatgattctgttcctttggctctttgctgtttgatcaaaaaaatagcgcttcttatgcagaaacgctattttttttcgtgagcatactgactgcccacattactataaagttgacaagcagcgcaataaatccgacattgatatccttcatttgctgaggcagtgacggaaataacgtcccaatagtagacccgctgattgtaatataggctactacaataattccagcaacaatcccccatgctgctccttgtttcgttacaaagttatttttcttcaaactgaaaagcagagatggaaacagctgtgtcattagactatagcccattaaaataatggttgacagcgtcgttcctccatttagcgtaaagtaaacagaaataagggccacaatcggtacaaagcttttcgctaaaagagcaatacgcgcttcgcttgcttgaggagcaaacggtttgtatatgtttttagccagcagcgttgacgcactcattaacagcatcgaccccggcacaagcgctgtcagcaaacccgctcctcctataattccaataaaccaaggatcaaaggtttggattgagatccgtaatagcgcaagatctacgtctcctccgcttaaaccaggaacttttagaatagctgcaaatccaacaaaaaatacaaagagcagcatgagcgtataaagaggactaatgatagcatttttacgaaatacctttgcattttttgctgtatagcttgaactaaacacctgcggccacatataaaacccaagtactagtaaaataaccgtcgaaatgaaccatgagacgcttaagccttgctcaggaaattttaaaaaccctggcttcgccgtattcacagcctcaaacatcggaccgtatcctccgtaataatggaaaggtaaataaatacctaaaaacccaatgacagcaagcatcataatatctttaataacggccgtccatgcagaaccgtgaataccagatatcatcacatacagcgttaagctgatggctcccatccaaatggctgccggcatcgaaatagcgccgtatgatgcttgtgatacaataatccccaatccttttaactgcacaacaataacaggaatgacggcaatcactcctacagcagctacaagcacaccaagataagggcttttatatttgcttacaaaaaaatcaggctgcgaaacgagcttatgatctcttgcatacttccaaataacaggaagaagccagtatgataagacatatgataagctaatataaattaagacataaagtgcaggagctccttttccataagcccatccgcttccgcctagaaacgaaaacgttgtatagatttctccggccatcagcacaaacactaaaacagccccgaaaccgcgtccgcctaccgtccactgctccaagttcatatccttgcctttggttgatcgtatgccaagaaaaatagctgccactaaaaataataaaataataataagtgcactattcattcttcttccccttcccgatttctgggatcaagcttgtacataatccctaaaataatggacgtaagcaccacccatatcaccatccaaaacatattgaacggcataccgagaacaaacggagtcactcgattaacaaaagggagaaaacctaatatgcctacgaacggaaggacagacaaaatataaataaatttcatgactaaactcctccgactttctaaaactaacttctttatattaccacatattctgtgtattcaatgaaggaatgcttgcatttaagctgaaataatctccaaaaaataaaatattctgtaccgttttacaaaaatactgttttcatttttctgaataaatagtataatttcttcttatagttcgcaggaggtatcgtacagatgaaaacaatagagaaaatcagtacatttgcaggaaaaacatttacgctttgggttattttaatttccgttattgcctactcattcccagagcactttgtatggattggtaagtacattgttccacttttaggaattgtcatgtttggaatgggattaacgctgtcagcgtctgatttcagtgaggtatttcgaagaccgaaagaagtagcactaggcgtggtgggacattttatcattatgccgcttcttgcattcggtttggcgattggcttagatttaccaaaagaaatagcagtgggcgttattttagtaggctgctgtccaagcggcacatcatcaaacgtaatggtctttttggctcgaggaaacgttgcgctcgcagttgctatcgcttctgtttcaaccattttagcaccgattgttacaccgcttctcattttattatttgcaagcaagtgggtcgatattgatatcatgtctcttattatttccattatacaagttgtcatcattccgcttgcccttggatttacaatcaaaaagttttttggaaaagctgcagaagcaagttccaaagctcttccccttgtttcagtagtcgcgattgtcttgatcgtatctgccgttgtggcgggaagccaagcacagcttgctaaaacaggcggtatcatttttgccgtagttgttcttcacaacattcttggtttcacaatcggctttttctttgcccgcttatgcggaatggatctagccaaacaaaaagcagtggcaatggaagttggcatgcaaaactcagggctcggcgtaactattgcttctactcacttttcgccgctagccgctgtcccaagcgccatcttcagcgtctggcacaacatctcaggctcagtgctagcctttatcttcagcaaactaaaagacaaaaaccagccctcttctaacaaaaaaatggctggctaatacaataaaacttataagggagccataaaaaactccctggactcttctcccaaaggtcttaaaaagatcttaaaagcttttacctaggcgaatgccaccaaccccgaaaggggggtgtcattcgcttaggtatagaaaaaagagacatggcgctttttgccatgtctcttttttctacatcgattaaaaactattagcctcttcctgcttggaaagaagggtatttcgtcataccgccatctgcaaataatgtaatacctgttacatagcttgcttgtgatgaagctaagaatgctgcaactgctgctacttcttctggtttaccgatgtaacccattggaatcatgctttctacgtctgcacgttgttctggatctgcaaatttctctgcgttaattggtgtgttcatcgcacctggtccaatattatttacgcggataccttttggcgcatattcaagagccaatgtttccgtcattagtttcataccgcctttacttgctgcgtagtgaacaaataatggccaaggaatcatttcgtgaacgctagacatgttgataacatttcctttaatgtcgttttcaacgaagtatttaattgcttcacggcttcctaagaatgcacctgttaagtttgtatcaataactttgttccagttatctagagatagctcatgagaaggaactgggttttcaacaccagcgttgttaatcattacgtctaatgtaccaaattctttaatagctgtttgaacaagatttacaacgtcttcttcttttgttacatcgccttgaacgatgattgcttgtccgcctgcttcttctacttcttttttcgcatctagagcttcttcttcattgttgtaatagttaataacaacttttgcttcttcttgaccgaaacgaacagccattgcgcgtcctaaacctgttgatccacctgtaattacaactactttatcttttaaatctgtatacataataaaatcctcctagtgttttcatttattcatacatactatcattaacttttacgtaaacgttaacttttagccattccgaggaatacgccacctaaaatgatgagcacaataccaatcgtaatcgaaataagctgacgcttcgttttcttttctcctaataagaagataccgccaagcgttgaaataacaattcccatttgtgataatgagaagcttgttgcaacccctactttaggttgagaaataaataagaacatattaccagctgcccaaatcagccctggaataatgttgcgaattgcgtatttattaaacggtttgtgtttataagtaagtataagtcccccaattaacataccaatagcttgtgggaatagcgccgaccatccgtctacattaaataaacgagcgacaactacatacactaagtatccaattgttgaaataataagggtaataatcccctttttgaattgtccagattgctctgcatttttttcgctttctagtgatgttaacacaataccgataacaataaagataagagctaacacgcctaaaataacggttgtggttgttgaccattcgtgaaatacgataacaccaaacaatgatgtcgtcacaagctgcataccagttgaaattggcatggtttttgaaacaccaatataatcaatcgttttcaactgattactttgcccaactgcccaaaataatcctgaaacgattccgacaataaaaataagcggcgtcaatacgggatgaactacgaagtaaataacggctgaaaagatcagcgcaccaattgtagtcccaagcgtttgactgtaaggacctccgcccaatttaacgttgaacaggacaatacttccccaaaaaatcgcaggaagaatagccaaaaggatatccatttgatactaaccttctttctcaaactcttgatgtaattgtaaatttaaagtaccttttatttaactaggtaactttatgtaaccaatcttagaccttttttcttgatacgtcaataataatatgtcgattttgtgactttttttaaaaactttacaatacagcgtttccaagctactgaaagttttgaaaataaaaaaagatagccttttcattatccaaatgctagtatataataacattacagtggttacttttaatatcctatatacaataaagtaggtgacatcaatgaatgattttgatgatttatgtccaaaagtttggaaaacattcgatataataggaaaaagatggaatgggttgattatttatgtccttatgagcggacctaaacgatttagtgaaattcacagcagcattccttctttaagtaaacgaatgttaaccgaacgaatgaaagagctggaagaagaaggaattgtgatccggcacgttattcctgaacgtcccgttcgcattgaatatatcttaaccaagaaaggatcagagcttggtatgatcttagggcccgtcagtaagtgggcaaaaacatggataaaataaaaaagcctccagtgaggctttttttacgtttgatagaggatataattattttccccttctcttttccctttgtataacgcatcatctgcattttttaataataaagcagccgattccccgtcctctggataaatagacacgccgatggtagttgttgtgcgcaaacaatagccccgtacattccagctttgctgaagagatacatgaatccgcctagcaattcgttcaatttccagtccatttgttacgtttaaaataatgataaactcgtctccgctcaaacgataaatgcgatcgcctttccgtacacaacttttaatctcttcgtgtatgcttttagaaattcgtcgcctatatgatggccatattcatcgttaatctgcttaaaattatcagagtcgagaaacaaaagcgcaaaaaactcatcgctttttcgctgccctttttcaattactttgtttaactcttttaataacatcgcccggttgggaagacctgttaaactatcgtgagttgcttcaaaatgaagtttattttctagcgctttttgttcagtaatatcattatgaatggatacataatgagtaatatttccgtctatatcttttaacggcacaatggtttttgatacccagtatgaccgatgatgcttcgttcccatctcaagctgtcctcgccatacttttccgctttttattgtttcaagcagctcagcatgatcatgatgaagccctgcatctcgataatactcccctaataaatcttcttttttataacctgaatactgtacatacatatcatttacataggtaatagttccacttgcatttataatcataacgctagctgattcatcaagcgcatattttatattttcaagttctttcagcgtataagccagctgttcttctgcttctttttgaggggtaatatcgtgtaagatggcataggcgccaaccgtttgattatttactttaacaggaatggtggtaatatacacgtgctgtgtggaatcttgatttctatggaacgttaactcggtgctatggctgatttcttcatatacattccagcgtttgtaattacaggctcccagtcttttagcaatatctcggtaattttgatgcagcacatcgcttgcagaaagctgcagcgtttctaagaatgcgctgttgatatttaaaatcgtgccgtccaaattcagcatacaaaccgcgtggtggtggtttgtaaatagcgatttgtacccctgtttactttttatgagctccaattctaatcttttaatagctgtgatatctcggtaaatcactgaataggcgaccagttgattttgatagtcataaatcggtgaacagctgacagagacacacacgctttcgccgctttttgtgtacctgactgtttcataaggaggcagcgtcttgccattttttaattctgctattaatttaaggttttctttttcttctttctttgacacgatgttcatctcttgacggctttttcctataacttcttcttttctccactgaaatagcttttcaaatgcaccattgactgttaagatcttttcatcacaatcagcaattaaaatggcgtctaccgtgttttctagaaacgcatccagtaaacgtgtgctctcttcctgcgtttttttataatgaatttcttgagccatgacaaggacatgtgaaggggctgtcgcttgattaaaaagaggggtaaatgttacttcatatgcatgccggacgggctgaaaaagctgtatgtattgatattgaatcggttctttcatggcaacagctttttcacaaagtgtgtaaaaaagcagattttcttctttaattgattatcttgtcttccattttgtcaaagaattgctgagctgctttgttacattctttataatatagctgatgtctttcttgctggattaaaataacaggctgcggcatattcataaaataaaattggaatacccttcactatacatactaaatatcctccatctgcctttggaatttcactaaacgtcttgttttcatatgtaactcactatcccaaacaaacacgtctccttcattacttgaaatatttaacaacagcataaaatcacataattttataaaaattcaagacgtctatattgtgtatagatataactacctacttttatactgcgatagatcacttatttagtgaagtgaatggtttaagagtgcagcagcctttctcgcctgaataaactgcggtacttattataagttaagtaggaagagatcgactgcggcatgcccagcaaatagccctgagcagcatgtaggtttaacgaaatcgctgcagctaaatctttatctcgttccacgccttctaaaatgagattcgtatggggataatagttaacaagcaaatcaatcagatctttcttttgcttgcagtcagctagcccttcagcatagcttcggtccaatttcatatagtgaggctcatacatgcttacctgtctcatcgctgcggctcctgctccaaaatcatcaatcgcaattttgaatcctgcctctttcaaactcattattcgggcaaaaagagcaggcgattcccataaaatcttttcatgaagcgtttcatttaactcccatacaatgcgatgcttcgcgtttttataggtgttcaacagatacgttaaaaacagttgaaaatggggatggagaagagtagatggaaacacattgataaatacatcctctgatttcaacacatcaaacggaaagtgcttgatcgctccttcaattgccatcgtatcaagcttgtacaaataattatggcgtcttgccagtgaaaacaactcttcaatctgcccttttgcgaaagccgtgcgcagcaaagcctcaaaacctagcgtctcccacgaattcaacgcataaataggctgatatacaaactgaaagtcttcatacgtcagttcctttaaaacatgagcatccattctttcgtttaatcacctttcgttttcaatatactatttcttccataacctaaacttataaaaatatatcctaaaaacagataattgtccattaaaagtaagagattccattaggcgatttaggtgttttgagacttgctgggggcttatgatagcaacaaagaagtgttttagagacttttatgcttttgatagataggctgtaaaggattttcaaaaaaagagcaaaatcaatcccatctaaagacgaaaaaattggataaaggaactagtatagattgcttgtgacaccgcggttgatttccgtgcatggcttcgctttccgcgggcggccgctgagcctcctcgtcgcttacgctcctgcggtgcggggtctcaccccttccgcttttcccgcaggagtcttcgccttgccctccaatcaaccgctagaagcacctatatacataaaatctacgtttatttttactatcagttaccctttctattaacgaaacaatcacttctttttttatcattgttacttttattaatcgtttctccaaataaagaaaaccccactttcaaaaaagtgaggttgattacataatataggccacttattgaatgtctctctcttcttgtgctagcacatccatttcagcgtcaatcttcacgctgtgggtttttccatcaagtccaagaatcacaatttcgtattgtttgttagcaagaacaaccgattcgataatgcctttatgctgtcttaacgcgtatgcttttgcacggcttttagttaaaggaatcgttttttctttcaaaatattgccggtttgggcgttaatttttactttgtgctcttctccgtttaacgtaaggatgtctactatataaataggaagagtgagtattttactcagcgatatggatttgacaatgcctttatattcttttaatgcgagaagctttgcttgttctttcaacaaaagagatcgtttttcagaaatcatttgacgccatcctttctagtttataaaacggactgctgtttcaatttcttaacgtaccatatcctatgtatacgtctactaactagtatagcgggcttgtcttaaatttctcttaatattacatgaaagatagctgaagaaagctgttattcactgaaaaaactagacctgattagatctagcttcttattggtgaatgtgaattctacatctttttcgtttcgaatcgttctacggctctcatttgtttgattgacggggatttgtgcccgcacatgcccagatgaactttttgaagcaaatagggatcaatgtaaaaaccattttgaaagatgttttctttttcctgttcgtcatgaaatttggagcatcttacacagtaatacatatcataacctccttgcggactattttataaacggggatagttgtgaatggtatatttacctacatcatatggaaaagaacaaaagtcgtgcttgtttagggaaaatgtccgaaaaggagaaggcttgtccatgggctaaaccgctggcttttcaaaatgattatttagaacataaattagtttaatcgtaacaaaaaagcctctttcaaagaaaaaagaggcttctttattaatttgttacttttgcgctgttttgatgccagttccaagctgatgcgatgattttttctaatgaaatttgcgctttccagcctaattctgcgtgaattttatcagaagatgcaactaggcgtgccggatctccagcgcgacggtctgccataacgacattcgcttttttacccgttactttttcacacgtttcgatcacttcttttacagagtagccaaggccgtttccaagattgtacgttgctgttttcttcgtgccgtctaacagggcttgaagcgctgaaatatgagcatttgctaagtccgttacgtgaatgtagtcacggatgcacgttccgtctgcagtatcgtagtctgagccgaatacagaaatgttttcacgttcaccaagcaggtgctgaagaatgattggaattaagtgcgtttcaggatcatgacactcgccaatttctgctgtttcgtaagcacccgctgcgttgaagtaacgaagcaccacatattccatatcgtaagcacttgcaaagtcagctaaaatctgttcaatcattaactttgaacgtccgtacggattaattgggtttgttgtcgtatcttctgtaatgatatctacagaaggaatcccatatgtagcagcagtagatgaaaaaataaactttttcacattgtgcttcatcatcgtttgtaaaagggttaacgtcgcagctacgttgttttgataatatttaagaggatctgttactgactcccctactaaactattagcagcaaaatgcatgacagcatcaattttatgattcgtgaatacgctttctaaatctttctcattacctagatttccttctacgaataccgctttctcatcgattgcccagcgatgacccgttgatagattatcaagtaccacaacttcatttgttttcactaattcttttactaggtggcttccgatatagcctgctcctccgatgactaaaatcatactgtcagtcagctcctttttattaagtgtcgctacagatatcgtacccgtttcttttctatttgtaaatatttcatttttcagtatatgataacgcaaatgctgtcttttaattagtatatctactaattatgaactgagtgtgaagatattcatttccgttaaaaagcaattaagacataactaaatcaaccgctagaagcaactaagcagttgaaatctcctttcaccatgacagtgaaaaaatccaaactattaattaataatttggattaacagtttggatattactgcaaataacatacttttgtcacagcctctttttttatatttgctgaggcactttcttcatatcttttactttattttttaatggaagcatcccttcaatatgacattcaatacagtctccgtcttcaataacagccggtcccggcgttccggtgaggatgatatcacctggatgcagcgtcatgacttttgagaaaaatgaaacacagtatgcgatgtcgtaaatcatattagacactgtattttcatgctgtacgtttccgtttagcaatgtgcgcacttgaagtgatttcacgtttgatatactttcttttgtgataaattctgagcctatactgcaaaatgtatcaaagcttttcgctcgcattaagtagcgatgattcgccgcatgaatatcagctgcggttacgtcaattgctgacgtataaccggcaattacgtttatggcttcatctggctctatatccttacacgtttcgccgattaccaccgctagttccgcttcagccgttgttttgtaggactgctttggaatacgaatgctgtcgtctggtccaataatggcggttgcgggttttaaaaaactaactggatcaatggcacggtcgtagtcttttagtttttcttcagaagccgcataattaaatccaatgcctaataatttcgacggattactaatgataggagctgtttttctgccctgcaagtgcagtacgggaaaagagctgttcataccaaatttattatgggcgtaccatgtttcaaggtggcgaagttctttatattgaataagatcccaaattgttgtagaccagtttgttaaatatttagtattgatatcttctataagcagaatgctgtcattgtctaaaatagctgcttgttctttcccttgctctattatatttactaacttcatgatacgctccttaccgatgctcgaatgatacgaccgctgttttcttttacccaatttaataatttttcatcttggttgtatcctgcaataaaagataaaccgactggcaaaccgtctagttctcctgcaggtatcgtaacttggggaagaccgcttaggccggcaatacacgtcatttgaagtgttcgcaatcttctgttttctaactccggtccttttgcatcttttacaggcgcgggtcctggagctgtaggaagtactaatattccttcttctccaagctgtgagtacataaaatagcgaagttcacgacgcttttcttctatataattcatatttaataatgtaagagtgctggcccattgaaagcggcttccgatgtcttctccaaacgttggattttctttttgaatccactctccgtgcgtttgccagatttcttttccttgcagcaaacggaaggtttccatatatgtagaaaaaccctgaggagcaatcgctatctcttctatagtagaaaaagactccattacgtggttgatagacggcgcaagagctcgcatgctttgttcatccacaagttccatcacatctgttggtacatacagccgtgtaaatccactagcacgcgacgttgaattcaacaaaactgctcctgctttttgcagagtatggccgtctctagccattacaccaactgtatcaaagcttggagccagtggaatcagaccgtttgtagaaatgcgtccgtgagaaggacgatacccgaaaataccgcagtagcttgaaggaattcgaaccgatcctcccgtatctgttccaatcgcaaaatcagttattcccgctgccacagcaaccgctgatccgcttgaagaacctcctggaattcgatctgcgctttttggatttaccggtgttccgtaatgcgcgttttctccattaagtccgtacataagctcgtcggtatgggttactccctttagtgcagctccttcttttaaaagagcagttactacgtctgcatgttcacttgcaggctgatgcgtggcgagccaatctggatttcctgcacttgatatatgtccttgtacatcaaatacgtcttttaacgcaaaactcaagttatttaacattcccgtccccgttggagctacgtaaaggtcactgtctacaaatgcgttccacgtatctttcattcaaccatctcctcatttcttatatctgtttagaatataaaatttggaataagctggtcaatgaatgtgtcaggtctgttaacattaatattatgtaaatcttccagcttctcttttcccagaaaaactagccttttcatttcccttttagcacgtttgagagtaaagtagaaacatatcattttacgaaaaggactatcgcgatggaacaatctactacgcttttcttatttattttattagcttttgtgctaacaagaggcattccctttataggttcatttgctcctagcattaatcagctgcttcggcatattggacgctatttttcaaatttaaatacgatgtttcatgaagatggccacgcgttaatggggcttattgtcggaaaaggcgtcaatcgcattgagctttataccaataatgaaggcgtagctgtaactgccacctacgcgggatcccgtggatggctgccgcgcgtcattattgctttagccggctacccgttcagctcagcaatggcttatttgtttttctacctgctcgttcaccatcactacgactggcttttttacgggttaggaagtgttgttgttattaatttactgctttgggtacgtaacggatacggaattgtgtggcttttttctatcggtttgatcctcggaggtatttattatttacaagacccacagcttacgcgctacagcatgatgtttgttggtgcactcttacttgtagaatctctattttctgcttttattatttttgtgttaagcatcaaatatccacacgatgcaggtgacgctacgagtttaaagcagcttacccatctttcagcacgcttttggggttttttatttttcttacaggccgtgtatgtggcttatttaatttttcaactgatttattaaagacaaaattctataatttcccaagagagttttgggaattttataatttaaaggaataatttactttcatgcactaaataatggtttacgagttcccttaatgaggtatatattgggtactatgaagtcgtaaagaggtgtgggatacttgtcattatttttaaagtggaagcagaagaagcaggaaaaagaagcagagcgtgttcttgaggaatcaatctcaaaaagaaaagactactggaacacaattggacatgtagacggagacgtattaactcatttgttaaatcccatgttttttggcgggcctgcttggccatctggacgtcaaacatttattcgtgttcaaaaaacagagacggttattctcgccagcgacggcttgtccgatccgtttcaatcccccgaagaaaagagccgaaagcaaggaaaaggattagaattctatatcgaatgcgatgatgaatctctgcgcggccctttatcggatatccaggatcactgggcatttgaccttctttatcaaatgagtcaaaatgctgccgctcatcctaatatgctagaactattcatgaagcacgatattctttcaattgaatttactgatttggacgtaccgtctcattttgtaaataaaaatggagaaattggtgtattgctaggcgttcagtctccttctgtttcagctagcctctctttaccttacgaatctattaaactgattagcatgaagcttcttacaccaaacgaattagagtatgtacgcgaacaaggagcgcaaggacgcaggcagcttgctgaaacatttcagctgtcaaaaagttatcatattaccatgactaaaagagaatctcttatttaaaagaggttctttttttatttctgctattgaaatagagccctgtagaatatactccttatttagatgtaactcaagttcacatacttttttaaagttgcttttcatatgagcgtactatttttgattcatggtatattttgctatagtaaaaaagaagatataaaaaaggagatggacgttagacatggcagaaaaagtacagattggaaaatccgaattatatgttaatcctattggacttggaacaaacgctgtaggaggacataacttatatcctaacctaaacgaagaagtcggcaaagaccttgttcataaggcgctagataatggcataaacctccttgacacagcgttcatttatggcccaaaacgttctgaagaactaattggtgaagtgctaaaagaacgtggaaatcgtgaagaagcggttattgccacaaaaggagcacataaaattgttggagatgaggtactgctagacaattctcctgcgtttttaaaacagtcggttgaagatagcttaaaacgccttcaaacagattatatcgatttatattatattcactttccagataaaaacacaccaaaagacgaagccgtcggtgcgttaaaagaattaaaagatgaaggtaagatccgttctattggcgtatcaaacttcacattagatcagttaaaagaagcaaataaagatggttatgtagacgtggtacaagggcaatataacttaattcagcgagaagcagaaaacgatattttaccttatacggctgcaaaccgcatttcatttattccgtacttcccgctagctgctggtttacttgctgggaaatacgataaaaatacaaagtttaatgacttgcgcgaagatatgcctcattttatcggggaagcatttcagcaaaatctagaaaaagtagagcgtcttcgtcaaatctctagcgcaaaaggcgtagaagtagctcatcttgttctggcttggtacttaacgcgcgattcaattgatgtattaattccaggggcaaaacgcgctgatcaagtacttgataacttaaaaacattagatgttcagctcacttcttcggaaattaaagacattgatcatatttttaaataatataaaaagaggctcggacaaaatagctgaagggaaatccgaacaatcaatcgaaacgattgattgttcggattttttattgttatggtgaacgtaggcttcatatgtttagctgcttctagcagttgattggagggcaagacgaagactcctgcgggaaagcggaataggtgagaccccacaggagcgtaagcgacgaggaggctcaccagccgcccgcggaaagcaaagtcttgcacggaaatcaacagcagtgtcacaagcgtttcagctcaggtatccaatttgttcgtttttagattggattaatgtagttatgtctcacctctttttcctatacagttccgctggctaatagaacaaaagccgtaaagaagaatcccatctgtacaaagcttgttacgtattcttttgtttcttgtttatatttccattcatctatacttttcaacaaaatattcatgactaagaataggaaagatacgatataaggttcgacaaacataaagatcatatcgagtaccagaaaaagaacaaaggctatcgtcacatatttatcccatcgtcctaaagctagactttcatactcatatttgccccaaaatttgctgcgaggtatatcaagcacttttcttaaaataaaatctactaagactgctgctgctactagcatgatcaatatatacatcgtcatctccccttcctttttatggtatcatttcagctcgtttctgttaaggtctcagctacaaagtgcttaaactgctttatttcttctgtttcgccttttgttacgatatacgtatgtgaagaaggcgggataattttttgctgtgaaattacgcttaacgtttgattttcaacttcctttttcaccatagaaaatggcaaataagatacgcctaaaccttcttcaataaagcgctttgtaatttctacttgcgtcacaggaagcagctgaatgtgaggataacaagccttgatttgaaggagtaaatcttcccaataaacaggatgattattcgtaagcagccggtaggaagataacagctcctgttccgtacgtgcccctgcagaaaacggggcgactaagactgctttttctttatgaattaactcataaaaaacatctgcctgacccggaagcatccttgttaatccaatatctgattttctgtcgctgatgtcttttcccacttgaaacgaatttgtgatattaaccgtgacttcaatatgaggatatttctctacaaattgtttgattaaactaggcaaaacagatgctgctatttgaggagcagcggatatagtcagttttcggttatatccttgcttccataatttaaaattccctactccttcctcatatgccctcaccattttttgagcatgaggcaaaaaaaagcgtcctgcctcagtcagcgcgatgtatttaccttttttttcaaaaagctcatctcctaattcttgctgcagtcgctgaatatgcttggatacagcaggctgcgttaaaaataaatcttcagaagcttgtctgaaattttcataagaagccgctatgatgaatgtttttaaccatttgatctccattttcttctctccctctctttctattcataacaaactggaatcaatactgcttatttttgtttattttcttttctatcaaacttctatacgatatatgtatctcaatattaccaaataaaggagctgtaaaaatgaaaaataacgttaaagaaaaatttaatgctcatgcttctcaatatgatgagcagcgccgcaaactcattccttgcttttttgatttttattctattcccgtttcggttcttcatttttcaaaaaagccgcttcgcatacttgatattggagcaggtacaggcttgttttcttcttttgttaaagaaaagtacccagatgcgcatttcacgttgattgacgtctcagatcaaatgcttgaaaaagcaaaggagcgctttaaaaatgaacagcatatagaatttatcgtatcagatataacaagctacaaatttgagcactcatttgacattgtgatttcttcacttgctatccatcatttagaagacgaacaaaaacaaaagctgtatgaacaaatttatgatttgctgcatacaggaggaatatttattaatgctgatcaagtattaggccattcttctattattgaagagttatataaaaaagactggagcgaaagaattgccgcaagcggattaactcatgagcaaattgaggctgctcatgaacgtacgaagttagataaaatggcaactttgcacgatcagttaaattggttaacagcaagcgggttcagcacggtggattgcatctataaattttttaattttgttgtgatgtatgctcaaaaataacggtttaaaaactacttgctctttgcaagtagtttttttactctttccctccctatattcgaataagaatatttatctatttccacaaaactacgcatacttcttttccagtttcgtatatctaataatagcttcgttctctaaacttttgaattttttgtacataaaacccatataaagtatttttatactattttatgtctttttatggtacaaaaaatacaactatgttacaatatgattacaaaacaatctgtataacgctttcatttctttacacgaaaatgaagaactggaaaggatgtggtgcttatgtaaatgtgaatccgctagattagtaaacttatattccgaaagttgtacaaagcatcaagaaaagcttagttattcttattattataaattcccgctagtaaagtctttctacttaatgatttccttattaagctcatacatacaggtatagaaaatgcagctattcgtcttttattttattagtgaagaatttatagcatcgcccgaagcatcatacgtttttcattaatgcagcctaaggaggcgcagcacatggcaaatagaatatcaagaacaacaatcgtactcatagcggctattttagctctagcctgcttgtttgtaggagttccaagaacagaagctgcttcaacaccatctcatttaattatcattaacaaagcgacgaataaactcgcttattaccaaaatggttcacttgtccgaacgttttcagtagcaacaggacgcacgcagtctcttacaccagaaggccatttcaaagtagtgaataaaattgtcaatcgcccttattactcagggaacattcctggtggagatcctagaaatccccttggcaatcgctggctaggtctaaatgcgagaggtacatacggcacgacgtatgctattcatggaaataataatcctgcttccatcggcaaatatgtaagcagcggatgcgttcgtatgtacgatgaagaagtagcatggttatttagtaaagtgaccgtcggtacgccagttgtgattacaacttcttctaaatcatttaatgacattgcagcagcaaacgggtacaacgtttctggaaactcaggttctactccagctccttctacaggaactgttttaaagaaaggcagtaaaggaaatgcagttaaagtacttcagcagaaactaacttcacttggctataatacaaaaggtacggacggtgtgttcggtgccaatacagattcagctgttcgtaagttccaaaaagaccacggcttaacggctgacggcattgttggcccatcaacatataaagctttaggaagttcaggaacgaacccgaacccgacgacaccaacaaacccaacaaatccaaagccaacaaatccaccagcagatacaacaattaacacaaaacaaacgcttaaaaaaggaagcaaaggcagcaatgttcaagctcttcaaaagaaattaacagcgattggctataatacaaaaggtacggacggtatcttcggtgccaatacagaagctgctgtacgtaattttcaaaaagacaataagctagcagttgacggcattgccggacctaatactttaactgctatttccaaacgctaatagagcctgatttcaggctctgttttttttattgataaacctctttttttacatcgcgccttgaccccttaatgaaccattacgccgtctttcttttctacgacatacttaatcagctgataaaccgttctcataagaatttgctgctgatagatatcatttttggcaggaattacgttttctatcagtctgctatatttgtaggcttgatcgtcttctttttgtttataaagagctagccagtcattacgggatttttcaagcaactgttcgttgaaataggaataaacgacggttgcaaactcacctgccaattcttgaataacctgctgtcggtcggtgaccgaatgataggtgcttgaccacccagacggctggcttagaaaatgctcgtagacagatgaaataaaagcggacgcaatgactggcaccggcccctcatgctctcctaaggaaatgttcaaacatgtttctccatccatataaggaatattcagcgattccatcgcttcataaaaagcctgagagacagtcaagtttaaataaataggatgcagctcttgctgcttttttctcgtttctgatactaaagctgcctttaagtctttatacagaagatgactctctttgaattcctcgtgtacacattctaaaatagatgtattccctactgttaaatagtagtgaagctgctttttcataagaggtgaaacgcttttaagcgcataatctatcattttagccatggcatgttttttagcataatccgtacggcaacttggagaggtaagcaaatctccgtgtgtaacacaaacgtttaccttagcaccgtgaccatgtacgatgagctgttgaagaaattgaatatctaattctttaagcccatgatgtacgtataaaatagaagctgcttttttaaaagaatcgtgaatggtactcgtatattcaaaacacggatgctcgcaaatcgctaccccttttttaaaagaaaaagggccgcaaacttcaatcctacgaaacaatggataaataagacgtccgttattttcttcttcttcatttgttagcggaccaagcgaagacagctcttttgctgtatgacggcaggatattggccagtcgtcttctcctatttcccatgttccttccttgtattctttcaatcgggattcaattgccagaagcatttgctcagtgatttccctacattcaagccgcttgtgccatacctctgcaaaatctcttccttcttgatcaacagcgtcttttactatttcactttctcgtttaattgcatctacaaattgtttgaatgaactattttcgtcgctcattcttaaaggaacatcgtcattaaaataacgggctttgtatgggatatctcccaaaagagcgcgcagattaaaagaggaatctccgtgtaacaactcaaagaccaagtcataatccgtgcctccttcagcataaacttcagcgcttcttagtaggatattctccaatttcctttgcacttcacttcgcgtaaaaaaagagacagcagcttcatagtgttgggaatcctttaccttatacgtagcagaataagcgcctttactgcctattcctagaaagccacattccttttttataccaagaagctggcggattaaggatgttttgccgcttccttgttctccgattacatgaacgtactcatactcgctgtcaatttgttcgctcgtccttttttcaatatcgttataaaaagcattcactactcgttcatcatatcttgcttttgctcttccttttgcagtacttgtccaaaaatcctgcactctcagcagttcattcatctcttcaaccagaatgtcaatttcatcgtgttgctctgtatacataaaccgcttaacaaacgggtgcgatcttcctctttcatcttttttaaacggatgctgaaacataattgaccagccttttcgcataggagattgacaggcttttgcacgaaaaactttcattcagttccccttctttctctaacattgtcctatttgaaatgtatggcttttaaaggggggatatgtctatgattttcctctttttagaaggatttttccttcatttatcgaagtaattaattgaggtgatgggagaatgttgacaaaaattgtgaaatgcagcataccgactgataaaaaagcatctttttcatatacgcaacagcattgggctgctcttgcacacgtgaatggtttcattggccaattagggggttggaacgtggaagatgaaacagatgcttgtattctagctctgtgggaagatggaacaacttatcaagaattcatgaagcatactcatgattctattttttataaaagcaagcaggatcaaacatatacgaatttggacgtttcaacatcagatccgtcctacttcataggagcacgctacaattattatcgaagcagcgccattgaaagccgttatttagtaaagacggaaattgaagtcgatttttacgacaaagaagatatccatgagatggtaaaaagcttgataaatccttcttatcgctgtttatctcacgttgtatcaccaatcgagcatagcaagcttgtcattttttcattatacggatctgcttgtccgcaaaaaacaattgatactttcgttcatccaaatgtactgaacgcgtctcaatacatatatcaattagagaaaaattggaacgttctttccaattaaaaaatagaagcctaggcccgacgccaaagcttctatttttttatgatatgaacatcttggttttgtacggtaatgacttcctccgtcattcctacaaacaaaccgctttctactacgcccgggatccttattagctgtttttccaactcagcaggattttcaatttctgaaaaatggcagtctagaatgtaatttccgttatcggtgataaacggcgtatgatcatctaaaagtctaagctgcggtacacaacctgcactgcgaatgtgcttcgccgtcatttcccagccaaaacgtataacttcaacaggaagaggaaaagctcctagcgtcttcactattttcttagaatccgcaatcacgataaaccgcttcgctgcgtacgcaatcattttttctcgaagcagcgcgcctcctcctcctttaattaaagaaagttcgctatccacttcatctgctccgtcaattgctatatcaatatattcaacatccgctaaggtaacaatgggaatacctagtttccttgccagctcttctgttttttgagaagtaggaacggctttgatgtttaatctattttttactcgttcacctagttttacaattgtataataagctgttgaacctgtccctagccctacaatcattccatcttccacaaattgtgctgctttttcaccaactgcttgtttttcaatcatacaaaggcctccttactcatattgtacccgtttacataaaaaagcaaaagcattatgaaccctttcaaaaaaactcagctgactattcagctgagtttttttgaaactgtgtatttagaagaattttttctacccaatactgctgttttgtactgtttgtctgttcgctgctttttagttcaaacgtatagtaaatatacttgtctgaataatcatcattcacataagcatgataaatgctatgctttccatttcttgtttgttttttcacataaatcgttgcatttttaccttttaacatgtaatcaggctgaaacgcatccattttattttgagctgctttgctttttttcttagaaaataaagccgttattttcccagcattgtatgaatcattttccttcgttgatgctgtccatacttcactttcatcttcactgcttttataagaagatttatgaataacatactgaagcggaaaccacatcctatattgattggtatccgaagtaaataattcaaatccattgtctgtttgttcatgatcgaccaaaaatgtactcgtaaacttatctgcctgcgcttcacttttaaatttcccgctttgaaacagccaaattcctacggcaatgaccaatgctccagctactgatgcggctttttttcgatccattgtttccacacaccttttaatacccctttaacttttgataataccatattgacgtttatatcgtcataaggagaaataaccaaagggttataagagcgcacatgctaatttaactagagaaaataaacttttttacaatagtaaatttgataacagacgctgagctaacagccggttagcctcaccgggctctatcgtatacgttagtagttcttgcttttctgctttcgcttttatcaaacattcaccccttggagaaagaagagaagtcgtgcttttttggttctctagggcataattcacgcttgcaaagtaaataccattctccgtacttcttgcaaccattgcataatcataaaacttcggatctggtacttcaccagtaaactgtggatgaaacacaatgcttgctcctcttacagcagcccatcggacagtttcaggatagcgccatccctcatggcaaataacaatacctaatttcacaccgtttatttcaaacaactggcggccatttccaggcttataaccaaatttatcttctgctggatcaatttgatttttagtttgataccctaattcttttccattttcatcaattacaaaagcagttaaatgcataccaagttcgtcacgccactccagtggtaaaattacgttgagctttaactgtttggcaagcaacttaactttataaagcgtattctgttgaatttcgtgattgtatgtctcaacttcaaaaccaactcctctaagtcccggcacaattgattctggaaaacatacaaggttacacccttcttctgctgcttgtttcatacaattttctaccgtttctacaccctctgcggctgactttggaaatctcacttgcgctaacccaattttcattcattgctcctccacttccaatatcataaaaaactcatgctactagcgtaacatgagttttttatctttacgtaaataatttaattagcatgctaagaagaatacctaccgcactaaagtccgaatctccaaatgttgtgcctttaaaacctaacgatgcgagaacaggcagtaaaatagccggtaaaaaactaattaagattccattggcaaatgacccgaccactgctcctcttcttccccccgtcgcatttccaaatactccggcagctgctcccgtaaaaaagtgcggaacgaggcctggcacgataatacttagaccaaatagaggcaaaaagaacattgaaatgagacctgcgataaagcttgaaaagaatccaatgaccactgcgttaggagcaaacggaaacacagttggacaatctagagctggaatggcatttggtaccgctttgtcagcaattcctttaaatgctggtacaatttctgctaaaagcatacgaacacccgccagcacgacatatactcctgctgcaaaggtgattgcttgaattagcgagtacacaataaagttttgacccccgcttaattttgtttcgataaatgcaggacctgcaaaaagtgcaacaacaataaataaaacggtcatggtcagtgagacagaaacggatgtatcccggagaaatcctaaggattgaggaactttaatttcttctgttgttttttcgcgatttcctactcgcttgccgataaaccctgctactaaatagcctaaggaaccaaaatgaccaacggcaatatcgtttgaccctgtaatttcacgcacatacggctgaagcagtgcaggaaataaaaccattaaaatacctaataatagtgcaccgatcaaaaccaaaggtgctcccgttaacccgcctgtagataaaattgctgcaatcaaacaagccataaacatggtgtgatgcccagttaaaaagatatacttaaatttcgtgatgcgcgcaataatgatatttacaatcatacctaaaagcataatcatcgctgtttctgtaccaaacgtttgttgagctacagctacaattgcttcattattaggaatgatgccttcaacggaaaacgctttattaaacattttcccaaacgcttcaagtgaagcaattaatatgttagctcctgctcctaatataagaaaacccataattgtttttaaggtgcctgatacaatatctgcactttttttcttttgaagcaacaaaccaattagtgcaaacaaccctactagaatagcgggtgttcctaatatatctttcataattaaatcaaacatggcttacgcctccacgaagtatttttgcagtgctcctttaatttccgcttgatttaaaatgttttgcagtgccacgaccgtgcgagtgccatcatccaattgatttacaatatctgcagatcctaaatagatatctgcctgctccgttttactagttgttaaatccgtatgagatacctgtgcttcaacaccaagctctactaaaattttctttacattcatttctacaataaaactgcttcctaaaccgtttccgcatacaactaaaatctttttcattttttatctctccttttaaattgagtaagcttcaattaatgcaagcatttcttgttttgtattcatagcaataagcttgtcaatattatcattttcagatagcatcattgaaagctgtgacagtgcttttaagtgggtttcattatcagtagcagcaagtacgataataagctgcgctccgtgctgtttttcagtagaaaaatagaccggctcctttaaacgaagcatgctcatacccacacgatttacaccttgttccggccttgcgtgagggagcgcaacttttggcgcaataacaatataagggcctaactgttctacacttttgatcattgcttctacataagaaggttcaatatattcatagttcaacaaaggcttggcagccagcctaacagctgatttccaatcatctgctgaatctgtaagctgcaagaatggctcttgcaatacttcatgcaacattggctttttatcctctcttaccatttttttagattgctgtatcactagttttaaattagctaacagagctggttcatcctgaatatttgtatgctgcttaataatacccatgatggcttgagtggttagctgagaagaagctggttcaactaagtcgattaaccgctgcttttcatcatccgttaaaataggattcacaagcatcacattcattcgcttttttaatggcgtagttgtaataactaaatcataggtttctttaaactgctcataatctcttaccgtcattggccctatcaattcagcatctgttaacagttgttcaagctgatactgaagcatacgggacgttccaattccattggcacaaacaataacaatacgcttttgtttttgccttccctcttgttttttcatccatcctccgaaatgaagagcaaaataagaaatttcgtcttcattaatacgtgtttgaaggctgttttccaaaggaagcaacgctttttttgtcagttccactatatcctgatactttgtttgaatagccgaaagcatagggttagggaggtgaatattatagagaagcctgtaataagccgtcttcaaatgaatatataaattttgttcaagacgatttcgatcttcaaataccacacaagcatatgcttgaaaccgtgataccatttcttttacaatgcttctcatccaatcatcactatctgcttgatttactacatttacttttgcacttagtaaaaccgtggccagataatgtttttcatgacgtggaaaatcaaatcctaaaacgctttcaatttcttgcagcgctttgtactgcctggttttttctaattcgtcttttctagtaatcaaggcgtctacatagcgcttgcctccaatacgctgaatacagcacgtgagcatataggctaattgcgtcagcatcttgtctgtaaacgccattcccagtttatcttcacactctacaagccagttataaatcattgaatattcgtaatctgctttcataacccttttcaacaactcttcttgatgttgacttaataattctgtgatgtgtatataaagcaaatttcgaatgtcgctttcagatccttttacttcgtacccatctttatagctgtatgtcaaagatatgcctttctttgcccacttgttttttaagtctttaatatcttgtaagacagtgttgcgactaacttctgtttcatccatgagctgctgagttccgattttcccgcctcgaagtatacacatcaaagcaacgtatatttgccggtcctcaactgataagtaagcagatggcataacatgagaaaattgtttagcaacttggtcctttgcttgatcgtttagaaaaaagccttttccatatgtgtactgaacaaactctaattcttgctgacacagccaatcgttaattttctcaatatcataatagatagtacgtcttgacacttgaaactgcttcattaactcttgtactgatataaatgttgcggcttgaagcaaaacttgcaatacggccgtactgcgtttgtctaacaaatgaatcaccttcagtccaattcgtgcacaaattgaaatacttactatgctttatatttctactatactacgagtcttgcaaaatgattagaccgaattcacccacatacattgtgcaaaaaatgtactcaacaaaaaaagaagtgctgtatgcacttcttttaagggttaatctttaatctgctgttccattgcttctccaatggctttttttaaatgtccgtcatgtttatcaagcagccgatgcacctcatcaccttctatagaagtaagaagcgcaagaatggcggcttttggcgttttgtatgtttgtaaactttccgctgcctcctctggtgagacgcctgctagttccgcaataatatttttagcacgctgtacgagtttatcattagtcggctgtacgtctaccattagattgctgtagactttaccaatttgaatcatagaagcggtcgtcagcatattaagaacaagcttttgagcagttccggctttcattcttgttgaacctgttacaacttccggccctgattctgctactattgcatattttgcttcttgttccataggtgattgaggagaatttacaacgcagcccgttactgtccccaggctgtttgcatacgcaagcgctgagagtgtatacggagttcttccacttgcagctatacctacaagaatatctttatttgataaattaatcgctttcaaatcttctatcgcttgtttcttattatcttctgctccttctaacgcatgacggagcgctttgtctcccccggctatgatcccaattacttgttcggcaggtgtaccgaatgtcggtacacattcagatgcatctaacacacctagtcgcccgcttgtacctgctccgatataaataagacgtccgccttgtttaaaagcactgacaatttcatctactaacagagcaataacaggcagcactttattgattgcctgaggcacttgatgatcttcttcattaattttttttacaatttccagacttgataattcatcaatgtttaaggtttgcggattgcgtttttctgttaagatatgatttaagttcactgtgatcccctgccttttccaccatcattttttctctatttatactctttcatgaacagctgataagctcctttagcagatgatactcgctgtgttgcccactggatatgctttatttttttttcacatgtttttttataaacatcaaacacctctggaacttccgttaaaatgctgcctttgcatgccagcaagcagctcccttcaaaccgctgtttcgtatataaatgaagagtcatgtttgcaaggttctttccagcttgttgaagaatgtcacttgcttcttgtttatgatttctcgcttgatttacaacaagcggagtgagtgaagcaacttctgatttaggagatgaatagacaaacttttttatatcgtgtatggtatctgcttttacatgttgcaagattgtctgactcaggctgctgtaagcccagctttgatcatgctctttcgtcagcaatataagtgcttgaagaccaatccaatatccgcttccttcatctccaagaaggtgtccccaccctcctccgtattcgtacaccccgtcttttttcccaatgctgacggctccagttcctgcaatggttaaaatcccgtcttttccatgcagtagtgcttcatgtgcaatcatggcgtcatcatataaacctacttctacctgataacgatcataaaaatacctttttatttcttcttcagataatgctttacttccagcaagccctagtgaaatgcctttacatgtatgaccagcaagcgcagttttgcacgccgtaatacattcatcaatatgagtaatagccgtattgtaattaatgagcaaatttccatagccgctttttgaagcagcgagcttttgaccgtctaagctgtacgcaacggcttctgtttttgttccgcccccgtcgataccaataatatagtccattttatcaccgttcacaaaaagcaaatttatcccatggctgcagttcatttagtaagaatatttcctcttctgcaatgcgtcctactacgtttgttttacctgagttttccatgtctaacagcgcaatttgcagctctcctttgtactgaccataaagttcattttctattaaaatatcgcctcttcgaatggaaggagtatgcgtaggcttgaattcttcttttttatattttactcggctttgcgtagagcgaattaaataatcggatacgtctccgcggtaaaaatgaaactcttccagcacaatttttttctcaagttcagtaaccgtatcatacagcgtcacattaaaagtaaagcgctcttgctgaataacatcacgcagcgacttcatttcttcttctgatgcataagcattcgcaataatggcacaatcaattaatcctgttttaaaaagatgcttagcctgcacgtctatgggaagcgtgcgatgcatttcaagcgtacaaagtccttcagtaacaggccacggtccaaaagtagcgcttggtgaattaataaaggctgctgtttcaaggttatgttctttaaacaatgctgaacacttcataaagtgatcatacgacaatcccgcgtatcgatgaggatagaagttgtgcgacccgagcagctgctttcgatttggtcggtaacttaaaatattatccacatatttcgttgcattgctcatattaatttcaatttttaagccgtatggattaaaggtcataatcgactcttcatttcccgtatagcctagatcaaggcgaatagcatatgcccctaattcgtgaaaaaaagataagtcatcataagaaatgccaagtgctccaaatacgcgaggagcgatgtccactactacttccatctctagctcattggcaaattcaataatttctttaaaattttccattacttttttctgatcgccttcaacagaaagcaagcatgtaaaaatgcgggtaaatccgtactgatgcgcaagtgctatatacgctttatctttttcgacagtcgaatgttccgggtaaatcgcaatacctagctttttcattgattttcgccttcttttttaaattttttaataagcttaatcatatgctcaattaatttttgctctgaaatagccgtcattaaatgatcttgtgcgtgaattaaaagcagcgacttttcaattgtttttccgttcaattcacgttgaataagcgtagtctgcgttttatgagcatgactaagctcttctcgagactgctttaaaagttcgtcagctttattaaaatcatagttttcagctgcttctaacgcttcatatgcaagtgacctagcatttcctccgtatgcaataagttcaaaaatttcattttccatatttgctgcttctgtcatttcttccatccccttttttatagtggtacaggcgtaatgtttcctaatattacaggagacaaggcgccggttgcgcttggtacattgcttggataacctgaaagtgtttcatttgcgagcaccgcaaaagctacggcttcttttgcttctgaagacattccaatttcttcttgtgtgtacacgctgcagcgctttccgagctgcgctttaatcatattcatcagcgtattgttataacttccgcctcctccaataatcacttcgtcaatagaataggcaggaaaaataaatgtttcatagtgatgtacaatggatgatgccgtgaacatagtaatcgtagctagcagatcttcttttttatgtttgctatatttctctagcagtctctttgtgtactgtgtaccgaacaactctcttcccgtcgatttaggaggagaaagcttcatataatcatgattcatacagtcttctaaaagctctgagataatagttccttcagctgctaaacgcccattttcatcaaatgaaacattaaaaagctgctgacacgcttcatctatcatcatgtttcccggccccgtatcaaaagctactaccggtataggagatttttttggcggaattaacgttacatttccaatacctccaatgttttgaagcatccttgcatggtcatcgtggctgtacaaaatccgttccgtgtgaggaactaacggagcaccttgcccccccgctgccatgtccatcaccctgaagtttgctactaccttcgttttggtttcataggcaataacagccggctctccaatttgcagggtagacatcgctgtaattcccgaagcataaggctgatggtaaatggtttgcccatgcgatccaataaaatctatttgttcaagagaaaagccggcttcttggcacacttttttcactgcatctgcaaatgcatagccaagtttaaaattcaagctgcagatcagctgtacatttgaatgttcaaaagaaagcgcctgctcaatttccttttttaactgcggtgaaaacggtatggtaatgaaatgaagaagcttaactttactttcatagccgcttccttcaatttgaacaagagctgcatcaattccgtcgagtgacgttcctgacataagtccaacagcatacatactacgcgttcacttccttaaaaaaagcaggtaaatacttgcgatgagcttgaagcagttcatctaagaccgacttagccagctcatcacttggaacaagcggattaatgctcagcgcaaccagtgctttttcataagatcctgtaaccgcagcttctgcccctactcgttcaaacgatttaatttgctgcacaagtccgttcacttctacaggaagttcacccacagcgagcggtaccggtccttgttttgttatgatacagtttacttcaaccgctgattcatttggcagtgaagaaattgagccgttgtttcttacatttactgtttgaatatcacctttatcgttataaatggatgaaattaaattacatgcggcatcgctgtaataagcgcctcctcttttttccagctgcggaggcttcatttctagatttggatttttgtagagttcaaaaagctcgccttccagtactttgaccacttcagcccgcgtagtacctgattgaaaggccaaaagctcttcttctaatatttcttttgttttgtagtagtagcgatgatacggacataaaatcacgccgagagcttccaaaaagtccggttgccacggaataggagctatgtttttcattgttacttgggactttggatcacttaaacgctgaattacttcttttgttacttcctttccttttgcatacacatgcagtccatataccaagtgatttaaccccgcaaattcaatataaacattttctttttctatttgaagcaagctggcgatcgagtttgtcatatggacaggcaggttacagacccctaccactttagaatgctttccgtagcgaagcagcgcttcggttaccataccagcaggatttgtaaaattaataagccaggcgtttggacaaatttcgtgtatttcctcggcaattttcaacaaaaccgggatcgttcgcaagcccttaaataaccctcccgccccgtttgtctcttgaccaatcattccgtacttaagaggaatacgttcatcatgagtacgtgcatcaagctgccctactctaagctgtgtcgttacaaaatcggcattcaccaacgctttttttcgatcaagcgttaaataaatttttatatcaacacctgcttttttgaccattcttctcgcaagtgctcctacaatctcaagcttctcttttccttcttcaacatctacaagccatagctctcgaattggaagctcattatatcgtttgataaacccttcgaccaattcaggtgtatagctggatcctccccctattgtcactaccttcattccttggccctccttgttaaaaaacagctaaatatgtaacggctgtacaccctgctccaagtaaagcgaagcgtatacaaacggcagttttagataaagctgcggttgaaagccggatagaaataaatgttgtaagcaaagctgctgatagacttgtaacggtaaacaaactatgctgcgccgataaaccagcgtactgcagcaaaggtgtaaaaataacgttacaaagcaccatggtcaacagaaataaaaacaccgttttatatcgaaaccgaacaaacattgatctcaactcctattaaagagatagaagccaaacaagttggcttctctttttttacatttgaactgaattatcggatggtgcaaccgttgcttcatcgcttttttccatttcgaccatctttcggtcgtacattttaaagaacggaagataaatgacaacagaaatagcaatattaataacgactagcacaaccgcccgccagtctcctccggttgatagataagctccgatcggtgccgggagcgtccaaggaaccattacgtaggttggcgtaataagacctgttgccgttgctgcgtatgaaatgatcgttgtaataatcgggataatgataaatggaataattaaaataggatttaacacaattggcagaccgaaaataattggttcgttaatattaaaaaccgctggaataaaagatgtcctagaaagcgctttcgaatatttagattttgagaaaaacagcatcgctaaggcaaggcctagcgtcgctccagatcctccgatccaaacaaaccactgaaagaacgtttcaggtgcaatataaggaagtgtggaagctccgtctgctaccgcttcagcatttttggctaaatacacttcccatacaggccgtgccactgtcccaacaacagagacgccgtggattccaaatgaccagaaaaacgtaattaagaaaaccggtattaacactcctgctaaactatctccagcttccacaagcggagcaactagtttatcaactaaatggtgaagatcgatacctaaaacaatggtaataatcgtcataagtacaacaacaatcgcaaccggtattagtgcttcaaaagatctcgataccgaaggcggcacttgttccggcatttttatggtgacattttttgctttacaaaacctgagaatttcgaccgataaaatcgatacaatcatcgttacaaataaaccgtgacctccaaggtttgtcattggaagcataaacccttcttcttcaatcagctttggagtcagcgtaagaagtagtgcagctaccgcaatttgcgctcctgacagcggatcgagattatagcttttagacaagttgtatcctatcccaaaggctatatataaagacataataaacatcgttactcgatacggtattaaaatgttggcgctgttatcagcggcccaattcgcaattgtgctatcttgcggcacaggcggaaatgctagaatcaagaaaaaacttccgataatgataaacggcaaagcggaaataacaccatcgcgaatggcttgaagatgccgctgttctgataacctggccataggtcccgataaattgttctctaaaaaagacacaaatttgctcatataccctttccccctctatattctccccttgtgtacacaaaaccccttatctatttaaaaagcaggaatacacctgcttttcttagctaacgagctgttgaaccgttttaaaaagcgtcggacctccaagcggcgtataagcctgcggcggaatgggcccgcatggaacagaagctttatctgcttccgctttcactgcgttaaaccggtgacgaatctgcggtgcaaccattacaacgtcccagccctttttaatttcctctgccacttcattcgttccaattgccagcacttccatatccgttccgtgcttttgtgcttccgtttttaatgcttttaccacaatcgcacttgacattcctccagaacatacaaacaataccttcattttttcgtttccccctacctctttattttttgaattacattatgtgtatcgattatgcgttcaaacacttgattgcctttttgaatacataaccgtataaacatcgcatctacaatggctaattgagcaatacgagcgctcatcgttccaattcgaatatgctgttcttctaccgaaatagtcagcagaatatcagctaacctagaagctggcgatgatccgtgctgcgttagcaaaatgacggctgctcctttgtctttggctatttgcatcagctctattacttcttttgtttgaccggaagtggataccacaaacagcacatcatcttttgtcatattcgtagccatcaccatttgaacatgactatctaatgaaaacagagccgaaatatcaattcgaagcagtttatactgagcatctagtgcaactacagatgatcctcctgctccgtataaaaacactcgtttcgctccatgaatagcttccgcagctgcatcaattgcagaagtgctcactaatcgacttgtattcatcagtgcgctcatacttttgcttatgactttttcaagcacagcatcggtctcatcttcaaaattaactggaagattcggcagctgttcggtattcaccttatgagcatcttttgctaattcaatctttaattctttaaaactattaatgcctacacgctgacaaaagcgaataatcgtagcttcgctgcactgacactgcttagctagctgtttggtcgttaagttcaacgtggtcgtgggattttctagcacgtaatcagctactcttccttcagcgggactgtaatgattcatttgtgcatcgattaaagtaagtacggaaaattggcgcatgaattcctccatctttaagtaacgtatttttaaaatattctttaaattaccattattatattttttctgaagtttaatttcaatatttttctgatatttttaaaactttattttatttttcagaatatttcattaaaacctattgtgaatataacgaccgcatgctatattatgaaagaaattttatctcaaccaaaaaagaaggaggaacgaacatgcatattaaaaaatgggttggaggcatcttgtttttgctgctgttttgttcgagcacattacctgctaaagcagacgtgcctactacgtatcaaaagcgggagcttcgagccgcttggattgcaagcgtatacaacattgactggccttctcagcccggtcttccggttgaacagcagaaaaaagagtttacttatttgttagatgaagtaaaaaagatgggaatgaatgctgttgttgttcagattaaaccgaccgctgattccttttatccgtcaaaatatggcccgtggtcagaatatttaaccggtacacaaggaaaagatcccggctatgatcctctggcctttatggtagacgaagcacacaagcgcaacttagaattccacgcatggtttaacccttaccgcattacaatgaatcatactgatttaaacaaactagccgataatcaccctgccaaacaacatcctgattgggtcgtctcctacggaaaacaactctactataacccaggtattccagaagtaaaaaactttattattgaagaagtgctcgaagtcgtaagaaactatgatattgatgctgttcatatggacgactatttttatccttacaaaattgcaggtcaaacgttcccagatcaaaaaacatatgaaacctacggtgctcaaacgttttcaaacgttgaagactggcggcgtgacaatgttaatcagcttgttcgagatttaaataagtctattaaaaaaacaaaatcatacgtgaagtttggcatcagtccgttcggcgtatggcgaaacatcgctaatgatccaaccggctctgagacgactgccggacaaacaaactacgatgatttgtatgccgatacgcgtacgtggattcaaaatggatacattgattacatcactccgcaaatttattggaatatcggatttgaacccgctgcttacgatacgctgctcaactggtggagagatgaagtgcgcggaaaaccagtccacctttatattggacaagctgcttacaaaattaataacaacgcggtggaagcttggtctgatcctgatgagtatccaaggcaaattgctctgaatcaccagtttccagaagtacaagggagcatgcattttagcctgaaagatttgaaccgaaacccgctaggaataaaagacaagctgcaaaacgatatttataaacaccctgcacttattccagcaatgccttggcttgataatacggccccaaaagcaccaaaattaaaaaatgcgcgccctcatacaaaagaagcagcatttgaaattcgagatcaccagcagaatgattccgcttattatgccatttatcgctttcaaggcaataaaaaaggcgacattaacaacgcagaaaacttgctgacaaccgttcgaaaaacaggagaaaaacaattgtttgtagatcaaaatgcactcaaaaatcaaacatacacatatgttgtaacctctgttgaccgtttgcataacgaaagtgccgtttcccgcacgcttactctaaaaccatctcattaaaaaaggttctatagcaaaatgtatggtaggataaagaaatcaaactatgctttatcaagccattctgttatagaaagtagtgaaaaaaagatggaaccaaactatgatcgcgcttttggcgtatatggaatttgtatgcgagataacaagctgcttgttattcgaaaaaatagaggtccgtatattcatcgttttgatttgccaggcggacagctagagcacggtgaaacattaatggaagcgatgaaaagagaatttgtggaagaaacgggctttgagattaacattgtttctcaagcgggtacaacagattttcagtatccttgtaagtggaaagagtttactcacgtgcatcacattgctgttttttattacgtaaacattgccggcggtaagcttctttcccaccccatacagtttgaaggacaggattctttggaagcattgtggattgcaccgcaggatctcaacatcgataatgcttcgcctcttgttctaaaagcagtggaatctttaagcttattatcatggccttacgaatctcagatttatgatgattgggagcttaaaaccgccgaacaataataatagtgcctaaacattacttctgaatatcgtacgcttagcttctgtttaagttgaaatcagaaaatatgtttaatttctttctaatggtggaacagacaagtaacactacttaattactaatagaaaggaagattaaaatgagtaaaggtttaggagataaagttaaaggaaatgtatcaaaagctaaaggtgaagtaaaagatcaagtaggaaatgcaacgaataaccgtgaccttcagcgtgaaggaaaagctgagaaaacaaaaggaaatgctcaaaaagcagtaggcgaaacaaaagatacatttagcaataaataaaaaaggacgagcttaatgctcgttctttttttatttaataagctgatttaagcttgtaatgattacgtttggctgcaattctttatgttcagctacatttccttttcggttgacccaagccgttgcgaacccatagtttttagcaccggcaatatcccatgtattcgatgacaaaaataatacttcttctctttttgcgttcattttgttttttgcatagtgatagcttgccatcgtaggtttgtactgtttgatttcgtctacggaaataacgtcttcaaataaatgattcatattgtgataagaaacaagcggatcaatcatgtgcttaggaccattcgtaaaaatagccagacgatatcctttttcttttaaataggcgagcacctctttgacctcatcgtagacattgagcttcatgtaagcactcagcagcattttttcttcgtgttccgttaaatcaatatcatttgcttctgctgcatatttcagggattgatttgttaatgtataaaagtcaacgtatcgtcccatcagctgatattgcattgcatattcaatttgcttcaaacgccataaatggctaatactttctcctcgttccggatacagcttatcacacgtttcaataacggtatgtacatcaaacagtgttccatatgcatcaaataaaatcgttttaaatttcatctgtgttcgcctccttctttcattttacccactcgcaaaaaaacataacgttttttctgttaaaaaagaggcctattaacagctgaggtatgctcattcttatgaaaataaaaaaacagcaggctctcctactgtttataatcccacacgactttccattctcctttttcacgaacagcatacactttctgcaccaaatcaaagtttccatatttccctttatacgtttggataacggtcatttcgtaaacaacaggaaacgctttacggtcattttccatcttccagctctttcttttttcaacatcttctatggaatacgtaaaagtgtctaccccaaaatgattgagaaatacgtgtgctcgatcttgtatgtatgcaccttttgtccatttctttttcatggatgaatgaaaaaggtcccatgattccgaaaagttcccttcctgttccagcgtataaaattcttttacggcagatttagcttgatgactcggagaaaagaatgtaaattgaaacatccaaattcccagcgcaataacagaaagaaacacagctactcctaaacttcgcttcaaaagcagtgttttttttcgatacaagtaaaaagcccctttatcaaaaatgcagtatacaacagcttattcgatatccaagctttttagtattgccggactaaacttatccggcatatcttcaaaaaagaggttgggacataacgaaatcaatgggataaatgaaatctacgttcaccctaaccataaaagatccgaacgattcatcgttcggatcttccttcaactaaactacgtttgtcccagcttctttcgtcgctatacaatgtgaaaagccatttgcatggctgctaaaaagcccacgaacacaaggcccgtcacgagaccctctttccaatctagccggtcccctcgaacaaatttagcaatatcatacgatagcatcgctgctaaaaaaatcgataaaacaatatacagcggctccatcttttatcacccactatttcttttcttcagtgtaacaactttttcataagtatgcatgtaagaaaaacagcttaaaattcttgacgaatgtgtgaaatttctcttttttatgcataaactacttaaaagcgtgaaaggaagatgccgtttgtctgcttttaatcctcagcaatttagtgtcacataccggcaaggaagcacgcccacctttccttttattgggcgacgctatacgctcacacattctgaacaaacagacgatttatttctttggatcgacgaaaagtttgctgttgatcaattaaatgagcagcgaaatgagctttttgccgaatggctccacaaagacggtgttgatacgctgtatgtatacgtatttattggaaatgaacaaacggaaaaatccgttcaagccatacgatatgctattttcaaacaggaaatgccttacttgctaaaagctttgcgctacggtgatgccacgtttttcaacgctcaccctgctttagatcgttcccccatttacgtacattttcattccagcgacaaagattttcattccattcgatattttcaaacgccttctcactatgcctaagcatatgagaagggatctttacttcgttagtctcctgttttccaaactccattccttctagggtctccggctccttccatttgtttatcttgaaaattaatggttaacgcttggatacctccataaaagacgtcgcttttctttttttctattcgaaacgcagaaggaatattttttgtatttaaatcgggctctacataaatagtcgaatcgtcaaaaataaatcgcggttcgtttacagcctcttgaagcggttcatttccttcaaggtttttagaaagtacctgagttaaaatttggggaatccgcgttccgcccggagaacctattcccatcgcccactcacctttttctcttataatagttggagccgtaaaggttcttgctctttttcctggctcgcgattattcggctctttgcttccaaaggtatcagcattgttattaagaaaaaagccgtcaacttgttcgcctgtaccaaagaagttactcaatgtattggttgtagatacgacggttccttctgaatcaataaccacaaaatgtgttgtactttcatgttcttcatcgccttcacctgaagaacgtgtcgggtgattgaccaagtttgttatataatcatcactaactaattcacttgagttttgattatgaaagtctggatcgccgatttgttttaaccggtcggagtaagctgcttttttaattctgttcatcgtttcgtaatattctttatcaggcattgtttcaagattttctttctctgccatttttaacatttgaatcagtgtaattccggaaaaaggcggaggcgctgaaatcacttccgttccattgtaagcagaaacgacaggcttggtttctgtcacttgataggaagataagtcttttttagaaataggcgttgcatcagcaagatcttgtgctacatctcctttataaaatgcagacgcaccttctcgctgaatcttgattagtgttttagctaacacgggctgcgacagggtttctccttcttcgattgcttctccctttggataaaaagcggatagatcgtctacatccatccttcctctagagtaatataatcgagaagataaaagagagtctacttcaaaccctttttcagcgtattcaacagccggctgaattaaatcattcattgattttgtaccatacttctgctgaatatattccatacctgcgacaaatcccggcacgccgtttttaccgttcatagaagttggagcggtttcccggtaatcgataaaggtagcaggctgatcttttttggcaatcagcatacctccacctccgccaattccagatccaaaaggttcgactacattgagggcatacgaaatagcaatggctgcatctactgcattcccgccttcttttaatacgtccatccctacatttgctgccagagaattagaagagctcacaccataagaatgatcattattttttttaagcagcttttcaggactaaggtctgtactcgattgagtcataaagaaagcggctataacgccgattaacaacaaaacagcaacaatattaaataacagtaattttttattcacatattaccctccatttttactcatatgtatattttgtgaagcgctttcatttttatccatacattacattgaacacaaaaaaggcatcgcctaggacgatgcctttttgttactacataagacttattttccagcagctgccgcagcatcatttactgcatctgtagcagctgattttgtttgttcaatcatttttacgttattttcaattttttgctgttcatccgttgaaagagtagccggatgttttaaagctccaagtcctgctactactcctgctacaatagcaattggtcctacaatccctacgattcgttttgcgatcattttctattcctccaattaagttagtctgtacttttttcccataaaccgtggcggcgcggatcagcgtcaccttgaattttgtttttctttaagtctttcacaagtgcttgaacgcctccgtaaaacatcgcgttatcattgttttttaagtcatagccgtacgtttttaaaccatctttagttgactgtttaagcttagcttctgaataaaacttatgagaatcaaaaatgacacgcttgttttctactgcgtttttaatggaatctttgtcttcaaaataatccccaattacttgcgttaacacttgaggaatgcgatttcctcccggtgtgccaatggacattacccattcatcaccttcacgaataatggtaggggctgtaaatgttcttggacgcttaccaggttgacgcttattaattccttccccaaacgtattgagcgtattatttaaaaagaatccatctacatattcaccgctgccgaagaaattactcagcgtattcgttgttgatacaacggttccttcaccgtccatgacaacaaaatgtgtggtactttcatgttcttcgacgtcgcttactttggtatgatctgtttcagtattatttaatttattacgaagtaaatgcacgtaatgatcgtcgatccaatcatttggcgtttcttttataaaagccggatcagcaatttttttcaagcggtcttgataagctacttttgaaatttgaccaagaaaatgataataaagactaggatgcgattccttcagcttccaaatatcttcttgatccgtcatttttaacatttgaataagcgtagcaccagcaaaaggcggaggtgctgaaataatttgatgacctttataattcgtcgatagaggtttgcgttcaacaggcgcatactttcgcaagtctttgtgacttacttttgtttgttctgtaatatcgtctgcaattttccctctataaaaagcattcggtccttcttccttaatcttttgcagcgtgttcgctaattcatgctgtttgacaatttcccctgtgttaatggcgtccttatctggataaaagctaggaatttcatcttcattcacattacctttgtatgaaaccagcctatcgtgcaaatctttgtccactttatacccattctcagcatagttaatggccgggtcgattagtttgctcatcgacatagatccgtagtggtgctgaatataatccataccagcgacgaaccctggtacgccaatctcatcttctttatcattcttaggtgcaatttctcggtagtcaataaatgttggagaggcatctgctggatcaatcagcattccgccgcctcccccaagtcctgatccgtacggttccacaacaccaagcgtgtaggaaatggcaatagctgcatcaactgctgtaccgccttgtttaagaatttccatacctacttttgtggcgcgaggatctgaagtacttactgcatattcttgttttggaaacataaattgataaacacatacacctactatgagtgaaaagatgacaatggaaacaataatcgtattacgtttatttatcatcttttacctcctctgtgtatgacgggctattagttagcttgcgcttcgttctttttgcgctcctctgcatgttttataatgcgagaatgatctaagtttaattcaaacttgtttcgttctttttctaacagttcagggtttgaagaaaacttgtttaaatcgttataaatacgcttcatgcgccaagggttatctgttggagttggtgtacctgctttaataaccattggaataacatcaattttagcttgaccctgcttgtttaaatgatactgaaccatcgctgtattttttgtacttgaccacccttggtcaaaaataaagtttcctaagctatagaaaataaccgaacctttatatacgtcatatgactgtagaacgtgcggatggtgaccaatgataatgtccgcaccagcgtctaccatcgcttttgctagtccttcttgacgaggacttggctgtgcatcgtattcttcaccccagtgggcatttactacaactaaatcagcatttgctttcgcttgctgaatcgtgctgaaaataagatccggatctgcttttaaaatacctgggttgttttttccagccgacattccgtctgaatatacatccgtaaaccctacggttgcaatgcggataccgtcagcatctttatacgaaatatgctttgcttcttcagagttacggccagcaccaacaaaatctaatttgtttgcttcaaaagtagagatcgtatcttctaacccttttgcactgtagtccattgaatggttgttcgctaagtttaatacgtcgaaacctgcatttttaacagtcgctagatcagcaggcttactatataaatgaatacctttttccattgctttatatgaatctacgtcatttgttaaaatcggcgtttcgtagttcccgcttacgtaatccgaatttttaaagaacggctccacgttgcggaatacaaaatcttctccgtagcgttcagttacttctcttacatggcgacccatcataatgtctccgaccatagtcatcgttaaatcattattggcctctggattagccgtctcagggttttcaagagcatccgaacgctccatccatcctgaaagagctaaaattacgattaaaattggcgttaagataagagcttgcttgcccgttgtaggctttgttttctttataaacatcaatactttttcttgaaaatttaattttttctctttcaacgctttcaccttcctttaccagctgcggtttgtctgtgtattaaaataaataataaacttgcataattccaaatgttacaccacttaataaaaccgttgttccaactgttaaaggaagaccttgcttttgcattgtatttgcaattaagcccggtacaatgataccaattccgcgtaattcaaacacttcaaacggcaagatcgggaagaaataatcaaatgcaactttaatcacaatacccgtaattaacatcgctgtaaatttgcgacgtccatataaaataactacttttgagattccgtacacgacgataacatacgttaaaatactaattaagaaaatcattaaaatagtaattggctgatcaaatacaagagctaaataccccggtacgataagaccggctggcaatacgcccgttttttctgtaaaaattaagcttagtgtaacccctaacacaagggcaatatataaatctgatccgaacatgaaatggcctcctagattaaactgcttttctcatctttttcatttcaataatagcttcaacaagcggctcggctgaaccgtggatatttccgacaccgtatacgatacgatcttttaaataaggcttcatgcgctctaaaatttcttctgtagaagcgccttccatatcccagaattcttttgtcggcaattcgcctctttgatatgctgcagcgattggtgaggtcgtctgaccaattgcaatcattacgtccgcttcaatgtatggcattacatcttcagcaaattgctccgtgcgatctacacggtccggacggcagttcataatgacaataggaagtttttcactatagttcattgaatctacacgttcccaaatacgaagcgtggaagaagcatcgttggcagcaaatccattcactaaaaatgctggatttttttcatcgccaaacgttgtaattctcatagctcctgggtcaggctgggcatttaacattcctctcatcgctgtttcagcatcgataccaagtgcttctgctactgctaaaccgatggaagcattatcagggaaaaccatataatcaaattcacgtaaatacgcttcagatactttatcattgtcagctacaataacttttgtgttgcgctctgcggctatttttttatagtattccaaatatggaccttcaattgtaacaaggtggccattataaggaatagtagcagtgaacgcttgagcaacttcatctagagttggacccattacatccatgtgatcttctagtacgtttacaataacgcctaccttggcttgaatcagctgattttggaatgtgatttgataatcgggctgtacagccatacattcacaaataagagcttccgcgccaatatcggcaacttcatttactactcgtcgctgttctccaatgttcggaccttctttacgacgaataattggttcttcttcacttgtatgccagtagatcatacgcgcttgtgttcctgtcgttttccctactgttttgtaacctgcttcttttacaatacctgtaatcaatcgtgtaacggtggattttccgcgaataccattaacattcactcgtacaggaattgaatgcagcttgcgtaaatgtctgcgatactcccaaacgccataccctactaaaaataggcagcataggataattaagatcatgtttcattcttctccttccaaacttctcctgttggatacgttatgaatgcttttgattcataatgatagatatacgatttcatagtttcactccctttatatatgtatgggagctaaatcaattaacagcgctagcatgctgctaaaacacctgctttgaaaaatggactcgagtaccaatttcaacagctctaaaactatcatctgtgctcattagtggtcaatagctcaaatgttatatattcttacaattccgattgtctatttacagaattaaaaactcattgttttatttaaaatttacagaataggtctaaagtttatttacctagaaaaattccatcgatacctttttttaccataacaacaggaatattttatacatcactcttacaattaacacacggaaatattacgtaattaaaaatttcttaactttagaaaacgttttgtaata

SEQ ID NO: 15 - DNA, 113041 bp, Priestia aryabhattai
  source 1..113041: mol_type = genomic DNA
cagggaaattcacgccaagttcctttaatttggcttccgcttgctccttagtaagcgtgccgtcgcggaactgatccataatagctttcgtttttttcttcgtagccgcatctagattgttgaaggggccgtctttgtgctgaggcaagtttacgccgagtttttgtaatttttcctgtgcttttttcataatatcatcaactttttgttgtgttgcgtcatccgtatttgttgtactgccatttgttcgctctacaactgttgaagagcttgtgtcatctttgcttgctgcaaatgccgtggagtttgcagcggccataactcctagtgttaaaccgcttgccatgatataaccgaatagtttctttttcatgctgttgtcactccttaaaagttataggggtgtggtacagagctgtccacaatttttaatgtaaccaccaatagtgaaaaaatggtgaaaatagataaaaaacgaaaaaatatagacgtttgttgaactatacagctcttttattggataacaaaatgagattcgatatgattttatctaaacaacagcaaaaaagaatggagactttatatagatgagcgttcttaaaaaattggtaatagctttgatagttgcgatcacggttttaagcctcttgtttttgtttcgagacgagttaaagccaggtccaacgctagaagatttttcaggagcaactgagttgcatcctgtcgtaaaagaaaagaaaaataaacttgttcaacaagcaagtgaccaaggaatctcgcttgtcattacggaaggttttcgttcaaaagaagaacaagataacctttatgcaaaaggcaggacggaagaaggcaatattgttacctattcaaagggcggccagtcttatcataactatggactagctattgattttgctattcagttaaaagacggacgagttatttgggacatggaatatgacggtaataataatcagtctgattggatggaggttgtagatatcgcaaaaaatttaggattcgaatggggaggagattggcaagggtttaaagactatccgcattttcaaatgagtccggaaaatataaaaaaccacacacgctaataaagcgtgtgtttttttagagggataatacaatttcactatatctatgtcagaacctctaacgcgaatagaagcttgtaatttctttttttattaatttaccgttaagggaattatatatattaatataataaaaatatagacggataattagaaagaggggtgattagagagaaatgccctctaaaaatgaaagacaattcgtataaagatatgcgttaactaatataatctattgattaagcttatacaagtaccttcagcctagcgaacgtatgcttacatatcagcaaatgccaacaaagccttttatttttctagcatattttatttgaagatagttcattttgattacaaaaaagagataatttgtcaactgttgactttgctttaagggtaagaatataatttttaacatattttaaatattttaaaaatttaaatatttattattgttcgcaaattaggagggggaaaatgattgtttttgacggagtaaataaatattacggtgattttcacgtattaaaagatatcaatttaacaattgaaaaaggtgaagttgtcgtcgtaattggaccttcgggttcaggtaaaagcacgatgttgcgatgcataaattatttagaaacaatatctaacggacagttaacggtaaataatatattggtcgcggataaaaaaacaaatattaataaactgcgtcgcaatataggtatggtgtttcagcatttttatttatatccgcataaaacggctttagaaaatatcactttagcacctatgaaagtattgggacagtcgtcaaaagaagctaagaagacagccctatactatttagataaagtcggaattggtgaaaaagctaacgcctacccgtcccagctgtcaggcggccagcagcagcgtgtagctattgcgaggggactcgcgatgaagccagaaattatgctttttgatgagcctacctctgctcttgatccagaaatgattggagaagtgctggatgtcatgaaaacattggctaaagaaggaatgaccatggtagttgtaactcatgaaatggggtttgcaaaagaagtagcggaccgcattgtatttatggatcaaggaaaaatcttagaagaggcaactccggctgagttttacgaaaacccgcaagaagaaagggcacgtttatttcttagccgtattttaaatcattaattgtttaatagggggagtaatatgaagaaatcaaaaacgtttttaaaggcagctgtgctttcattagcagcggctatgatgttagcggcttgtggagggaaaagtgaagaaacgagtgggtcatcagctaaaaaagatgcgctcactgaaatcaaagaccgagggaaaatcgtcatcggagttaaaaatgatacgcgtttgtttggcttaaagaatccaaagacgggtgaagtagaaggttttgatgttgatatttctaagcagctggctaaagagattttaggcgatgaaaacaaggtagaatttaaagaagttacgtccaaaacaagggttcctcttcttcaaaaaggagatattgatgctgttgttgcaacaatgactattacagatgaacgtaaaaaagaagtagactttacggatgtatatttccaagctggacagtctctgcttgtgaaaaaaggcagtaaaattaaaaacgttaatgatttgaagaaaggtactaaagtgttggctgttaaaggatcaacttcagctattaatattcgcgaaaaagcaccagagacaacggtattagagtttgaaaactatgcagaagcatttacagctttaaaatctaagcaaggagatgctttaacaactgatgatgctattctttatggaatggctgatgaagatccttcttatgaattggtaggaaagccgttcacagaagagccttatggcattgctgtgaaaaaaggaaacaaagagctggtagatgcattaaacgatgcgcttaaaaagataaaagactctggaaaatatgatgaaattcacgacaagtggatcaaacaataagcgtacagttttcttttctcaggatgagcagcattatgctcatcctgcttgtttagttgaaaggaggaaggaaattgttggatttttcaattctgacgaacaatgtggatctttatttagaaggttttaagtacaccattatcgccagtctgatcgctttagtggccagttttgtacttggtacaatcattgcggtaatgcgaatagcccctctcaaaatagtaaatgtaattggtacggtctatgtagagttcattcgaaatattccacttgtggttatcgtcttttttatttttatcgtggcaggaatcagcggtacagcagccggagtgctgggactaactatttatacggcagcttttatcgccgaagctatacgagcaggaattatggcagttccaaaagggcagcttgaagcggcacgttcatccggccttacgtacggtcaggcgatgcgattcattatattgcctcaagccattaaaatcgtcattcctcctcttgggaatcaatttattaatttagtaaaaaactcatccgtgttagggattgttgctggttttgatttaatgtatcaggcggatcttgtttcctctcaaacttacgtagtgtttgatgtgtatatttttgtggctctgttctatttagttctaaccattccgttgagcttaggagttggttatcttgagaaacgtcttggtaaaacaagctgaaaggagtgaaagtgatggattttatgggtgcttattctcctgatcacctttccttcttaatggaaggattttgggtcactttaaaagtagcatttatttcgattgtgctaagttttcttattggaagtatagtaggtattttaaggtatgcccgcattccagttctgtctcgtgtactcgcttttatcgtagaaattatccggaatttgccgctgcttttaattatcttttttacatactttgctttacctgaaatcggaattgatatggaaattacgtcagcagcgattgtggccctcactgtatttgaatctgctatgatttcagagattatccgaagcggattaaaatcaattgaaaaaggacaaatcgaagcggcgcgttcatcaggtttaaactattatcaaacgcttcgtttcgttgtgctgccccaagctttgcggagaatggtacctcctttagttagtcaatttatttccttattaaaagatacgtcgcttgcagtagtgatcgcacttcctgatttgctgcataacgctcaaatcatttacggacagaaacaaagttatgtggtcccaatgtttttgattatcgcgatgatgtattttattgtaaactatgctttatccatcattgcaagaagactagaagtcaaaagggtgtagatactcttttgactttatttttggaaaataaataacattgacaatgtattaattcaacgcataaaatgactaaagtaacagtggtaaaatcagatcattttcattcatcatagagaagaaaaacagtgttggttcaccccctactgaatatccggtaggggtttttgcgcaagaagtgatttggttaaactaacacgtaaaatgaacagaagggacgggcatcatggaaaaacaagatcaaaatttaaaaaaaggtctgttgcctcgtcatgtgcagctcattgcgcttgccggtatgattgggacaggcatttttaaaggtagtgctgatacgctaggtattgcaggaccaagtgttgtactggcgtatttatttggcggtcttatcttatttattgtaatgacagcattggcggagatggcaattgtctatccgaatatgaacgtacaaaatttagtgcataaggcattcggtacgcaaacctcttttattgtagggtggctgtactgggtgaactggattgtcgtgacagttgttgaactgcttgcgggaggaagctttttgaagttttggttcccttctgtacctctttggctcttaagctttctctgtgcagtgctgattgtagggatgaatttatttcaagtgaagtattacggagaaattgagttttggtttgccggtattaaagtaattgctcttactgcttttatcattttgggagctttcattttattcggtgtgattccaagtgatgtgcaaaacccctgggcaaattatacggctcatggaggctttttccctcacggcatgagcggtgtgctgagtgcctttttaattgtgatgttctcttacggcggagctgaattaattggtgtggccgtaacggaaacaaaagatgtgaaaaacgtgttaccgaaagtgatcaaaggcacagtatggcgagtgattggcttttatattttgcctattttaattatttgcggccttatgccctggaattctgtatcaggacaagacagtccatttgtgcaagtgtttagtatcaccggactgccgggtgcggctcatattatgaacttcgttttattaacggccgttttatcagcagcgaattcagggatgtatgcaacttcgcgtacgctttatgctatggctcaaagcggagaagcatctaagcgcttcttgaaagtttcaaaaaacggtattccgattaatggtttaatgattacggctgtttgtattttaatgggtgtgtttttagcttataaaacaccggataatgtaattagttatttaatgaccattccgggcttcacgattattcttatttgggtaagcatttgtttagctcaattaaagctgcgtaaagggtataaagaaaagccgtttttcgcattaaagtggtttccttatacaacgctctttgcaacagcagcactgcttgttatttttgtatcatttatgtttaataaaaacaatgtgattggatccagcgtatgtgcggttatcttggtcgtactcctcattttttcatttattaataaaagtcgaaaagaaaaaaagtttgaagtatagcaaaaaggcaatatactagaaagacgagggtaaaagcttgtctttcttttttttgcggaaatttctgtatcacgttacatatttctagatgaaatgtttagttaaataaataaaggatgaggactacaatggaatcaaataatgtatttacaacaaacccaaagaagaaatcaaagcacttagccgtgatttctttggcgattatgggagtgggcttcgttgccactatgccttttggtgattcaatttggggtcggttgcttcaaggtgggttcgaagctggattagtcggcggattagcggattggtttgccgttacggctctttttcgtcaccctttaggcattcctattccacacactgcgctgcttcctaaaaacagacagcgtattacaagagggctagtctcaacgcttgaaaacgactggctgtcaaaagaaagtattcaagaaaaagtaaaaagaattgcgtttacaaagcgtttgcttccgattgttcgaaaaggtgttcattcggaaacaattcaacaaaaaggaacagtactgcttgttgatgcgattaatcgtgtggatacagagaaagtcgttcctattattgaaaaagagctcaagtcatcgctttcagcaatagagttaaagcctattgtgcattcgattgttggagaagtggtaaaaaatcagtatgatgaaaaagcgcttgatgttcttttaaataaaggagagagctggattaaaaaagaagaaacgcagtatcagctcggaagtattgctaaaaatgcgcttgataatattgagcttgatggtattttacaatttgctctcaaatcatttcaaagcatgattaatgaagagaagctagggtctattttgcaaaatttattgctttctattacagggcgtcttcgtaacgaagatgatgaataccgccttgctttggtaaatggaattagaaaagagctgcaaggcttggagcagaatgaagaacttcttgaaaaattagaagcatggaaacaaaaaacgattaatgaattaaatgtaacgaataaattaacagaaatcgtcgataaaatgaaagcgaaagtgacagcattcattgaaagccctgaatttatgaaaagctacgccgttccttacgtagagagctggctgaatgctcttgaagaggatgcacagcgtcaagaagcaattgatacggctattcaaaagcaaatcatgagctttgtagacgagaatcattcgaaaattggacagcttgttcaagaaaacttagataaattagatgatgaaacacttgtggatatgatggaaaacaatgtcggaaaagatttgcagtggattcgagtgaacggagctctatgcggattcttgattggtattgtattaacggttattaaattagcggtataaaaaaagaagcacgctccttttggagtgtgctttttctattaatcatctatttctacactgatcacgccgccgtttttggcatctactgaaacagttgcttcacgtttatcggctgtgtcaatttcaatttcatatactaaacggttgttttcttggtctagatccgtttcattgacggttcctttagcactctttaaagctgtttttatcgcttgatctaatgaaatagcaggggaaacgttttgaagttcctcttctttctcatcttcatcgtctttttgctcttcatcaaattcaatgattttaccgctgctgctgtcaatgtctacatcgtattctttattaccttttgtgatgtctacttcatattgtttaacgccgtcatctacggctaattggatatttgtaatgtcgccgccatctgttttttgaagggcaatgtcttttgccttagcttcttcaatcgttgtggtttgtttcttatcattgcttttggactggtctttcattgcatacgcgcttgcacctaatccaccgactagtactacactggctaaaacggttgtaataactttcatatgttatggcctcctcgatttgttgttaagactatcttagccaatgaactttaaaggaaaagaagaagaagtttaaaattttcttagaaataaataaaaatggataagaaaaagcacagctttccgctgtacttttaatcatcgtcattttcataggtgatggaatctacatgtccggagtaagcatttatcatcactttagcttctcttgttttagactgatcaatttcgacttcgtagaaggtttggccttcttcctcttctatttcaactgaagaaaacgttccttttactttttgtaaagcaatgtctcttgcttgttccattgaaatgagaggctcgtcggatgtaggagaaactggtggttgctcgctctttttttgctcttcttctgtattatttttagtttgggtagacgtttgtttctctactttttgtttgattaatgactggacttctccattttctccatttactgtgatgtggtatggaatatcatctttaagcaaagtgattcgataaatcggttcatcatctttttgagaaaagcttgcattttcaatagtgccgccatatttttgctgaatcatactactgacgtcagattcggataaaattgtatcaggccgattcactgcttttgctattccgtaaaagcaagctgaaccaacagcaagaaaaataagtataaaaagcaccgttttcttcatacattcacctccagtatcttaaaaagtagtatagcaggcaattcttaaaaatctctaagaaaaggcgagaaatcaaagaggaaaggaaaccgttactgatgtcccttttccctcttggctgttaatctcaatacgcccgctatgagcttctacaatctttcgagcaatggataatccaagtccagaaccaccggtttctcgatttcgtgctttatctacgcgaaaaaagcgttcatacacgtttgataagtcttcttttggaataccaattccttgatctgtgaccgtaatcataaagctttcgcttcttgttatggttacctctaccgctttttcactatatttaatggcattatctaagaggatgtacagcagctgctttaagcgtttttcatcggctgttaagacgggatgatccgtttttatatttaaataaatggttcgttcaaaggcttgttctagatgcttgattgtttggttacagacggccgccacatctacgtgttccatatgaagctcccactgcgactcatctttcgcaagcacaagcatttgagacgtaagctgtttcatgcgtaacgactcagagtgaatagcttcgatggcttcttctaaaatatcaggccgcttcattccccagcgttttagcatattggcatagctttctacaacggtaaggggtgtttttaattcatgagaagcatcggatacgaactgctcttgttttttatagttttcctctaataaatccatcatattattgaaggtgttggccatttgatctaactcatctttagaaggagaagagaggtcaatttttttgaatgtgcgagacacttgaatttcttccatagtatgaataagagatttgataggtcgcaaaataattttacttaaaagccgtccagcaaatatagttggaattaatataacaagagaggcaatgagcaagataaattttaatgtctgcagagattgttccacatctgccagttgttccgtgacttctaaagaaacaacttcaccgttcgtccaaatgacaggggtgtgtgaaatcgcgtatagatggccgtcatcttctttgatgcttgtttgttcatttgaataataggaataaggtaagtcctgaagctctttcgtttgatccgtaacggatacaactaaaggactgccggatttaggtaaaatacgaatcatcccgttaggaggcaaataggcacgaagcaaattggcttgtttaaccgtcgcactcgtttgctttagcccatttgttacattgcttgtttctgcttgcaaacgttcaattgcgttgtcttccatggtcttcttgaaaatgaagtaaatcgaactgtttgcaattactagtaaaataaaaagcagtgcagttgatgtaagaatcatctttgtttgtagtttcataagctactccttcagcatgtagccaacgccgcgcactgtttgaatgtaaggagttgaaaatggtgcatcaatctttttgcgcagataacgaatgtatacgtatacaatattggtgtctccgtagtaatcgaatccccacacgtttgtaagaagctgttcaaagctcagcacttgattgttgttttgaagcatatagacaagcaaatcatattctttaggagtcagctcaatagcttcattttcacgcgtgacttctcgcgttttttcgttaacaactaaagttcctagctgcagagtatccgcttctttttcagcaggcgatgctgatgcaggacggcgaagccatacgcgaatgcgtgcaaaaagctcttcaatttgaaaaggctttgtaatgtagtcgttcgctcctaaatctagtccgcttaccttatcaggaagggcgtctcgagctgttaataagataacgggcgtttgatcatcatttgctcgaatgcgacgaagtacttcgagtccgctcagttcaggaagcatcacatctaaaagcagcaaatcccaatcgtgttcttgaaactctgccaatccttctgttccagtgtaagccatgcccgtttcgtacccttcatgttcaagctcgagctgaattaaacgagcaattttgcgctcatcttctacaattaaaattctgcctttactcaacaaaaattcccccttgtgtctatgtatagttgcgtacattatagcacggagagattggaggtgtataaaaacagccggaggttagtccggctgctcattggttgaaagaggaatatgcaagataatggcagtaccttcgtgaagagtagatcttacttcgatatggcctttatgaagttcacaaatagcttttgcaatgctcatgccaagtccagcaccttctgttttttcggttgtatttgtgccgcggtaatagcggtcaaataaatttttctgcgtttcttcatccattccaattccatcatcttgaatcgtaatcaagacgcggtcactttttatcgcggtcgaaatcgtaatgggagtgttcttagggttatgtttaatagcattaaaaattaaattatcaaccattcgttcaaaccagcgcgggtcagcttgaataaaaggttgaaggtgaacgggtacataagagaattgaacatttttaatggttcgatcgttaacgaattttaaaacaatatgctgaagcaattgatgaacgtccactttttttgtttctaaaacaaccacgttatttttaagcttaaaggccagtgaaaaatcttccacaagctccaccatgtattcacttttgtcacgcagcgtttggccaatttcttttagctcttcttcgttccaattgtaatggccgctttccagcatgtgcccatatccttgaatcgtcgaaaggggtgttcgcaaatcatgtgatattccagtcatccattcttcgcgagtggtttctaactgctttcgttctttttcagctaagctaagctgctctgccatctcataaaaggcgtttatgacttctgaatacaaacgatattgaaaacgtacttttccatttttccgaaagacgcgcttccgctctttttctgttagcacttctgaatagtttccgcttcccatgcgcccgagccagctggtgaagagaagtaaggggccaccgtagcgaaaagcgttccagattgaaatagatatagttgctaaaagaactgaagcagtaacaataactgcgcccattactagttttttaataattgagtagtcagaaatagtttgatgtttgttaggggtatggaaaatccatgaataatttttctttgaatcatgaaaaattgtagctgtagattcatatttatctttttcaatttttcgggaaataatgtctaaaggctcataatgctgttttgttttggacattcgaaaggtagagacaactttaccttggttgttaataacttgcagagaagcatccttacttaataactgtttttccaattgaggtactttttccgttattggaaggccaccttggctgtaatttttatataaatcgtataattggtcttttaattcatttttatagcctagtatgtagtatgtgggttgtacaagaaacgtgtccagttctgtgacgatatgatagtctcgaaactttttctgtttttcaatatcgagaagttgattaattgtataatgtttagggatattcttaggagtattgacttctccaattacatctccttttttgtttactacttgataccataagttttcacttttaatttctttcgttaaatcttttggtatagtagcttttccattttcaataactgtatcagttgttaacatgcttagagatcctgtaggaaagtctcttcttatatcttgattcgtaagatatacagctataaatataaaacaacaaaaaataacacagcaaatgcaaatagaagtcataatgaactgaaacgaaaaatgaaaggtcaaccttcttttaattgatttcatagcgctttgccgttcactaatttatatccaagtccgcgcaccgtaactaaatgctttggactgctaggattatcttcaattcgttctcgaattcttcgaatatgtacggttactgtattgtcgtctacaaactgattatatccccagacggcttcaagcagctgtgatttagaaagaacaatattcatatttttacaaaagtgaagaagcaataaaaacacttgtgcggggcaagaaaccgtttgaccgtccacaatgagttctcctgccgattcatctacagtaaaacgatcaaactcatagcgatttgacgattgtggttccgttcttatagaagttccttcagtcagcgcttgctttctgcgcagtcgtgctttaattcgtgctgcaatttctaaaggattaaacggcttagttacgtagtcgtctcctcccatggcgaaacccgttagtacatccaagtcggatattttggctgttatgaataaaatatacgcgtttgagagctcacgaattttaggacagatatcaaatccgctttgatcgggaagcattacgtccaacaaaataatatcaattgtttgattatgtaaaacatccagcgcttcttgagcggtgtgagctttataaatttggttgaatccttctttttttaatactgtctccagcattttgacgatggcaatttcatcatcaactagcaatatagacgcatcttccaacataaatcacctctgtttcatttcatacgtattcgattttagcataagaacattacaaaaagattaacaaaattggaaaatgttaaggaaaagataatctcccggttattttcttgaaaacttcatttcatatactaaatgcacagacacatagtaaaggagttaaaaggatgagtaatgattttaggcgggttaaagtaattgatagtatgagaggattcagcttgtttggtattttactagcgaatatgctgatttttcaatatggcatttacggaaaggatatgattcatctcttctcgctatcaccaagtgattcagcagcctatgtctttttaaaagttgcggtagaagaaagttttatgccgattttcacctttttatttggctattcaatggtaaagatgaaagaaagcttagaaagaaggcagctaggcgtgaaaaggcatttctttcgccgttttcttctgcttctagggttgggcctactgcatggagtgtttttatgggaaggagatattcttacgttttacggaatgatgggagtatttttactacttttctttttaaatcgtaaagccaaaacactattggtgtgggcatcgattttgctgattcttacgggagcagctggttatggttcattaaacgataatatgtatcttcttagcgataaacaaacgcttacgacatatgtaaaagatacgattcatgtgtatggaagtggaacttatgaacaaattaaagaccaccgcaacaatgttgatccgatgaatatggcaggatataaatttgcttttgccttcttgtttacgccatttataatgggggctttgtttttatttggtatgtatgcaggaaaggaaaagtggttttacgacgtttcagctaatcaaaaacagtatggccgttgggcggccgcgctgattccgcttggcttgctgttaaaaggaactatgtacctgtggcccgatgctaattgggctggttctacacatatgttagggggaagtcttctatctcttggttatattgcaggctttgcttggctatatgcgaaatgtgaaaagtcatttttgatgaaggcttttgaaagcgtaggaataatatcacttagcaattatttaatgcaaacggttatatgcacgacgattttttatggctatggcttaggctatttcggaaagcttggcacgatttcaggaatttttgtctgcatcggtatttacggaattcagcttatcggcagttatatgtacgtgcaaaaatttaaaactggaccggtggaaaagctgctgcgcatatggacaaatttttcttggagtggaaagccaaaagagaaaaaagctttaccgacagaagtaaatcatccttttgttggatgatagcggtcaaacttatgtaaaaaggagatttttaaaatgtgggccattagtataaaagagtttcaaagcttatttaaaagtattaaatcaattatcgttattttaatcgtatgcggtgcttcctatggaatcgcccatatagttagtcaacttggaggtcaactgacgagtgcacagattcgagatggagccaacgggggaattttggtgatgcttctcgggttcggacctttgtttatctcaagtctttctcataatgttattaatcaagaaattaaaacaagaacagcaaggtttttagttaccaaaacatcaagagagcgcattgtactagggaaattcttagggatttgttgtttctggcttgtttgtatctctatttcatttctactgattgcgtttatttcgcatcatttttctttttatatatttttagagtgcctactattcaccgtttgtatcatttcatttgttttaatgctttcagccttaatgccaaacccaactcatactatgtttttatcgattattttatcgtttgttctaccggtactgagtggatggagcatattttcatcaaaagcgtacattgcatggtttaagtatgtgacaccctactactatttaaagttggagaaaggctatctaacagttcttcttatttttgcagcactttgtttatgtacggcactttggagttttaaaaggagagaagtataatatgtatgctattgaaacaagtgaattaactaaaaaatatggatctacaatagttgttaacggtattaatttacaggtaccacaaggagaaatttacggatttttagggagaaacggagcaggaaagtctacctttattaatatgcttaccggcgtttcatttccttcagcgggagaatttacgctgctgggacagagtgatattgatttagagcttcagaagaaaataggtgtgcttcctgactatgctaacttttatgatgagatgacagcgctcaatcatttgcgctattttttaaagataaacggccatcgtttttcgaaagaacactgtagtaatgtactgaagaaagtaggattagaaggacatgaccatcagaaagttggaaagttttcatttggaatgaaaaagaagttaggaattgctcaagcaattgtaacagacccagatcttatctttttagatgaaccaacttctggagtagatattgaatctgctcttcgcattcatgaattaataagagaacttcaaaatcaaggcaagacgatttttatgacgtctcataatttaaatgaagtcgagaagatttgtacacgtgtagcaattatgaaaaatggggtcattttaatagaaggtacaatggaagagctgcgctttcaatatcaagcgaaaaaaacggtgatgatcaaacatgatccttatccaaacagtcacaaagaatacattcaacagtttttccgtacgttgagtcccgaagttgaataccatcacatgtacacaaaagtgatgcttcaaaaagaaagaaatattcctcttattattcgcgaattgattcaatgcggcatcgacatttatcaagttcacgtcgaagaaccttctttagaagaaatctttttgcaaaaaaatattgtggatcactcacaggtgagttaatgggcgaaagaccgttggtttactactcagcctgaatacattatttgtaaataccagttaggaagcttctgacaaaaacatgttcattttctcaagaaactgataagatagctaatgacatttaaaaataagaaaggatttcgattatgttatcagctattaattcagtagattataccattttccacgcggtgaatcagtatgcctcacacgtaaagcctctagattcgctgatggtattctttgcagattatgcccagtatgtacttatcgttttactcggcttgtttttacttattaataaaaacggcagccgtgttgtagcatttcaagctttatgtgcttgtgccacaggagtcattatcaataaagtgattagtttatttgcttatcgagatcgtccgtttatctctcaccacgtgaatcaacttattgatcacgccgcaaattcttcatttccaagcgatcatgctacatctgcattagttatcacttttaccatttggctgcatttcaaacgttcagggcgcatgtgggttgtcatgggcgtactcattgccttttcacgcgtatgggttggcgttcattatccattcgatgtgttaacaggagccgttttaggctgcgtgctggcgctgtttattcattatgttatttttaatacgaaactgatgagggctattaccaacttgtctatttttcgaaaatcagcttatgacgaacagtctcaatattattaagaaaaagtcgcaaatacgcggctttttttattgggaaatttttaatgcacttaatacttgttttttaaaatttaattgtgtacaattaaattacagaaacgagaaataaaaaacttttaataaaattaacgaaaaagaggagaggtttatacatgaaagctttatatgaaacaacagtcgttaacacaggtggaagaacaggagaagttcactctttagataacatctttaacttagacgttgcaacacctccagcgcttggtggagaagcaacaacagcaacaaacccagagcaactatttgcagctggatacagtgcttgtttcaacagcgcgttagaatttatgttgaaaaaacataacgtagaaatcaaaagcagtgaagtaaaagctactgttcagctgcttcctgataaagctgatcaaggagtgaaaattggagtagcgcttgaagctcatatcgaaggcttagatttagaaacagctaaaaaatacgtagacctagctcattcatactgcccgtattcaaaagcgatcagcggcaacgtagacgtaacggtagaagtagtttaattgctttaaaaagccctgctaagcatgtaaagcttagcagggcttttttatttgaattttctctattcatttgtaggcagtactagtataatgaggaagaaaatgaatcattcgcacagtttaggtgctcttacatagcgtaagaggtaacagggaatcgagtgcaagtctcgagcggtccagccactgtaagcagggagttttctatcatatcgtcactcaaaatggggaaggcggtagaaaatgatgatctcaagccaggagacctacctattctgtacacttgactcttctaggaaagaggcggtgtatcaaggtacgcagtgagcaattgctgtttattttcatatgccgacacatcctcaatttctatagaattgaggcttttttacattttattttaaaaaaaggagtgtaggaaatggaaggtttatcagtttttttacttgtctttttattaggaatcaggcatggattggatgcagatcacttagcttttattgacggccagactcgatataattggcgaatggggagccgttttgccccgtgggtcggaacgctgttttcactaggtcatggaggaatggtggccgtcacggctggggtgctgggcgtggtgatgaagaattttacgtttccatcatatttcgataattttgcatcttgggtatccattatctctctctttctgattgggacactaaacacatatcatttgcttcgaaccaaaaataaagaggaagagtttcagctgagcgggttaaaagggaagtttattccgaaaatcgcaaaaggaacaactaatccttttttaattattcttgtaggagcattgttcgctttagcagccgaaacggtcagtcaaacggccgtgtggtctctagctgtagggaacgcaggcaagtatacgccgtttttgttaggactagtgtttatgtttggtatgatgcttacagatacaatcgattcgatgattgtacataaaatggtgaatgaatcgagtaaatttggacaatctgcttcccgcttgatgggctgggttattgttgtcctcgcgtatggtgtgtcattctatttagcattcactttctttaacccatgggccgaagtaaactttgaaatggttggcgttattctgtttatttttttagtgtctatgtttgtttttgtgagtgtgaagtcaaaagggaaaaatattaaaataaatgtcaattagtcaaacgaaagctttaatctgttgaagattgaagcttttttgtataaatttgttgaagtttatggctattttcgggcggttatgaataagttaaagtattatctgtatttaaaggatggaaaattgtctgaaaaccattataattaaggataatttaaggtcgttatgtgaaacgtagaacatagttatacgtgcgataaataaaagcatttaatgcaagcagcaggggttgtttggaggaggaattgatttgagtcaggtaatggtagaacaaagcgtgtttagttatttaaaagaacacgaacaagagatgcttgaagatttagttggatttgtgaaaaaagaatcaccgtcctacagtaaagagttagtagatcagtgtggaatgtatttaacgcagctgtttcaaaagcgtttaggggtaggatacgaaatcatagaagaaaaagaagtaggaaaccacttgaaatttacgattggagaaggagaaaagcagcttttaatcatcggtcactttgacacggtatgggaaaagggaaggctgagtctaagaacagagggaaacaagctgtacggtccgggaattttagacatgaaaggcggcattgtacaatctatatgggcgattaaagcgattcaagagcttggcttatcgctcgataaaaaaattgtgtttttctgcaattcggatgaagagattgggtcaatttcttctaaaaaatatatagaagaagaagcacaaagaagcgaagcagtgctagtagcggaaccggcggtggcgggttcaggtgcgttaaaaacgtcgcgcaaaggagcgggaattttcaccgtaaaagtatggggacgagcagcacacgcgggtaatcaccacaaagaaggaatcaatgctattgaagagctggcgcgccaagtgattttcttgcagggcttaacagattatgaaaaaggtacaacggtgaacgttgggacatttacgggaggcagcggtacaaatgtagtgccggaatatgcagaagcgcacgtggatttacgtgtttctacagcagaagaagcaaaacgtatgacggatattattttgaatttaacacccattttaaaagggattaagctcgaagtaacgggaggcatgaatcgtcctccgatggtcaagtctaaacaaacggaagagttatttgaatgcgctcagtcaatcgcggccaaactgggtatgaaattagaagaagcagctgttggaggcggaagtgatggcaattttacagcagccattggcgttcccacgttggatgggttaggagcatgcggaaaaggaatacatgcggaatatgaacatattcaaattgatacattatccgagcgttcttctttatttgcgaatttgctgctgcaaatataaaaaaagcccgcctcaaacggcggggacgaatttgaaagcttatattgggagagtataagctttctttttttatttactgctttcttcttgaagagaaaaggcagtttctttctttttgaataccactccatcaagagcaaggaactggctccctgcaaggaataggtgagcagacatggcaattaaggcaatatcaaactcaaacccgccaacaaatccgcttttaagcttggctgtaaaaatagcgccaagcataactgccacaaataaagcagctacgactcttgttgctagaccaagaataataataaccccacctacaagttcaatggttgcaacaatatatgccatgaaaccagggattcctaagctatcgaagaatcctactgtattttcaatcccgccttgccatttttgaaagccgtgtactaaaaatgtaaaacctaatactaaacgaataataagtgaaccaatttcgacgtttttattcactttacttcctcctttaaatgtatttgaaaaacactacgttatgtagtgtaaaagcccgaaaaaataaatgtagcaattaaatcagaaagtttttttgatttggataattttacaacattatgaacatcacactacatattgtagtgtgatgtttgtccccagtcaagtgaaaatataaaattagaccatttggcatacaaaaattttctgaagggcacttgaaaaatcctttaattatgtacaagttagtaccttattttcaatcttattcaccaacatgctatactgatggcggaggtgttacgatgcgcttagaaaataaaagagttattgcgcttgttagtgcagactttgaagatctagaactatggtatccagtgatgcgtcttcgagaagaaggagcagaagtacatttagttggagaaaaagcaaacgaaacgtacatggggaaatacggtgttccagctctatcggactacgcgtttaaagatgttgatccagctgaatatgacgctattttagtacctggaggctgggcgccggataaactgcgccgctaccctgaagtaattgaaatggttcgtcatatggatgaacagcaaaagccaatcggccaaatctgccatgcaggatgggtattaatctctgcaaaaatcttagatggccgaaacgtaacaagtacgccaggaatcaaagatgatatggaaaatgcgggagctatttggcatgatgaagcagtcgtaatcgacggccacatcatttcaagccgccgtccgccagaccttcctccttatgcaaaagcatttgctgatgtactagcagagcaataagaaaaaagccgaaaccgcattggttttggcttttttataagatccgctaaaaaaagaaatgataaagtaaataaaaaataattattaaaaaagcgagcagatgcatctgctcgcttttgttcgtgtttcttatcagtaacttgctttttgcaagtgtaaaaacaaaatgattactttctttataaaatccatgattacggtttttgtatgtttcgttgttgttagggcacaattagcattgattgtgcttgcatggatttcatccattgccgcggtttgtttttccacatgatcgattaacctaaacgacgcaagccctacctctcttgcatccttacggctccgaagccgatccagtgtgaataagttttgttcaaagacatgtgtcgaatgccagtatttttaccttgcattgtacgatacatcctttcaagttactttcactatgtctagctcttaaagaaaagccagaaatacaaatataacacctcatttaatctatgtcaaatagaaaatatgattttttcacgtgaaacaattgcagctaaaatatagttaagcaaagggatatcttttttatggggaagaattttttggtacgataagttagaggaatcctagaggaggattaaatatgaataaaaatgaacagtttcgaaacgaagtattgagcagtgtagaatcattaacatatgaacaattaaatcaacagccagcatctaatacatggagcgttatgcaagtattagaacatttatatttgatggaacgcatgattgtttcacgtgtaaaagatcagttagaaaacggtgtagatcagccgactgaagataagccgtttcatttagcagtagatcgttcacgaaaagtagatgcaccggctcaagttacgccttctaatgaaaaccaaacgttagaagaaatgaagagtaagctggcagagtcaagagctgctttaatagaactagaagagacagcgagtgaagataagctaaagcaaaaatcgtttccgcatcctgtatttgggttaatggatttaaagcaatggattgattttattggctatcacgaaaagcgtcatcaagaacaaatagaagaaatccaaacggcaattggtgcataaaaaacaggcagtccgcctgtttttttatttttggaccaaaataggatagtccgacatcatccaaataccaacactgtatgtttggggattatggtttcctacggtagagcccgtttgaatcgtaaacgagagttgcagaggatcttgatcgtaataaattgtttgcttggtggaaggggaataaagtcgcttcggagggattttaggaaccgtatccgtcgtgttaacaaaacagcggctatttgaaacaagatttgtgtatgtttgaacgaattgaggatcacctactcgaggagctccgtagttgtacattgtaacttccggaaaaggtgcgtttgtggcgacatctaaggcatgaagagcagcgagtgcgccacctaggctatgccccgttatataaagcggcttgggggtgagagactgatacgttttaaaaatttcatcgcggcatgattcgtaaacggctaaaaaaccttcgtggacgagaccagcttgttgattgtatggataagggcgctgccgaatgcgagcatcagcaatccagtctgcctcggattgagttcctcgaaaggcaatcacaatggcttcatcggattctaaaataaaaccaaaccactcttgcacccctacggcagaagctttaaacgatttaataagcctgtagtcttcaggtacatcaaatgtgcctccctgtacatattgcttataagctaagacgcacgcataaagaaggtttaaagctaagggtcgatcaaataaaggctctattctcatcattgttttcacaccttctaatagaaaataactcctatagcctatgtattcctgagaagaaaggtgcagatatctctcttttgaaagcgataattacggaatgtaaacggtttatcgttggatgtttttgagaattttataatttttttgtgtattttaactaaaaacgagttttaatttagagttttattgttaaaatttataatttaacttataatttaaaataatctgaatgaaaaaataagggggttatcgtttggagcaatttgtaacgagtttgaataatgtgctatggagcacacctgttatttatgggtgtcttgcgatcggcctgtttttctcaattttaacgaggtttttgcaggtaagacacttaaaagacatggttatgctgatgtttcagggtaaaagctcagaagcaggagtttcttccttccaagccctgtctttagcgctgtcgggacgagtcggaacaggaaacattgctggagttgcaacagctatcgcttttggaggtccaggagctgtattttggatgtgggcagttgcttttattggtgcttctagtgcattcatcgaatcaacacttgctcaaatttataaagttaaacaagatggacaatatcgaggtggtccagcgtactacattgaaaaaggaacaggtatgaaatggtatggcattttatttgctattgcagcacttgttgcgatgagtatcttaatgccgggcgttcagtctaactccatcgcgcttggcatcgacaacgcatttggcgttagtccaacggttacagcagtaggattagttattattcttgcttttattatctttggaggcgttaagcgtattgcaggggtggcccaattcgttgtaccttttatggcacttgggtatattattttagctcttattattattgccatgaacatttccgagctgccgggagttatcgctcttatttttaaaagtgcttttgcattagattctgcttttggaggaatcgttggtttagctgtttcttggggagttaagcgcggcatttattcaaatgaagcaggacaaggaacaggaccgcacgcagcagctgcagcagaagtttcacatccggcgaaacaaggccttgtacaagctttttcggtttatattgacacactgttcgtttgttcagcaacagcgtttatgattttattcacaggtatgtacaacacggaaggaccaggcggttcatttattatttcaaatttaccaggtgtagaagcagggcctggatttacacaagctgctattgaaacagtgttgccggggttcggggctggcttcgtggcagtagccctattctttttcgcgtttacaacgatcatggcttattattacattgctgaaacaaatattgcttacctaactcgcggaaagaacggaaagtgggctatgtttgcattaaagcttgtccttctaggagctacgttctacgggtcagttaaacaagcatcactagcttgggcgttaggtgatgctggacttggtatcatggtatggctaaatttaattgctatcttaattttagctaagcctgcgttagttgcattaaaagactatgaagctcagaaaaaacaaggggtagaccctgtgtttgatcctgttaagctaggaattaaaaatgcagactactgggagaaagaatataagaaagatgagtcacaagtttcgtaaacaagaaaatcctcacatatgtgaggatttttttatgaagaaagtgagacagatgagttatttaagttatatcgatccttcaaacaatgaatacggtgtagttcttcaagcagatggtgaattgcaagcagttcgtaaagcattgttgtttctgttgaaaaaggctgatctcctctgttttcttcctgcttatgtgcccaaaacctttgttttaaagtcaaaacaagcgtttgatgctgcaaagagcttttatattgttcattttgtaagacgttatgaaaggaagtgaatgcatcccatattacttgatgccttgcactttgcagctgatgagcaggcaagtaaattaaattaccaatatggtagacaagctgcctcataagagaaagtttcttatattcatagtggaattttctcatagctggacgagtgaaatgatgaaacttccattcttttcgctgatactcacaaagcgtctcaattttttcaatttcagcggaaatctgctgaaattgaagctttgtttgtttatgacaagcatgtacttgggaaagttcgcttcctctttgctgtaaaacgctgctcatttgttttgagagattttgaattttcctcgtaataatcggtgtataattaggaggaagaacgataatattcacaagtgaagaagtaagcagcccaatactggtggtcgctaagcgaattaaaaacgagatgaaataatgatcgtgcacaatcgtcagcatagccactcctgttagcgtggcaacgagtgttcctgcatgcaaacgcaatttagaacaggatataatagtagaaacagcaacaagcatataggtaagcggcgtcactcctaatagaaatgtgtaaagcatggcaaaagcagctccgattgctgaagcaggaaagcggatgaaagcttttttaatagaatcggcagcggttggttcaatcgtaacaatagctgtaataacagcgagcatatacggccagtcaatggactgacaaatgagcgcagttaaaaaaacggcaatgcctgttttaataatacgaccgcctaaaaaattgaatttttttatgttaatcattatgcataccttctttaaaacagttagtaatttaattataaggcatattaaggtgataggaaaacccgtcttaaaaactagcttttaaaaaacgaataaatatactataatttgtttgaatatttaaatgaggagtacaactaatgaaacaattaataaatgaaacaattaataacttacaggatacattttatgatgtaagcaaatatattgggcaaaaccctgagcttggtcacgaagaattcaaagcgtgcaaagcattaacggatgttttaaaagaacaagggttcacagttgaaattggtacatgtgacttgccaacggcttttactgctgtttatgacagtcaaaagccaggtccgtcgattgggtttatggctgagtacgatgctttgccggatctcggacatgcatgcggacataacttaattggaaccatgtcgattgcagctggtattggtcttagtaaagcggttgcagaaacaggcggtaaagtatacgtatacggaacgcctgcagaggaaacacgaggcggcaaagtaacgatggccgagcaaggcatttttaatcatttagacgtagctatgatggtacatccttattactgtcaccaaaaaagcggacgttctcttgcgatggatgctattcagtttgagttcttcggaaaatccgcgcacgcagctgcagctcctcatgaaggaatcaacgcgttagacggcgtattacaaacgttcaacagcattaatgcgcttcgccagcatgtgaagccggatgtacgaattcatggagtcattacagagggaggcaaggcggccaacgttgtaccggattatgcagtagcgcaattttatgtccgcgcttcaactcgtgcatatgtagatgaagtgacagagaaagtaaaggcatgtgcaaatggtgctgctttagccacgggaacaaaattaaaaatatcaaactatgagttttcttatgatgatatgcaaacgaatcaaacattatccgatgtctatacaaataatctcatctcattaggcgtgagcgagcaaagcattacggaagaccaaggcgatcatggatctttagatatgggaaatgtaagtcaggttgttccggctattcatccgtatattcaaatttgtgatgattattttgtttgtcatacgcatgaatttagagaagcagctttaagtgagcaaggaagagaagcaatgatactcggggcacaaacaatggcattaacagggtatgacgtattaacaaatcaagcgttgctccaaaaaatcaaagaagaatttaatgctacaaagtaagaggtaatgataaaaccataccaaataatacgcttgtgactgcaagcgtattatttagtatgagaagtggaactgaatggtttggaaaatttgaccgtggcgctgttcatcgctcgcagctcgaacaatgcggctttgaattcgagcatttgtgattcttctagcgattgattgataaaatggaacggtttctacttcatctttaagggattcagagaccccttcttgaaaagtatttggcagttttatgtttaatgaaatctgtgggtagctgcctgataaatcataataggctttagaaaaccagtcaaagtgtttaatttcatcctgccgaatacctaatatagcttgttgaaactgagtattaggatccagttctgctaagcgtgtatagtagtgaatagcggaaaactcatcgtttacagctttgtttatatctcttagaagctgttcgtctagtcttgtatcatcttcccaatattcttcatgccgggagtaaaattcatacatatggatatacctcctcaccgttttgttctcttgtcgtcaccatcatcgtatgtatagacaagaaaaggcgtacattaaaagaaaaaagtttaacaaaatggtaaaaagggtacgtgcagagaatagtatcaaaaaagacagaggttatcttatgattaaaattttagctgaaaccaaagaaggagctattaaagaaatagaaatgaatgagattcgttcaagccatgactttcaatggtattgggttgatttttacaatcccactgaggaagaaaaaaagcagcttgaacaattcaattttcatcccttagcagttgaggactgtttaaatcaaggtcagcgggctaaatttgagttgtatgatgagcattattttttagtctattatgcccttcataaagaagagcttgagcacttagaagtgtctgcatttgtaggagataactttttagtcacttaccacctcgataagctaacgagcgtggctagggtgtgggagcttatcaaaaaagaccctgaggctaccgaagatggaacgtgggatattatgtatgaactcttagatcatacggttgacgaatacttccctgtgctttataaatttgaagatcatatagatgacattgaagacaatgcaaaagacgagccgatggacgaattaatgaggcagctttatgacatccgaagcgatttatcacgaatgcgccgcattttgaatccgatgagagatttaatgtatcgtattatgtcaacgaatgcgttaaaagcaaaagagcaggttcgctattttaatgatatttatgaccatttattaaatatgattgaaattatgcaagcaagcagagacttgtcaaatgatattcgagaaagttttatgtctattaactcagaccgtatgaattcaatcatgtttacgctaacgcttatgtcagctattttcttaccgttgaccttcattgctggtctttatggcatgaacttttcatacatgccggaacttacggggaagtataattattttattgtactgggcattatgattgggcttgtaggcgtgatggtattcgccttttataaaatgggatggttcaaataccgaaaaggaactaaactataaagtagatttttaaccttcctgtataaatgttaatcaactcagtaaaaatgaaattaaataagcgaagatcttatctggctctagataagatctttttcttgtgctataaacaagaaaagcagggaagcgagggaagaatgtgaaacacggaagaatggggctgcgaagcatcacggtgctgcttgtatgcatggtggtgattctatcgctattgttaacggatttattagttagcagttcaattggaaaaaatattcgagatcaacaggctgaaaaagctcggactattgctacgattatttcagaatcaacgaacgtgaaagaaggactagagacaaaaacacctcagtcaattcaagaatttactaaacgaattcgtgaaaaatcaagtgtcttgtttatcgttgttatggatatgaacggaattcgccaatctcacccagatcctaaaaagataggaaagaggtttgccggaggcgatgagcaaaaatcattgcacgggaaatcttatgtatctgtatcaaaaggaacgcttgataaatctctgcgcgcttttgcacctatttataatgaaaaaaatcaacaaattggtgcagtagctgtggggatttctttgaataatgtaaatgaagcaattagagatgggcatcgtcgaattgttttaggttcattaattggtttgcttgtaggcgttcttggtgctattttattagcgaattacataaagaaaattttatttggcttggaaccttttgaaattgctaaaattctagaagagagaagcaccatgctgcagtcggttcgtgaaggagtgatagctgttgataaggaaggtaatattacacttgctaatcgttctgcacgccgcttatttgttaaagcagggttagcaccagagccaatcggtttgtctattcgagaatatatgccaacctccaggttagatgacgttttgtctacgggggaatctcattatgatgaagagcaagtcataaatggagtagccattgtggttaatagggttccgctagtagtaaacgaagagattgtaggggcactttctacgtttcgggataaaacagaagttaatatcttagcagaacagctaacaggtgttaaaatgtatgtggaagcgcttcgagcacaatcgcatgaatttatgaataaacttcatgtgattttaggaatggtgcagatgaattattatgatgagctaaaaacgtatattcatcagcttgttaatcaccgtgtcgatgaatctagctcagtgactaaatccattaaagatcatgcgttggcagggttcctcatgggcaaaatgagttatgctagagaggaaagcgtagaactgacgttttccgctgatgaagttattccagaaccttcagatccacacgttactcatcatctcattaccattattggaaatttaattgataatgcaattgattcagtttgtcatcaagcctctaaaaaagtgtccgttatgcttgtgtataaaaacaataaacttacgattcaagtcacggatacaggctgcggcattccttccgatacaatgaatcagattttcaagaaaggtttttctacaaaaggaacgagcagagggtttgggctgcatttagtgaagcaaacgattgatgaactaggtggccaaatcgtcattgactcatttataaatagcggtaccacattctatattgatattccgtacgaaacaaggagagatcaagttgattaaagtattaattgttgaagatgaccccatggttgctcagtttaatcaaaagtacattgaagagatagaggggtttacagtagtcgctgttgctcattcgggtcatgaagccttggtgaaggtaaatgaatatcaagttgatttagtgctgcttgatatctttatgcccgggcaaaatggtttgagagttttacaagagattcgaacaaaacaagaggaaatagatgtcatttttatcaccgctgcttcggatgcccaaacgattcagcaagctttacgctacggagcgattgattatttgattaagccttttacatttgaacgcttttatcaagcactttcggcttacaaacaaacatttcgtacgttaaaacagcaacctcagcttaatcaacaggaattggacgggctgttgtctaataaaaaaataaaagaagctccggtagagccgttgcctaagggtttaacgacaggaacattagaagttatcgtagaagccattgagtatcttaaagatcaccctttttcgaccgatgatgtagctgaaaaaacgggaatttcaagagtgtctattcggaaatatttaaaatttctaacagatgtaggtcttcttggagaaagaatgacttacggcacaataggacgtcctgtgtatgcgtacttatacaatgaacaaaaccgtcacttgctgcatcactacctcgttgactttgaaaaataaagagattgacctgtcagagacgtccggtgctgttttgtcggtgtgagaatattttactgtagagtgccggcgagttaagtggtatggttgataataacaaaggaaaaaacaagtcgtttgactgaaaaagaggtggtttcttgattggaagcttagaacgcttgactgaattactgttatcagggaatcaagatgaagcttggaatattgtgtggaaaaaaagacagcagggtttcgatacattttatatttttcagcaattcatttcagtgtcaatggctcaaatcggtatgatgtgggaagaagatgaaatttcagtggctgatgaacatttagctactactacctgtgactatgttttgtcacgctatcaattgtgtataagacaagaagttattaaaaatgaaaaaaaaggtctgtttttgtgtatagaaaatgaacagcattttttaggtttaaaaatgatttccattctctttgaagagcacggatggcagacgaaacttttaggagcagattctccgcttttacatgcaacgcacgctgttgaacaatggaaacctgatttagtaggaatctcgtttagtttaactcatcatatagaaaaagcaaacgcatatatagaaggattacaaaagacaaaacatcggccgcttattttagttggaggccgagtagtttcaaactataagtttcctcttgttcaaacaaatcaagttcgatttattgcacagttagaggagttgaaagagttttttcattatcaatcaattagggggattaaggttgtcgactattaaatatgctccgcttcctgtttttattatggatgaggaaatgaatattctagcgcaatctgatgaagcagccgctttatttggagaggttcaacattttttagaaattgttgacgaagatagtcagaacaaagctagaaaacgattagggcagaagaaaaaaataaaaacagaattagtcatgcattcgcgcaaagctaagatgtctctttataccgtgaattgcaaataggagcaagataaggcgcatgtaatatgtgtagaggaagattctcaaattagaattctttcagaaaaaatcgaacaacatacagcgcgtttatctgaaacagacttagaactgctgctgcaaaaagaacgattagaaaaagcaatgaaccgagttatagaactgtcgggaccgtttattcatttatcgaacaacatggtgcttatacctctgtttggcgatttatttgaggaagtcatcatgaaaaatgaacatcggctgctcagacaaatagatgaggaaacggttaatcgagttatcattgactttaatggaataggtcaaattgatgaacgaggtgttgcagccctagaacatttaatatgggaatttcagctaatgggtgtacagatttatttaacaggtgtgacacccgatcatagtcaatggcttcaccagtatcattttcaagcaaatgtaaaatctattagtacttaggtcaggccattcatcaattttttacaacggcatgaaatggctacaaaaagtgaacccttcatataaagacaataagacaggggatcaatattgataaacaggtgattaaaatttggtgaaacacgcgcgtaaagtagctttaagaatttcaattatatatatcattattggcgctgtatggatcttgatatctgataatatatctagaacattagcgcaaggtcgttttgaagtatatattttttttcaacaatacaaaggttggttttttattttagctacggggattattttgtatgggttggtatataggagagcttataaactagtggagtcccagcaagagctcgtagtgaaagaacatgaacttcaaacgagcaatcagcactatcaatctttattcaaacataatcccgatggcgtttttgaaataagtaaaacgggtgaagttcttcttgctaatccagaaggtgaagcaatcgttggatactccagtgaagaattgcaaaagatgaaaccttcagctcttatcgcagctgaagagtttgatatgtgtaaagagtattttaaagaagtgctgaatggaaaaggtgctaagttcgaaatgaatgtgatcaatagaaagcgagaaagacggttgcttaggtgttctttgcttcccatcatcgttcataagcaggtagtaggtgtatttatgattgcacgcgatattactacataccgtcaagatgaagagcttatgataacctcggaaaaaatgtcggttattggacaaatggcaggtgccgtcgcacatgaaattagaaacccgcttacttctttaaaaggctttgtacaggttatgcaagcctctaaggaaacaaatgacacatatttagatattatgatgtctgaaatcgaccgcatcaacttaatctccagtgaaatgctcattcttggaaaaaagcagcatgtatcttttgaaaagaccaatttatgcgagattttaaaacaagttattaccctaatggaagcgcaggccaatttaaataatgtttctattttattgaaagaaacagccaaaaggcctatttatgtttcagctgatgcaaatcagttgaaacaagtgttcatcaatgtgattaaaaacggtgtagaagctattatggagaaaggtcatattacaataacagttgaagaaaaagatacacgagcattgattcactttgaagacaatggaatcggaatgagtcaagagaggattgaacaagtaggaacgccgttttattctacaaaagaagctggcactggcttagggctggccgtgtgttacaaaatcatggagcgtcatcaaggtaccatgcattttaaaagcggtaaaggaaaagggacaacggttactattgatatgccaattatagaacgaaacagccgcctctcatagttcagagaggcggctgttttcttgaaaaagaggcagtaagcagctgagccctttgcgtctggatccatataggacataaaacctccttcttatacaagttttcgtccataataaagaagatcatattgttttctatagaagcaatagtgtatcatagttgaagctatgtttattgatgtagaaaagttaaggcaacaaccgatttttctactgacggattgacagggtcccttgggataaggaaggtttatttataaatagaaattagggtcagtattaacgcacatggccactgatacattcgtttaattgaaatgaaaaaaatcgtttataatatcgagaaaagcatggaaaaggagatagatatgagtcagtttatagagactttacagccttttttacaagaggcgtggaaaaaagcagggttcaatgagcctactgccattcaaacgaaagctatttcagagattttagctaataaagatgtaataggagaatccccaacgggaacaggaaagacgctggcatatttgttgcctgtcttacatcgcattcagccgggaccatctcatattcaagcggttattttagcatcttcccatgaattggttatgcaaattcacggtgaaattcaaacttggtcgcagggaagcggtatttcaagcgctgcgtttattggcggagcaaatatgaaacggcaattagaaaaactcaaaaaacgtcctaatatcattgttggtaccccaggccgtttgaacgagttaattaaaatgaagaaattaaaaatgcacgaagtcaaaacaattgtgattgatgaagcggatcaattgtttgtacctgagcatgttcaaacggttcaacagattgtaaaaatggcgttaagtgatcgtcaaatcctagtcttctcagctactgtatcagaacgtaccaaatcgctagcgaaagatatgatgaaccaccctcttgaaatagaggtaggaagagacgaacttccagcttcgaaggtagagcatgtatacatcaaaagtgaagctagagataaagtggacgtgcttagaaaactagttcgtcaagaacaaatgaaagctttagccttttttaaagggattgatactctcatcgagtttgaagaaaaattaacatttaagcgtgtagaagcaggctctttacacagtgaaacgaaaaaagaagatcgtgctacgacgattaaagggtttcgaaaaggagatttccctgtcttattagcaacggatgtcgcagctagaggattagacattaagggattgacgcatgtaattcacatcgatgttcctcaagatgcagatcaatacgtacatcgctcaggtagaacaggcagatcgggagcagaaggtacagtcatttctcttgtgactgaacgtgaagagcgaaatttaaaacaaattgcacgtgaacttcaactttcattagcgaaaaaagaactttatatgggtgaaatcgtggatgaaggaacaaaagagcagtcccgtacagctaaaaaaccttcaaaaaagccatttaacaagaaaaagaaacaaaaaggtcgaatgtaaactaggtattcttcctttttataacagcagtgtcacaacctaaaaagcaacgtctactgctttattacagcagcctggcgttgtttattttctctattttctctgtataaataagtaaaaaaagagaaatgtagatattttttcctaggtatgaaaatagtttgaatgatggattttgttttttgtaaccttattttaacattactttaagagacttctaataaaagaggaagaaggacgtggggacattttatggatgcaattgatgatctctttgacgacatagagcgaagaagaaaaagtaaagaatatagtcgagatgcagatcaattagaatcatatttacatgaagttcaacgtatcatggaatttcttgaagagggtatctatctgtttcaaaattcgcaccaacaatatgcgtcagattggtcagggcgttctaagagctcatatgaggatatttataatgatattacgcaatctacttttcatctgtacgacgtaagggatgaattgtttcaaactttacgcttagaaatttcacgattaagagagttagcatcggcgtaataaataacattatcgactcactcctttagaaagtgagtctttccgtataggcttaaaaaatgtttggatgatgactgaaggcttacaagagatagggggacggacatacatggagataaaagtaaatccagaggtgctgcagacatttgcagagcgaattcagcagtctcattcacagacggctgatgcacttcaaaaactaagctgggaagctacaaatctacatttcttgtctgttgcagatattgataaagtgctggacttgcaggaagagttacagcatatgattcgcaaacttgattcgctaacggaaaacgcacatttattagtaaaagacactgcagaacaaatgagaaaagcagatggagagctagaaggctcttcaggctggacggagttttggtcgagcgtctggagcgatgggagcacccattcacaagatacgtggaatgatataaagaacttaaaagaatggaatacgtatgacaatatgcatagaacaattgaaaaacctttaggtactcttaatgttatgtggaattcgctttctatgtcttgggaagaaaaagtagtgaatggttctacatgcagtcgaacggaattttttacttatggcgttattcaaatggggttgggcattttaagtcaggaaatgaatccttcaaacattacgtttagtgacagcacagaggaagtgaagagagaatgaatgaagtatatggtggcgctggaagcgaaatggtacagttccttacagggttgtctcagcaatgaaatatacatttaacttattagaaaaatcgttaattgaagcaatgaaagataataagaaaattgctcaattttataaaactttaatgaatagcaatttatggctagttgttagttcagagcatggagcatcagatatattaattgcagagcactacgttcagacgatgaaaagcgcagcgtaccgatatttacctgttttttcgtcaaaatatccgattgaacagatgctgaaagatgaaaagaccgtatgcgtatcatttaaggatatgctgcctgtattaaatgaagaaatagcgatattacttaaccctgacacgcctctctcaaaattattcatccccgaagaaataaggatgttaaaagaagatcaaaattattttaagcagtagccaaagcaataaaaagcgcatgtgctttttcaaagcatgtctgaatcttaaataaatagaagatatataaagaggcagggccttaaataggctcctgcttttttattactagtaaatagttctatagataatgaacaaaaatgtaatttaatagtcttagagtttttattttcctttaaataggtacctatagatcagatggaaaaggtttaaatgagaacaaaatcttggttgtttaggttttatttgcattttttaggggtatttgtagatacatattctcatttttggaggcttttgcaagtaacctttgaccttatcactagagtttcttacaataatagtaaatatataaaccgaaggagagatatctatgtcaggaattattcgcgtaacaccagcagagcttcgcgacatggcaggtcgatatactaacgaaagcggtcaagtccaagaattagtaagccgtcttgatacaatgaaaaatcaacttcaagacatgtgggaaggtgcttcaagcgaagcgtttgctgctcaatacgaagaattaaagccttctttcgttgaaatgtctaacctacttacaaagattgctaagcaattagatgattctgcaaatgttcttgaagatacagataaccaaatcgctagccaaatccgcggttaacttcatctaataatctaagtgaagtaataaaaggagcgccctattctcaaaagatgaaggcgctttttctatgttttgaggtgatgaaaccctatgtatatagaagtaacagtagacttaaagcactatacaggtgatcggttcgatttgcgactatcaaactatcattcactcaaaaaagtagtcgagatcgtttggcaagctaaaaagattactcaatcaccaaaggacggtgcgtggatacgtgtttcaaataaaaatcttattttctcgggaaatgagacgatgattaactgcggaattaccacaggtgattgtatcgaaattctctaaaggagtctattagaatgtcagagaagaaaccgacttacttagaagaacagctcgaagctgtaatgacacgtcataataatgaatatacatttgtttttcaaaaagaaaaaattcgacttaatcgttctgttgaaattgaaatgttaaaggatgtaaacacggcttttcaaaaagaaatcatgatgagcgatgatgaacttaaaataacaattaagcctacctctgaatttcaaccttttacagcattaagaggaaaagaagaacagcaaaagtggctgtttgcagatcagcttatcaaacaagtaaagcagcattctttttcaaggctgcatttgttgatttgtccagaaaatatcatttttgataaaagtttaagtccggcttttttacattatggagtgaaagaaagtttacctccttatgagtctaacgaggaacaaagctttcaagagttaaaggctacgatagcagcggccgttgactcatcgcatacatttgaacagtactttaagttatatgagaccttgcaattaaaagaagacgctaaaaaaataatgcatatcagcaatgaggaagagttgagtcaatttgttcagcataagctaacccaaattgaaaagcatcaaaagacactcgttcaacttcctcaaaaacgctggaccatttttaaattttcatctgtgggtatgcttgtcttattaattccagctcttatttatactttttactcttacttttttgctcagccgaaacaagaagcatttgtagaaagcaacgaatactttcttgaaaaaaactacagcaaagtagtcgacacacttgaagattatgacattgagagcatgcctaaaattgtgcaatacgaaatagcaacttcctatcttgttaatgaaaagttaggggaggagcaaaaagcaaatgctttaaagactattacgcttcagtcagatcctcagtattttgcctattggttttacattggccgaggagacaacaaaaaagcgctagaagtcagcaggttgttggaagaacgttcgttaattatctatgcactaatgaaatacgaaggtcagctaaagacagacaacgatttagcggctgataaaaagcaagaagagcttgataaagtagcaaacgaacttgaagaatttaagaaagaaaatgatcagcaggaagcggaagcagccaagcagcaagaagagaaacaagctgaggaggcacaggcggccaagcagcaggaagaagaacagaaagctgcagaagccgaggaaaagaaacaagaagagcagaaaaaacagcaggaagatcaatcgaagtagggaggtagttgtatgaatatgctttgggtagttagtgggcaaacgtatcagcagctgcctgtagattttaaaacctttcgccaagcaacggtagggaacactcagcatcaaactttcacgttttcctatccgtttgagaaggggcaaatgacgctgtcatctgaaaagaacggccggctcttgatttcctacggagaagaaaggatagcagagctatctgtttctgagtcatttgtatggcgagaacaaggacatgctttaacctttgttcttacagagacagctgttaaagaagctgtctattatattgattacggatcagaagtctcgttttccaccagtgatgaagcagctgatgtgtatcagcagaaagaaaagtgtatagcagagccaaaagaaggattttacttatcaaagataaacgggaagtggaaggtcttttataatcaagaaccgctttatcttaacggacaccgactagaagagaatacgaaccttcagcccggtgatcttattttatggtcttctatgaccattcaattgatcgaaaaagatttgctgaagattcaaagctgctacgattatgcatctaagcttccagctacggcacagcctatttctgaaatgaaaaagaagtacccggtttatagaaggacaccgcgcatgatatatgatttgcctaatgataaggtgagcttatcctttccatctcaagacaatgacgaaaataaccgaagcttatggcttactattttaccgccattagtcatgcttttagtcatgggtacggtctcaattattcagcctaggggaattttcattattatatctgtcatgatgtttacgaccacgctgattgtatctaccgttcaatacttcaaagataaaaaacagcgcaagaagcggcaggagcgtcgtcgccgaatctatacaaagtatctagaaaacaagcgcgaggaattacaagaactagtatcagttcaacgagatgtattatcctatcattttccgacgtttgaacgaatgaaatatttaacagaacagatttctgatcgaatttgggaacgaactgtagaaagcagtgattttttacaggtgcgccttggaacaggaacagttcctggaagctaccaaatttctttgaatagcggagatatggctaatcgagaaattgatgatttgcttgagcagtctcagcacatggaaaaggtctatcgagaagtcaaaaatgcccctgttaccgctcatttaggtttaggctctatcggtctggtaggaaagatgaaaacggtgaagaatgaactgcatcagcttgtaggacagctagcattttcccacagttatcatgacgtaagattcgtattcatttttgatgaagaagaatataaagagtgggaatggatgaaatggcttcctcattttcagtttccgcattcttttgcgaaaggtttcatctataatgaacaaacgagagatcagcttttatcttctatttatgaaatgctgagagaacgcgatttagatgaagcaaaaggagaaggggttttcttgcctcactttgtttttattattacgaatcagcagttaattgcagatcacgttatcttagagtatttagaaggatatcatcctcaccttgggttttctgcgatatttgcggcagagacaaaggaaagcttaacggagcatattcatacactcgtccgttatattaacgaatccgagggggatatattaattcaaaagcaaaaagctgtgaatattccatttcagcttgataaacacacgcttgattataatgaaagatttgcaaggatgctgcggacattggatcaccaagttggcatgaccaactcaattccaaatagcgtttcattcttagaattatttaaagcaagagaaattggtgagttggatatcgtgcaaaggtggcaaagcaatgaatcagctaagtcgctagcagttcctattgggttaaaaggaaaagaagatattgttgaattaaatcttcatgaaaaagctcacggccctcatggattacttgcaggtacgacggggtcagggaaaagtgaattcttacaaacgtacattctttctctagcggtgaatttccacccccatgaagtcgcgtttttattgattgactataagggcggaggaatggctcagccgtttaaaaacatgcctcatctgcttggaaccattacaaacattgaaggaagtaagaattttagtacaagagccttagcttctattaaaagtgaattaaagcgacgccagcgcttgtttgatagatatgaagtgaatcatattaatgattatacagatttatataaacaaggggtgccagaagaacctcttccgcatttatttttaatttcggatgaatttgccgagctaaaaagtgaagaaccagagttcattcgcgaattagtcagcgcggcgcgcattgggcgtagtctaggcgttcatttaattttagctacgcaaaagccaggcggtgttattgacgatcaaatttggagtaatgcgcgctttaaagtagctttaaaagtccaagatgccgctgacagtaaagaaatcttaaaaaatgcggacgctgcttctattacggtgacgggccgaggctatctgcaggttggaaataatgaagtgtatgaactgtttcagtcagcttggagcggcgcgccgtacatggaagatacgtatggggctgaagatgaagtcgccattgtcacagatctcgggttgattcctttatctgatgtatctactcagcagacgtcatctaaacaagcggaagtagaaattgatgttgtggtgcaaaaaattgaaaaaacgcagcaggaattaggtatcaaaaaattaaatagtccatggctgccgcctcttagagagagattgcttcgcagtgagtacaaagagaagcgagacggcgtattcccgattggcttaattgatgaaccggaaaagcaaagtcaaacggtatataactaccatctgatggacgatgggaatattggtatatttgggtcatcgggctacggtaaatcgtttacagtcatgatgttgcttcttagtctagctgaaagacagagcccggagcagcttcattattacatttttgactttggaaacggcacgctgctgccgcttcgtcagctgcctcatacggcggattatttcttaatggatcaaatgcgtaaaattgaaaaattcatgacgattatcaaacaagaaatcgcaaggcgaaagcagttatttcaacagcaggaagttagcaatatcaaaatgtataatgctctaagttcagaagagcttcctctaatttttatcacgattgataattttgatcttgtcaaagaagaaatgcaagatctagaaatgcagttcacacagctcgtgcgtgatggccagtctttagggatttatatgatctttaccgcgacgcgcgtgaattctattcgtcagtcacttatgaataacttgaaaacgaaggttgttcattatttaatggatcattcagaagcgtattctattttaggacgtacgccgtatgcgctagagtctattccaggccgggctattatcaaaacggatcaaccttattttgcgcagctgtttttacctgcgggaggaaaagatgattttgaaatttttgatgcagttaagatgcacattcagcgattaaagaatcaatatgctgatgctattgttccggagcctgtaccaatgctgtcatcgaaacttgtacttgccgagtttatgacagacagaagggttattcgggaaaaaggagtcattcctcttggattagatgaagagtttgttcgaccgatgcatatgaactttacgaaaaataagcattgcatcgtcatggggcagacgcaaaaaggaaagacaaatgtagtgaaggtcatactgcaaacagcgcttgaacaaggcgtgaagcaaatcggactatttgattcggttgaccgcggtttatcaagctatgcaggtgaagatgaagttgtttacatggaaacaaaagaacagattatcgactggcttgatttaactgaagaacgattgcagcgacgtgaaaataagtatttggaagcagtgcaggcaggaacggtacacagtctttcatttgccccgatcatgcttgtagtagacggatttgtaagattccagcaaaacttagacagcgtcctgcaggatcgtattacaaaattaatgaaaaattatagtcacctgggctttaacttgattgttgcagggaacaacaatgagttttcgaaaggatttgacgcgttaacaacagaagtgaagcaaattagccaagccgtgttgctgatgaagaaaacggatcaaagcttatttacacttccttatgatcgaaaagaagccgacgttaaccctggcttcggttattatattaaaagtggaaaagaaacaagaattcaaatcccgctatgtgtaagtgaaaggaagatcttaacatgaccgaacagcgtaagtatacacttaaagtcatattagctgttgttttaattttggctcttccttctttctttttccagtatattggagacaatccgctgcaagtcacagaaaactcaacaagaacgattgcggttgttaacgaagataatggagtaaaagaaaatagtgaaaaagcgatagagtttggggaaaaagtgactcctcttttacaggaggggtcagattatcaatggactgtgcttggacgaagcgcagctacaagcggtttacagaatgggaaatatgacgcggttatctatattccctcgactttctcacaaaatattttatcgtatcaggaaaaaaagccagaaaaagctactttggaatacaaagttcaaagtcagcttaacgcagttaataaggaaaaagtagtaggggaattagaagatgctactacaaaggttaataatgaaatgtcctctttgtactggagttatgtatcacaggaagtggataaggtacgcggacagttcgataaaattctaaataaagaaatcgcctttcaaaaaacaatggtcgctttttataaaccgaattcaaaagatttagcaggtgaattgaatgatcaaaagaaaattcttcagcaaatccaaggtaatgtaaataaagcagaaaaaggttctagcgacagacaaggcgacgtagaacaggttgaaaagaatttaaacagcttcattgaatatgtaaatcaatatcaaacatatcaagaaacacagaaacaaatgcttgaaaaaacgcaggcccaaagcgtcgctgcgattcaagaagggttgtcttcccttgaatctaatcagccaagttctaagaaaaattttaatgagcaggccaatcaagtgtttagtggcttatcttccattcaacagcagctggatcaaaatcaaaaagccgtcggagaacttggagaccaacaagcggataacgtcagtgaacaagaaaaagctctgcaagatttgaacggccaaatagtcagttcatataaacatcagtctgagcaaacaacactaaatcaaattgaaagtaagctaaagccgcttcgtgcgcagctagagacagcttcatcaaatgagggtggcggaggctcaacggatccaggagaagacggcgaaactcagccagatccaaatcaaggaggagagacgccaacggaccctggggaaggtgacggaactcagccagatccgaatcaagatggagagaccccgacggatcctggagaagatgatggaactcagccagatgccggtcaaggcgaaggaacgtcagaaccaattaaagtggatttatctcagcaaacagcaaagcttgatgatatatcaaaagggcttgaagacttagaacagcagctccaaggaatgatgaacgaaacacctgaaacacctgaagcgcctgaagcgcctgaagcacctgaagcacctgaagcacctgaagcacctgaagcacctgagggaacggaaacgcctgaaacaccggaaacaccggatgcatcaggtacatccaatgctgtgaaaagtgcgcttgaaaaagtggctaatctgaaaacacaggtacaagcagtcaaagatgagctgcaaaatgtaacagttcaaccggaagcttcaggagaaaatacggattcgctgaagcagataattgccagtttggaagcagacgttaagtctttgacagcacagaaaaacaaagcagagcaagacttagaagaagcaaccaagtcgtcgagcggtcaaattgctaagcttcaagaagaaaatgaacgattaaaaaaagagaatgaaaagttgaaagaagacggcaaaaagccttctaaaggtagtgtggatgtagaaaatctcattacgatgattaaaaacaaagaagataaaatcttatcttctccaaacctttcagcttctcgcaaggaaaagctgagcaatacattctcaggtaagattcaaagcagcagtgcagaagatctgctaaagtactacggtgatttatcgcagtatgatttgactttagctcaagtaggaaatacagacataaagaacagcgtccttaacaatgactctattaaaggaagtttgcagcaggctttagctggcaccgtctcttctcaagatgcacgtaagcaaatccaacaaaacctgtctctaacaaaagaagagttagcacagttccaaaattcagtgcaagattttgctgaccagtatggacaaacagttgatgctgaacaagcatctattatggaagagctatcagctattcaagaaaaagcaaatgcaatgaatcaagagcttcaatctagcgcaggtgaagatcaagcattagaaaagaaagaagctccggacgtaacgggcttaatgacgctgcagcaaagtatgggtcaagagttgaaaggaatgaacgaactcatttcatctttaggtgaaagacaagctaatgttgtcacatacaccgatgaattgcagaagcgtgtaaatgaagtccaggataaagctgacacgcttaacagcaagtgggcccaaaacgtggattcaacgaagttggttcgcggccaggtataccgtctgttaaataatacattagtagatggacagaataatgattacgtttatcattatttagcgaatcctcttcaagtaagcggtgaagtgccggctgaaaaagtaaaagaggttccaccggttgtcattttggttattatcttaatcagcagcttactaattggctatttcagtcaatactaccgacacgcacctatgcttgtaaaaggtacgctgtttgggttattaaatttgattgtagggttaatggtaagtatctttagccttaacatttattcgttatcgggagaccgggcaatggaatggtcaatctttacgatcgtcttattgcttgcttcatctacacttgtacgtattgctttcttattaggaagcttcgctggatgggtgacgacagtagggttgattttattttatataaccccgcttcttaacttatctatgccaaactttaattacgaagatccagtatctaaagtatatatgtcaattcaatatgatacgcagtctctgtttggacaggcgcttattgtattactggggatgactgccgttttaagtgttctgccatctattattcgtgctttaaagacgactaaagaggtcgaaaatgatgaaacctatagtgcttaataagaagattggaagtattgttcttattttttcacttctttgtttccctatagcagcagcggctgaagctgatgacggaaacgttgaagagattaaaccaaatgtatataaagacgatccgattaacttggaccccgaatctttgctggaaaataaaaaagaagtaggaaatattccggaggaaataaaggatcttacatttgaaaaagaggaagatgcagagaaagagagcttaaaagaaagtctttttgcgaacgcatcagctgaagataatacaatttctgcgaaagcaaaagaatataacttgttttcttctaaaaacacttactacaagaaagatcgaacagaacaaactgcttctgaacagtcatcagacctacaatggttttatttattattgattggtgtgggggttgttgtattatttgcggttttaataccgcgcattagtcctcagccttctgtaaaaaaatgaaaaaacctcgctgttaatcaacagcgaggttttttcgtatagacgcaagcttataggcggcggaagccttcttcaaacaaataatcttctgcttcttcgtaagatagaaatgctgcctctaagttcaatccagaataaacattccacaggtcatcttcatgaacaagtaaaagcgttgcattgtctgggccgttccagcgctgttcatttccattccctacaatagcttcttctctagctgtatcaggaagggtagacaaagattcaatagaagcttcaataattgagcgaagctcttcttctgtataatcacggatatttacaagacctttgtcatttgtttcatagccttttaaaaaccctgcatatacaaatccatttccgttaggatgcagatgatgcacaacaaccgttttatcgtacacgctttcttcataatgaaaattcacgcgtcctaaagatacatcttttcgatgcagctctggaaacgctgaaataatagctaatttttcgtcaaaactaagcatagacaatcctcatttctatttaaatcatttcattttctgaaatggtataagctcttttacgattcggttgattataccatatataaagaaagacacataatgctttttccaatgtggacttttaaaaatataacccttcgcataaagtggccgtcactgtaaagaagaatacatctttttcactataaaacttaacaaaaaagaggcagggaattcacagtgaaaaaataatataaagaggtggaagaaaactagttttcaaacctatcataaggaggaataaaaaagtgaaattatacgctctgtgtaaaaaaacatgggcaatgcccctgcttgtttttgttcttttagtgagcttaactcctgttagtcaagcagccgcatttttatctgttgcacaagctcttgagaatcaaaacaacagtgtacaaacggttaaaggatatgtagtaggtcaacctacaggcacatctacagttattacgagcaattacccaaacgattatgcacttgctcttgctgacagtgcaaatgaaaccaatacagacaagatggtgtacgttcaaattccttcaaatttgcgaagtgcatttggacttcaaagtcactcggagttaaaagggaaaagtcttactgttaagggcacactcactccttatttttcacatccaggaataaaatcagttacttctatcagtacagaaacaggaggaactgatcctactccagatcccacagagccaaccgttccagtagaagactattatcgtaccgcagttggaaaaacaggaaataccttaaagacagagcttcataacattattgatcatcacacagaactgtcgtattcagccgtatgggaagctttaaagaaaacggatgaagatccagctaacgcaaataacgttattttgctctacacggggcgttcacaggctaagagtacaaatggaggcggagtggacgattggaatcgtgagcacgtctgggcaaagtctcacggggattttggaacagctatgggacctggaacagatcttcatcacttacgtccaaccgatgtgtctgtaaacagtacgagaggaaacttagattttgataacggagggacggaacatagcgaagcactcggaaattattttgacagtgattcatgggaacctcgagatgaagtaaaaggcgacgtggctcgtatgttgttttatatggccgtgcgctatgaaggcgatgtaagtgatgagcctgacttagaacttaataacacagtaaataatggcactgctccttatcacgggaaattatctgtgcttcttcaatggaacgcccaagatccagtagatgatcgagaacgacgtagaaatgacattatttattcagactatcagcataatcgcaatccgtttattgaccatcctgaatgggtgaatgagatttggaactaatgaaggaggcgtcctggcggggcgtctttttttatagaagaaaaaggaaaaaactaaaatccgccgaatacctataggtgattttgaaaaaatggagggaagctatgaaacagctatgtaaaaaaggattggcttttattttaatgctcatttttgttaacgctttcattttgaatccacttaacggagcggctgccgtagatggaaaatcaatgaatccaggttacaaaacctatttaatggcgcctttaaaaaaggtaacagactatacaacatgggaagcgtttgagaacgatttacgcaaagtgaaacaaaatggattttatgcagtgacagtagacttctggtggggagatatggagaaaaacggcgatcagcagttcgatttttcctatgcgcagcgctttgctcaagctgctcgtaatgcaggtataaagatcgttcctattatttctactcatcagtgcggaggcaatgtaggagatgattgtaacgttccgctcccatcttgggtatggaacttaaaaagtgatgacagcctttactttaaatctgaaacaggaacgataaataaagaaacgctaagccctcttgcaacagacgttatttctaagcaatacggtgagctctacacggcatttgcgcaagcgttagcaccttataaagacgtgattgctaaaatctatttatcaggaggccctgcaggtgaaattcgttatccgtcctatacagcagcagatggaaacggctatccgtctagagggaactttcaagtgtatacgaactttgtcaaaagcaagtttcaatcatatgctttgactaaatacggttcattcaccggcgttaatcaagtgtggggaaccaatttaacgtctgcatcgcaaattttaccgccatcagatggctatcagttcttaaaagatggttattcaacagcttatggaaaagatttcttagcatggtatcaaggagctttggaagatcacacaaaacgtattggacagttagctcatcaggcttttgattccacctttaacgtaccaatcggtgcaaaagtggcgggaattcattggcagtataataatccgacgattcctcatgctgcagaaaaacctgctggatataatgattacaacgcgcttttagatgcgtttaaaacagctaaattagatataacgtttacgtgcttagaaatgacggacagcggaagttatccagaatattctatgccaaaaacgcttgtacgccaagtagcaggtattgcgaatgcaaaaggagttgttttaaatggggaaaatgctttaaccataggcagtgaagatcaatataaaaaagcagctgaaatggcctttaactataattttgcgggatttactttgcttcgtttctacgatgtaattaataatgatacgcttatggggcaatttaaaaatacgttgggcgttacaccggttgcgcaaacggttgtagtaaaaaatgcgccaactgcattaggagaaacggtttatattgttggagacagagctgagctaggtcagtggggtacgtctatttatccaattaaattaacatacaattcatctacagctgattggagaggcacagtctattttcctgcgagtcaaaatgttcaatttaaagcaattgtgaagagagctgatggatcgttaaaagcatggcagccttcgcagcaatattggagcgtgccgtcagcaacaacgacttatacagataattggtaaaacaaagccgcatagcaaacgctatgcggctttgttttgaacacaagaattatttccagttcgcttgaataaattcatctcgaccagacttagcacggtcttctttataatgctttggatttttcttgtggaaatcttggtgataatcttcggcttcataaaacgtagaggcaggaagaatgcttgttacgattggttttttaaaacgtccgctttctgcgacctctagcttcgtctcttcagctgcttgtttttggctatcgttatggtaaaaaattgctgttcgatattgcgagccgcggtcttgaaattgacctccgtcatctgttggatcaatttgcggccaataaagatctaataaacgtttatagggaaacacttcggggtcaaatgtaatttgaaccacttcgtagtaaccgcttgttccagattttacttgctcataagtagggttatccacagttccccccatatatcctgatacaatgccgtgaataccttctagctcttcaaaaggtgtaaccatacaccagaaacatccacctgcaaatgtagctttttccatacgtaatccctcacttaatccgttgttatgaagggtattataacaaatttatattgaaacagctagaaaagggtttgtagtctgtgtaaaagctgtggatattcatctttatccacagcttttacacaataaactcgactgttttgaagattgaaaaatgaaggagagaataaagaaaaaatgatagaatagataagatgtatatatcgatttagaagaaattgtacaacagaagtacaatctacggactggactttggggtgctgatggcatctagataaataaagttagtacgttagtaacaagaggtaagaaacagcatattcatgctgttaaataaatatacaaagataataggagagttgaatatgttacaagataatctcatcctagaacactatggattaaacgaattaaattttgatacgatcaaaagctaccgggatcggtttgctgaagtaaaaccagctcatccttggaatgcgcttgaaacaaaggagtttttatacaaagtaggagcttggggaaaggttagagatacccataaagaaggagtcacactcgcaggcctgcttttattcagtgaagaacggattatcacagaagttttaccccaatactttttagaatacagggaaagtaaaggaaacgaagaatggacagagcgctttacctctcaagacgggacgtggtcaggaaatatttttgatttttattttcatattcatgaaattgttcgtaatagcgaacctcagccgtcaatcgcttcctctttaacagaagttttaattaatatgcttattcatgcagattataatggcgagggcggcgttattttagaaaagcgatcttcacattacgttttttctaatccaggtcttttgttagtacctacagattcagtttttagcaataccgttagtcagcttcgaaacccaaatatcgttaagctattcagtttactagggctatgtgaacgttcgggctctggtttgaaaaaagtaaagcaaaattggagcctgcatcattataaaacgccagctattgatcaagatgtttctatgcatcgtacagtggtcacgttatctctgtccactcaagaaagacaggtaagttcttctgaaaaagacacttacaatacgtccataaccgatttgggaaataattttaaagatgtcgaaaaacatcaaaatacacctgaaaacgatgtcgaaattgactcctataataaaaataagtactcctataataaagacttaatagaggagtttaagtcatataataacgatgttaactcctgtaataaagaagacaactgctataatgatgaaataaacttatataatagtgatgttaactcctataataataatcataactcctataataacgaacaagaagaggattcttctaatttggtaaatgtagagaatattgatacgaagctatgggatattgccgcgctggctcgtgaaaaaaaacggctttcgccgaatcagatggaacatattattcttgagttatgtaaagaaaaaccgctcatgcttaaagagtttgcttatttactagaaagaacgccggatggagtacgtaataattatttaacaaagctattacgaaaaggacaattacagttgaaatatccaaatcagccaaaccatccaaaacaggcatatttatttaataagaaagatatagagaaataaatcaagcaaccggtagaacatatagagattaagctgcaaaaaattgataaggaggagtttgctaaaagctacagatttaagggggaaattcaccataaagttgtgccaagctgtcagactctctttatatgagttctggctcgtataaaggaggaaaaagagtgtgaaaagcaagtgcgttcttatttttctggtggttgtatggctgtttaatatgggtaaaggaataggatgtggatcaaaggtgaatgcagagatgaatataccgctgtcgacgtgggtgtgggatacaaagaaatggatgctgaaccaagaagctatcctcgaaaagcttcaagaaaaaaaggtgacaaacgtttatttacaaattgatattcatctttcaccttccgtatataggcattttatccaacaagcacaagcccagggcataagtgtttacgcacttgacggcgctccttattggatagggccttctggtatagaagagcaggaagcattttttaattggataacagcttaccaagcagaagcagacgagcaacagcaattttcaggggttcatttggatgtagagccttatttgtataaaagttgggaaaataatcgcgcgaaaagtattctgcagtatcaatatgttatttctcaagccgctgtacagtctcatgagttacacttgccgcttgctgtagatataccgttttggtttgacgaagttccattcaaaaatagcaatggttccggttcgctggggcggtgggttattcagtacgctgatgaagtcacaattatggcgtaccgaaaccaagcagataaagaaaacggtattactgaaataacagaaaatgaacgcaagtggggacgtgtactatccactcggattgaaataggggtagaaacgatggctacggatgaaggagaatacatttctttttctgctaaaggagaagaaaagatgatgcaagagctgggtatgttgcttacaaagtgtcaagctgaaaatcctccaagcagtatagctgttcattattttgatagctggctacagatgaagccatgacaacgaaaagaccgctgcatcgctgcagcggcctttttgggtttagggagtatagatacaatatagccattttcttaaaggactatacataaaaaaagtaaccatttaaaaaatggctactcacacaaagggggggaacttaatcttatcattcccactttttctaaaagatatgcctcttttaacccgtttttttaaaataatttagtcgtccaagattcgcagttccacacgtctgtgacaacatcttgataaaattcaggttcgtggcaaataattaagatacttcctttgtattcttttaaagctcgttttaattcatctttcgcatctacatctaagtggtttgtaggctcatccagtacaagaatattggtttcattgttaatcagcttacatagacgaacttttgctttttctccaccgcttagaacttctactttactttcaatatgttttgttgttaagccgcatttagctaaagctgcacgaatctcgtattgggtaaagtgaggaaactcattccatacttcttcaatacatgtattgtaattagccgttttgatttcttgttcaaaataaccaatatgctggtaatctcctttttctacagagcctgaaatcggtttgatttctcctaaaatactttttaaaagagttgttttcccgattccatttgctcctacaagggcaatcttttggcctcgctccatttttaaattcagtggcttagaaagcggctcttcgtatccaatgactaaatcagatgtttcaaaaattaatttgcttgaagtacgagcacccttaaagttaaactctggttttggacgctcctgagctagttcaattacttccattttatcgagctttttttgacgggacatggccatatttcgtgtcgacacacgggctttgtttctcgctacgaaatcttttaaatctgccatttcttgctgttgttttttataagctgcttcaagctgctgttttttcatctcatatactttcataaaatcgtcgtagtctcctacatagcgatttaactcttggttttccatatgataaattaaattgatcacgctatttaaaaatggaagatcgtgagaaattaaaataaacgcattttcatattcttgcaagtagcgtcgcagccactcaatatgctgttcatccaagtagtttgtaggctcatcaagtaaaagaatttctggtttttcaagcagcagtttggctaataatactttcgtacgctgtccgccgcttaaatcctgtacatcccgatctaagccgatatcttctaatcctaatccgcgtgcaatttcttcgacttttgcatcgataacgtaaaagtcattgtttgttaagaggtcttgaagcgtaccgacttcttctaatagtttttcgagttcttttggtgatacctccgccattttctcatagaggccattcatttgagcttctaaatcaaataagtattgaaaagcactttttagtacatcacgaatagaaaggccgcgctctaatgctgtgtgctgatctaaatagccgacgcgcacttttttagaccattctacttttccagcatccggttctagtttgcctgtaatgatgttcataaatgttgatttaccttcgccgtttgctccaattaagccgacgtgttcaccttttaacaatcgaaatgatacatcgttaaaaatcgcacggtcaccaaaaccatggcttagattttttacgtttaatacactcatgctgacacaccttttcttttaaaatatctatcgtacgtttcgttataaacaaattgattcataacgattatagcgaacttatatacataaatccatatgagttttccagccttgaaagtcatataaaattcactcgcgtcttcctttcacttcattcatactatatatatcaatgtagaaaatccttcatgacgaagggacggttatatcgaatcattcaaatagagtatatagaagaataaaaaggcagggggaaaagaaatgaacattcatacgatactagtggcaggaagaatgcataaagagctggaggagataatcaaacaaaagcagctgtctcagacgtttcgatttatggaagagcaagacgttacaattgaagatttaaactgggctgacgcgcttttatccttcggtccaacaaattgctttgaagatcatagctttaaatggattcattctctcggcgcaggagtcgatcggttcttagaaagcggtaatttgaaaaagagtgtgatgttaacacgtacggtttgttcattcggtcagcgaatcagtgaatattgtcttagctatatgctagctgaacttcagcaccatgcacagtttcagcatcagcaaaaacaaaagcagtggaaagtggtagagcctaagcagctttctactcaaacggtcataatttacggaacaggtgaaatcggcgggcgtcttgcagccgttttaaaatcttttggtgtacgagtaattggtgtatctaaaagtgggaatgaaaagccgtcatttgatcaagtggtctcggtttcgaaggaaaaagaattgctaaaagaagccgattggattattagtacaatgccgttaacacatgaaacaaaaagctactttgatccaaaatggatgaatttagttgaaaatgcatactttataaatgttggacgaggagcaactgtagatgaaaatgcgttagtagaggctattgagcaaaaacgtattcgaaaagcatacatagacgtgttggagcatgagccgttaacgaaagaatcttcttggtgggatcattcaaacatcatcataacacctcatatttcagcggtgactacgcctgaagaagccgtcgagtgctttgttgaaacgctgcaaaaagttgagcaaggcgaattgccttctaacttggttaatattgaaagaggctattaaagcattatgatgcgcgtttccgctacgagaatggtatactgaaacttgcttttcttgaacgaaaagaatgaaatctgttcttctagggggaacaaacgttgaagcaagaagaattatttgaacaagcacgtgtatttatagagacgtgttacgctgaacttgaaaaaagcgaagcggataaaaacaagcggttaaaagaaatccatcagcaaattatgtcaatcggacattatgatcatacatttgaagagttagagcacggagctcgtatggcttggagaaacagcaataaatgtatcggccgactattttggcactcgctcaatgtatttgataagcgagatgcgaacacagttgaagaggtaagagacgccctgtttcaccatattgaatatgcaacaaatgacgggaaaatccgacccactattacggtgttcaaaccaaaaatgaaagcaaaagagccggttagaatatggaatcatcagctaatccgctatgcgggatatgagacggaatacggtacggtaggagatcctgattctattgtgttcacggaggtttgccgaagtttggggtgggaaggtgagagaactcactttgatgttcttcctctggtactgcaagtgaatgaagattcacctcgatgttttgagattccaaaacacttagtgaaagaagtagcgattacgcatccagaacttcctgaatttgaagacttacagttaaaatggtacgctgtcccgatgatttcagatatgaagctagaaattggagggattgattacgtcgcagcaccgtttaatggatggtacatggggactgagattggggcgcgaaatttagcggatacgtatcgctataatcaacttccaaaaatagcttctctgatgggattgaatatggattacaacgcgacgctttggaaggacaaagctcttgttgaattaaatgttgcagtgctttcttcttttaaacgagaaggcgttagcattgtagatcatcacaccgctgctcagcaatttcacttgtttgaagaaagagagcaaaaaaatggcagcgaagtgactgggaactggacgtggttgattccgccggtttcgccagctaccacgcatatttttcataagccttataaaaataaagtattatcaccaaattatttttatcaagacgctgcttattaaatgaacaaaaaagagagtacgcatttgtactctcttattacacgttaattaatttttgtgtttatcaagcaagttagcaagtacatatgttttgtacttttctacttttcggccttcgtggttgcgaactcctcgtttcttaagttcctcaacataccaacctttgcttcctacgtgcatactcaaacaccctttcgtcatttttttaggatgaacagaatgaggttcattgtctgctcgaatggagacatcttgtctttccaatacgtgcctcattgtaacatcttttattttatgatgaaagggaaaaaggttaaaaaaacgagaatgatttcaaatgaattttagtttactcattcctcgtttttttgagatagaaggaggaggtttaattcatctttattttgaattagatcttctagcgtatattgatctaacaccttaatgaaggcttgcatggcttcatgtaaaacactttttaacttacagacggggctaataatgcagaagtttccttcacggtcaaaacattccacgatatgaaaatcttcttctgtttgacgtaccacttttccaatattaatgtcttttggaagctgagctaaacgaataccgccgtttcgtcctcggatcgtttcaattaagccaagttttccaagctcgtgaatgattttcataagatggttttttgaaatattatacgcttcagcaatttcttttatattgcttagtttattattatcgcgaacgcctaaatataataaaactcgcagtgagtaatctgtatattgtgtgagcctcatctttttacctcttctcttaccagcagcttatatatctataatagcatgtctatatctaagaaatacagaaagaatgctcacatttttgacagggtgaatttgtgaacattcctttaaatgtgtatataaaatatatcttttcaagtaggatatgagtattataaagatgtattaaaaatatatcttttgaaaatgaatctttcggaggcgaaagttatgaaacaaacaactatttctattgtaaaaagtacagttcctgttttagaacagcatggtcaagcaattacaactcgtttttatgagatgctttttgaacagtatccttctttaaaaaatgtattcaaccaaacaaatcaaaaaacaggccgtcaacaaatggcgttagctaatacagtttatgccgctgcgcagtatatcgatcggcttgaaacgctgcttccagttgtaaagcaaatcgctcataaacaccgcagtatcggcgtaaaagcagagcactatccaattgtcggagagttcttattaaaagcaattaaagatgttttaaaagaagctgcgacagatgagattatggaagcttggaaagaagcatacggtgccattgcggacgtattcataagtgtggagcaagaattatatgaagaagccgaagaaaaaggatggaaagattataaaaaactaatgattcataaaaaagtaaaagaagcagaagacgtgtactcgttttatttagtatcacctgatcaaaaaacgctgcctgcttttctgccaggtcagtatgtgagtgtacgaattcctggtcaagagtatttatccattcgtcagtacagcttatctggctacccaaaccaaccatactataaaattacggtaaaaaaagaaaagcaaatggaagacggggtcgtgtcaacttatttacatgatcaattgaaagaaggagacttgcttgaagtcagcgttccagcaggagattttgtcttaaaagaaaataagaaatcagtatttatcagcggcggtgtaggaattaccccaatgatgtcaatgcttcatcaagcactggaaaacaatcaagaagtaacatttattcacagtgctaaaaatgagcagtttcatgcaatgaaacgagagcttcaatcgttgtcagaaacatatacgtttgaacaacacgttttctatagtcaagcgcaaacagctcagcatgatgaacatataacgtatggtcgcttaactaaaaaagagctagctaaatatgccggcgataaacatgcatattattatgtttgtggatcttcatcatttacgcaaatggtattagaaggcctagctgaaatgggtatttcccaagaaaatatcatgtatgaatcgtttggcccgaaaatgagtatgactccttccgcataaatgtatggaaaaagggtaaaaagctaacagtagacaatactgttagctttttttatgaaagggagtttaaagatgacaaataagcagtatgacatggtgggaataggaataggaccttttaatttaggcttagcggcccttgctgagcctcttgatgaaattgatgccgtcttctttgataaagaagagaaatttgaatggcatccgggcatgttaattgatggcacggacttgcagattccgtttctagcagacttagttacatttgcggatccaacaagcccctattcttttctaaattatattcacaagcaaaaacgcttgtatccgttctttttctttaatcgttttgacattccgcgtcaagagtacaacgagtacgcaaaatgggtaggggagcagctatcttcctgccacttttcttcaaaagttgtggacgtgataccgaaaaatgaagaagagtattatgaagtaaaggtagaaacacctgagggaattcaaacagtaaatgctaaacacgttgtaatgggaacaggaagcattccacttgtacctccggcttttgaagaaaagctgaatgagcatattttacacagcagcggctatttacataaaaaagaagagattcaaaaaggaaagcatgtaacgatcgttggttcagggcaaagtgctgcagagatttttcttgatttattagaagaacagactgaacatcattaccaccttacatggtttacaagatcctcgaatttttttcagcttgatcaatccaagcttgctcaagagttattttcgccagactatgtagattactttcattcgctgtcttttgaggaacgtacaagcacggtagaagatttaaatcctttacgtcacggaattgaatcttctactttaacgaaaatctatgatttactttatcatcgttcacttaaaggaaaagtacctgttacgattcaagcttcgactgaagtaagtgatattcataaaaaaggaaatggatatgagctggagtgcaaacaattaaaggctgaacgctcttttcaatacgaagcggatcgtttgatattgtccacgggctataagccaaaaatttcgccgttcatcgaacgaataaaagatgatatcgtatgggaagatgacaagcgtttcaaagtcacaaaagattaccggctggtatttaaacaaccccgtaaccaccacttttttacgttaaccaatatcgaacattcacacggatctggcgcaacaaatcttggtttatccgttcagcgcaatcagcgtattctgaacgtgattgcaggaagagatgtgtacccagttccagaagagacgacgttccagacatttaatttgttttgaatttctgctttataaaaatcttcaatgtggtttttggttattgtagaaaagttttttactcataaactatgtttaaaagaatagtgtacgggtattttatttatagaacattagtacacaaatcaattaaggagttgcttagaatgagtaagaaaattgcagtattagtaacagatttatttgaagatgtggaatatacagatccagctaaagcctttgaagaagaaggccatacgctaacaaaaatcgacgttaaaacaggtgaagtaacaggtaaacaaggcgaaacaacattaacaattgataaggcaattgcggatgtaaaaccagaagattttgacgcattgtttttaccgggaggtttctcaccagatatcttgcgtgcggacgatcaagtcgtagctttcacaaaatcatttatggatgaaggcaaaccggttatggctatctgtcacggaccacagctgctaatcaatgctgaaacattaaaaggacgtgacgtaactggtttcaaatcaattgctattgatttgaaaaatgcaggtgcaaacttccatgataaagaagtggtggtatgcggtaatcaactagttacaagccgtacaccagacgatatggaagcattcgtacgtgaatcagtaaatgtcttaaaataagtaaataatattattaaataagtaaataatattattaaaattttctgtaaaaggcgataacagggtggtttaccactctgctatcgccttttttgtatgtaacgattttgacgaggaatttacagttatattaccgcattggatgaagcggtttctaaaagaatatgaaaaccttttactatcaataggtagaagccacgtaacacaatcgaaatattttttacataaatgaaagtataattttggtagcttaaaagacgttgcgagtttcatagttttcgtgcaacaatgagggtgcatcacgagattggcttgctacaagcttagatgcgttgcggttttacaaaaaactttattatcacataggaggatttcaaacatgaagaaaaggtttcgtattgccactgtcgcaggtgccgtatcattaggattactaacagcaggacaagcaaatgcagcagctcctgattgcaacactccaaaacaaattaccattaaagatgctcaagcagcacaaaatataaatgtagatgagctattaaagaaatttaacgctcaaggacaatctgctgaagcagcagctccacaacaagaaacacaagcaccagatcaagctgaagcagctccacaggaacaagcaaaagcaccagaacaaagtgaagaagctccacaggaacaagcaaaagcaccagaacaaagtgaagaagcaaaagctcctgagcaaacacagcaaaacacaaaagctcaacaatcagaaaatactgataaatcagaacaaacaaaagatgctagtcaatttgaacaaaaggtggtagatttagtaaaccaagagcgtcaaaaacaaggtttaaaacctttaacacttaacaaaaaattaagtgacgttgcacgcactaaatcaaaagatatgatggacaaagggtactttgaccacaattcaccaacatatggttcaccatttgatatgatgaaacaattcggcattgaatatacaacagcaggtgaaaacattgcaaaaggtcagcaatctcctgaagatgtaatgaatgcttggatgaatagtgacggtcaccgcaaaaacattctaaaccctgatttcactgaaattggtgttggatacgtaaaaggtgatactacgtactggactcaacagtttatcggtaagtaatacaaaaagagcaggatatacctgctcttttttgcgtttttagctgtccaatttgggtatagtaaagtaagaacacgtaaaggagtgccttaaattgggacgtatatttaaaaaaattctagtcgctgtttttcctatccttttaaaagaaggatatcgtcattataaaaatcgtaaaactcgaactgcgccgtctaaaggatataaataaaaaggactctttcgagtcctttttattttatgcttgaacggtgatatgcttgaattcttttacgttaaataatcctttgtcggttaattttagacatgggataacaggcaagcttaagaaagatagtgtcagcagcgggttgaagttctgtgaaatatcaagctcatgaagagccccgtgaagctgcttaagtaagctgtttacttcattgtaagggtgaggtgacattaatcctccaatggaaagagggagggagccaatcacttcattgccttttacaataacaatacctccgccgatttcttcaattgccgcaattgcttttgctaaatcttcatcatttgttcctacggctacgatattatgtgaatcgtgagcaatcgtggtagcaatcgctccgtcttttaactgaaaaccttttacaatcccaagaccaatattccctgttagatgatgacgctcaacaacagccattttcagctgatcgttttctacagaagactgaaattcgttttgcttcacttgaacttcttctacaatatgatttgtaagcaggctgtttggattaatttcaataatattagcgcgatcgtgctgaagtggtatcgtaagttttttaatggaaaactctttgagatgaacagaattcattagttctgttggaagatcaatttgttcttcttgaacagaaagcatctctccattttcagcaataagctctccgttttgatagacatgtgctgcagatatatcggttaagtcgtctaatagaataaaatccgctttgtaaccaggagcaaccgcacctctatcttttaacccgtagcattcagccgcatttaacgaagccatttgaatcgcaattaacggatccagcccgagttcaatagcaaaacgaacattgtaatcaatagaaccttccgttaataaatcatctaggtgtttgtcatcggtacagaataaaaatctgcgcgcgttacgttcatttacagcaggtaatagttgtttcaaatctttagcgacagaaccttggcggatcagaacatacatccctcgctgaatacgttcaattgcttcttctgctgttacgcattcatgatctgttgaaatgtcagcggtacgataaatattaacgcccgtagcatctagtcctgagccgtgcccatcaattacgccgtttgcatcgttagctgcttgtaatttatcgagcatatcgtcatctccatctcgcacagcagggagatccatcacttctgctaatccaagcacgcgagggtgagagaaaaatggcgctaagtcaggtgcttttaagacggctccagagctttcaaaaggagttgctggcacgcttgaaggtaagttcacaaatacgtctaaaggaatggaatccgagttttgaagcataaactcaatgccagatttccctgaaacattcgcaatttcatgagggtccgttatgacagctgtgacgcctctaggtacaagaagttttgagaactctttaggtgtaaccattgatgattcaatgtgaacgtgtccatcaatgaacgtaggagaaatgtattttccttttgcatcaacaacgttattcccatcgtattgacctattccaacaatcactccatcagcaatcgcaatatcggcttcaatgatggaaagcgtaaatacatcgataattttcccgtttttcactacaagatctgcaggtgtttttttattggcaacagcaagctgtttttttaagattgtttttgtatttgacatgaatgtgactcctctcattgtataactgaataacaatgaaggactatgtaagggagaacataaagaagaataaaaatgcagtatgaatgatgttcaaccctcgtagtccaactatttacggtagttcggtagaaactcttggaccctatttccaagactatacgagctttaggtatttcgatacattctatagacaaataataaaaacgtcaattcctaataaaaaagaaagatttttgggaatatttcatctatgtgtatgtaaacgatttaactcctatttgctcgctaaaaggtgcagcattcatgtatagaaaaaaatgtagaaaaaaccgtcaatggctattagtcattgacggagttgtcattaagcttgtttacgcagtgtacctaattcttccgcgatcgcttgcatttcacttgggctaaaagaatcttttctcattaccatatcgtataagtactttaagtcttcatacatttcttcgtcaaaagcttcagctttaattgctccgatatttagcatgcgcagtttttcactaatgctatcgaccatatgtttaatattctctggagattttactgataaatccactttgttcatccttccagttgcgttttttttattgtaacatgtttttatcgtgtgaacacttttatgtcaggttcttatccacagaagagtggaaacgatacaaataaaagaaaactattttttagtttaaaaatgattgtatataatgtttgtaataagggaaaggagtcgagactatgattaacgtattattcgtttgtttaggaaatatttgtcgttcacccatggcagaagcggtctttaaagatatggtgaagaaaaaagggctagaaggacaagttcacgtagattctgcaggcacaggaggctggcacaaaggcaatcctcctcatgaaggaacgcaatctattttaacgaaaaacaacattgattttaaagggcaaacagcaagacaagtgattcaagaggatgtagctaaattccattatattattggaatggatgtcgaaaatgtaggaaatctgagaaggatggctggacatactaaagcaggttatattgcaaggcttttggattttgtgcccgatttacatattgaagatgtgccggatccttatttcacgggaaattttgacgaagtatatgacttagttcaagaaggatgcaaggctcttttagacgaaattatagagaagcatttctcggaataagcgatacttaaaaaataaaaaacggaggagaaacgataaatgggtaaacgaaataagctagtagaaggtattgtcattggagcaattataggaggagctgtttctttatttgataaagaaacaagaagctccgtcattcaaggaagtaaaaaactgaaagacaaaacaacaactcttattcagcaccctgaacttgtaacggatactgtcaaagagaaatatgaaaccatccgtacgaccatcgagcaagtttctgaagatgtatcatttgtagcaggaaaagtagaaaagttaaaagaaacaacgcctcaggtgatggaaattgtaaacgatacaaaagaagcatttgtggagaagtatggtgatgaacaaaaataaataaggaggcacatatggctggaatgtacataaataacatcgtaaggtttggcaaagaactgatgggccgcattcatcgagatgagctgcccagtttatcagctgaattggcttattatttgctgctctcgctatttccttttttaattttcttaattacgctgattggatttttgccattggaatcaacagacctgcttgacttggtcgaaaatgtagcgccacagcaaacgctgcacatgattgaaagcaacgtttcccatatcattggttctcataatgaaaagctattgtcctttggtatcattgccacgatgtggtctgcttcaaatggaattaatgcgatcgtaagagcatttaaccgagcgtatcacgtacaagaaaatcggccttttttagtggcgagaggtatggcagttctccttacttttgcgatgatatttgttattattgtagcgcttttacttcctgttttcggtcatatgattggcctttatttatcgtctacgtttggattttcagaaacttttctcgctttatggtctgcttcccgctggattatcagcggtctcattttgtttactgtttttaccgggttatattactttgctcctaataaaaaactgctgattcgaaatgttgtaaaaggagcagcttttgctacggtgggatggacagtggtatcgatgctgtttgcatattacgtaaatcatttcaataactatacagctacatatggaagcttgggtggaattattatcctgcttatttggctgtacctatcggggatgattatcgttattggaggagaaatcaacgctattttctacgaccgtcgagtcaaatcttcatagtcacaaattgggatgaaatcattcgtaagatatgagcatactaacaaagtgaaagggaggttttacatcatgacaaagcatacaaaaaaagacggaagcaatacaaagcaaaataaaaagagccagccaaagcataaaacaagcaacagtcaaaatggacaaaacggttaccattaaggcattgatttccataataaaaagcctaacaaatacgttaggcttttttgcgttaagattttagcaagcgaaggccgtttaagataactaaaatggtgctgccttcgtgacctataacaccaaatggcatatcaagcacttggaaaaaattcgaacaaattaataaaaagatgacggcaatagaaaaaataacgttttgcttcacaattgagttcattcgtctggaaagagctactgcatccgaaatttttgatagatcatttttcattaaaacgatatccgctgtttcaagtgccacatccgttccttctcccatggctactccaacgttagcagtagcaagagcaggtgcatcgttaatgccatctcccaccattgaaacggtagggaatttttcttttaacgctttaattttatctactttcgcttcaggcaaacattctgcaatgtattcatcgactgcacattcttttgaaatagcttcggctgttttttcgctgtctcctgtaatcatgacagtatgaataccctgctctttaagagatttaacagcgtctacagcttctgttcgtacaacgtcttttagcgcaagcaatcctacaataccattctggtcttttgcgtacacaatcgtttttccttcactggcaagcgtagatgaaatcccattttcgaattcagctgcatcttctttacctacaaactctgcttttcctatcttccacatatctccttgaagagaaccaatgacaccatatccgggaacgtcttcaagcgaatctggctgaacgagtgttaactcctgcttgtttttcacaaagtcaacaatggattgagcaagcggatggttggactgacgttcaattgatgcgattttaataagaaattcttgttcgtgcatatcagaacggacaatgacatttgttacttctggttttccttttgttaacgttcctgttttgtcaaaagcaattgcgcttaaatggcttaacctttccaaatgcacgccgcctttgaacaaaattcctttttttgctccgtttgaaatagcagacagcgaagcaggggtaatagatgcaactaaggcgcaaggagacgctacaactaagagaatcattgcacggtaaaatgtctcggtccagctccatccaagtacatagtgtgggagaaatagcataactgccacaaccgatagaacaatttttacgtatgtgccttcaaatcgttcaataaacaattgagaaggcgacttttcactttgagccgtttgaacaagttgaatgatcttttgaaacagcgtctcagcacttggctttgtcattttaatggtaatggcgcctttcacattcaccgtgcccgcgaatacttcatcatcgagctgtcttagtacaggaacagattcccctgtaatagcagcctgatcaatcgttgtttgacctgagacaacaataccatcggatggcactcgttcacccggcttaactagcagcaagtcaccgatttgtaaatccgaaatggatacaatttcttcttgatctccaatcagacgcgttgcttcttgcggctgtaaattcatcaaggcgctaatttctcggttgcttttattcatggtgtacgtttctaatgcaccgcttaatgcaaaaatgaaaataagcatagcaccttctgtccagtagccaattacagcggctccaatggctgcaataatcattaacatttcgacattcaattctttattttcaatcgtttcttcaatgccttcttttgctttagcaaatccgcctatcacgtaagctaatacaaagagcgtaatagatacagcagtatcctgctgttttgacagcagccagccggctaaaatcagcacgccgcttaacaatgcagcaatgagttcaccatgtgtttttaatacattgacagcagaagatgtttgccacgtttgttcttgttttttaggtaacgcattttccatacaaatcctccttgaacgataattgagaagaataatcacaatcattacccctaaaaaagcacgaaagctgccatctcagcgatagcagcacattttttcacctattgtcttttaaattgggatatttagtatagtatagcacggaacaagcaaggaggtaacgactaacgcctaaaaaataaaaacagaatgcagctggacgtctgcattctgtaaaaaacgtactacatatctaaatgttcttcataatatttataagcggaagtgtaaatgtgctcgatatcggcatccgtcatgtacattaaggtttcacggtcaatccccttcattgtttcaataaatgtaatcatgtttttacgttcttgtctgctcatttattattctcctctccgtctgttttaatacagtttattatatttaattgtattatataacagaaaaagtattttgtgtggattttttttaaaaataggcaaaaaaatttagaaagacgtaaataattgactatatagaaaaaggtgttttataatttatatatgaacatatgctcatatacttgcatataatgaacggagagatgttatgaaaaaagatgaacattcgtttttatcgcctcaaacggtagaagaagcttcaagaatactaaaagctatttcagatcctacgagaatgaaaattctttatttgctatttcaagaagagtgttcagtcggtcatatggttgaagtgcttggtgtttcacaatcagctatttcacatcagttgactcacttgcgtcatttacgtttagtaaaatatcgccgtgaagggaatacgtatttctatacgtatgatgatgaacacgtggttggaattttgcatcaagtaattcagcacgtagaatgcgcacataacgagtagaaggagggggctttgcatgagtcatgatcatcaccaccatcatggtcaccatcaccattttgatacacagcgtgaaggcaacaaaaaaggtctgttaattgcactcattatcacagcgggtattatggttcttgagtttgttggagggctttttacaaatagtttagcgttattatccgatagcggacatatgctttctgatacaagctcacttgctcttagccttgtagcgatatggtttgctaaccgagctgcatcggctaaaaaaacgtacggttattatcgctttgaaatattagcggctctttttaacggagtggcactgtttgtaatagcaggatttatcatctatgaagcctatcagcgcgtattagagccgcagtctgtagcaagcggcagcatgatgttgattgctgctgttggtttactcgctaatttaatcagcgcatggtcacttatgagacaaggcgatgtgaaaggaaatgtaaatttacgcagcgcttacttacacgtattgggagatgctttaggatctattggagctattgtagcgggacttcttatgatgctgtttggatggtatattgctgatcctattatttctgtagttgtgtctgtattaattttaaaaagcgcttggggcgtgcttgctcatagcgttcatattttgatggaaggctctcctgaaggggtagatcatagtgaaataaaaaaccttcttgaaaacattgaaggagtcaaagatgtgcatgatttacacatttggacgattacttcaggactggactcattgagctgtcatatgcgcgtagaagatgaaaaagattgtcagcaaattttgcaaaaagccatcgatttagtacatgatcactgcggcattgagcatacgacgatacaaattgaaaaatcagctcttcagcatcgaacgctaaaagtttaaagaacaagcgagaacctataggttctcgcttcttttttgttgcataggcatcttttgtccgaatacaaaaagaataataaaaataaagccaagcaccccgctaataatattaaaaaagctgatatggtgaaagaactgaataaacgtgccgcctatataagggccggcaaggcttccgatactaaaagcaatgccgcagagtaaattacctgtaggcagtaggcgagcaggaatcaaatccgtcatatagctgattcctaaactaaacgtcgagcctacaaccatgccagctataaataaacaggctactaatggaatagcggtctcttccaagagacttgctgtaaaaaacgtaacggctccaattgataaaatccagcctaataccaatttccttccaaatttatcgctcagtattccgagaggaagctgaaatacaatagctccaactgcaaaggaagtcagcagcagtgaaataaactctacttgcaaaccaattcgtaaagcatatacaggaaagcttccgttcagtgatgattctaaaaatccatatccaaaaggcggcaaaaaagcaatccaagcatacttagccgccttagaaaatcgcttagccgtttcttttaaggaattaacctccacttcctgtaggggaaattcattttttatcaaaaataaaaacacccacgttatgaggcagagagctgaagaaatcataaaaggaagcgcttgattaatttcaattaacggcgtcattaaagggccaacagcaaaaccaataccgaaaaaaagcccgtacaatgaaatatttcgacctcgtttatcagcaggtgaagacgatgtaatccacgtttgagtaccaaagtgcagcgcgtgatctcctattccaataaataaacggagcacaaaccaaaaaacaacagatttccacaggggaaataaagctaaagacaaaataactaaaagtccgcctgctgcaataattggcttatatccgtatctgcgaagcggcccttccataaaaggagaaataaataagatgcctaggtacaatccagttgcgtttaatccgtttatagtagaggaaagaccgtctttctcaaaaataatagcaattaaaggcagcagcataccttggctgaatccagaaatggcgacaaggctaactaaaatccagaaacgttgttgatgagtagcactcatagcatttaacctcttttttatctatattttgtcaatccaactgtttaatcgtacaaggaaaacgctttattgacaaggatgtaaacatgctgcgctgtctatttgacatctttttataggaagagtagaataaaacatgtaaatagttacatgtttttatttacaataaagaggtgatcgctatgatagaaccagtgcttaagaaaatagcgacattcacaattaatgtcggtacaccgattgtcattggtcatacaggattgggaaaaaaacagtttatccctattaagtcaggtactgcagatggagagataaaaggcttaatccttccaagcggagcggattctcaaattattcgttcagatggacgcgttgatttatctgcaaggtatgtaattcaaacagaagatgatgagcttatttatatcgaaaacaacggaatacgtcaggttagtgaagaatttaaagaacaggctgctgaaggtaaaattgtacctccagagcatgtttattttcgtacggttcctgcctttgaaacaggaagtgcaaagtataagtggctacaggaccgcatttttctaggcgctgctgtgagacacccagacagcgttgtgctagacatatacgaagttttataaattaactcaaaggagagatataaacatggaaaaatttattgggaatcatatgatttacacatacgaaaacggatgggaatatgaaatttatattaaaaacgaaaatacaatcgattaccgtattcatagcggaatggtggcaggacgatgggttcgtgaccaaaaagtagatattgtgaagttaacagaaggtgtatataaagtatcgtggactgaaccgactggaacagatgtatctttaaactttatgcctgatgaaaaacgcatgcacggcattatcttcttcccaaaatgggtacatgaacatcctgaaattacagtgtgctatcaaaatgatcaccttgatttaatgcatgaatctcgtgaaaaatacgaaacgtatccgaaatacgttgtacctgaatttgctgacattacattcatcaaaaatgtcggagcgaacaatgaggaagttatcgctcaagcgccttacgaaggaatgacagatgatattcgcgctggaaaattgatttaatacggaatcataaaaagaggctagaacaaaaggaagatccgaacgatgaattgagattcttaatggagaatcaacttcgttcggatttttttatggtgacggtgtaacaagtatccatattgagagtagttgattatataaaaagcggtttataatgaagtaaaggagtgaagaaaatggaatttaacatgaaagaagaggcggggtttacaacaaattttccttatggagagctacatatcgccggagatgaagagtatggctttcgtccgtatcagttaatggtatcgtccattgctgtttgcagcggaggcgtgttaagaaagattctagagaaaaaaagaatcgctttttccgatttacgcatccaagctgatgtgacgcgaaatgatgaaaaagcggggcgaatcgaaaaaatttacttgcactatatcatcacaggagaagacctgccattagacaaaattgaaaaatcagttgagctagcacgaaaaaattgttcgatgctacagtcggttgtggacagtattgaagtgacagaaaccttcgaaataaaatgagcctgggacaaaagtatgttagttgaaggaaaatccgaacgatgaatcgagattctagctggagaatccaactcgttcggatttttttattggtaggctgaatggaggtttcatgtatgtggctgcttctagctggtgattggagggcaagacggaagactgctgcgggaaaagcggaacaggtgaccccccagaagcgtaagcgaggaggagactcactgggccgccctcggaaagcgaagtcttgcacggaaatcaacagcggtatctcaagcggtccctacgagctcatttctcccctttgttcctctttagatggaatagatttagttatgtctcaagctcacatttcctttggtttgcttccagctttatcaaaatagcgcatgcgttcaggagtcagctgaagaagcaaataatttgggtcatctggacttttaatccactcttttaacttttcattccaaaatttcttttttaactcttcgtttgtttctacatttactttggcttctacctctacatacggatcactccaaccttgcccctcatagcctaacaaaatatgaacgtaagggtttttttctagttcttcgactttatgggtatctttattggtggcggtgtagagcacaagatcttcatgaaaaaacatcataaagcgtgaataaggttttccatcttgaattgtagctaacgttccaattgtatagtcatccagtaaggataaaatttgatttttcacatcattattgctcattttttcactccttattatatctttttatccttggtagtttggctgatttttaactatcttaatcaaaaatcaattaagggtttatcatttataaaaataggttaaaaatactaacattgacggtgagtctatacaaattccattaatttgatatgattgattttgttgtcaaaaaatgaataaggtaggtgtacatatcgatgatcaatcggatttttcttatagcggttattcttggggtgccgctatctgttattgggcacatgatgcactggtcagatgttcttatgtttattatttactgtttaacaatcattgccctcgcagcttttatggggagagcaacagagagcttagctgttgtagctggtcctcgaataggaggtctattaaatgctacgtttggtaacgctgtagaattaattatttctatttttgctctaaaagaaggccttacagctgtggtgcttgcatcgttaaccggttctgtattaggaaatcttcttcttgtaggcggtctttcattcttcatcgggggattaaaatttaagcgtcaagaatttaatgtctatgatgcaagacataattctggattattgatctttgccgttatcgttgcgttcgttattcctgaagtgtttgctagcgaaatggacgaagtgaagactatgtccctgagtgtcggaatctccattattctcatcatcttgtacttagcggcgttattttttaagctggtaacgcatcgaggcgtgtatcagcataaaagtgaagaagtggaagaacatgaggagccagagtggtcaatgtggaaagcgattactgttctctttttgtctacgttagctgtagcttacgtatccgaaagcttggttagcacaatcgaaattgtatcggaaagctttggctggagtgagctgttcatcggggtcatcattgtagcgattgttgggaacgcggcagagcatgcttccgctattattatggctgttaaaaatcgcatgggtgtagctgttgaaattgctgttggatcaactttacaagtagcgatgtttgtagcaccgatattagtgttagtttctctattattcgaaaaccaaatgtctcttgtctttacttggcccgagttgattgcgatggtaacggccgtatttttaacgattgctatttctaatgacggagatacaaactggttcgaaggtgcaactcttttaggtgcttatattattatgggaattggtttttatcttatttaaaaaagaagaggctgggacaaaaatgttttagttgaaagaagatccgaacgaataatcgttcggattttttaggttatagtgaacatagatttcatgtgtttagttgcttctagctgttgattggagggcaaggagaagactcctgcgggagaagcggaataggtgagaccccgcaggagcgtaagcaacgaggagcctcatcggccgcccgcggaaagcgaagtcttgcacggaaatcaacagcggcgtaaaaagtgacccatactagctcatgtatcccattggttcgtctttagattggattaatttagttatgtcttaatctcttctttttgtgtaagtaaatagaaaaatttccctttcggtattcaggataaaacaggggatgtttgaaaaaactatggttgcattcattaacgatgttgaaaggagtttctagatgttacgtaaattgcttttatttgtgtttaccatcattatttcattttcatgttcaacgaagatcgccattgctaaaacagctcatcctaccatcaacgtgccttcttcagctttaaatatttcaaaagaaaatacgtatccaaatgctagtcaagacacgccatatttgcagccgagtgagtttacaaaagagctcattgaaacatcaaatgtaaaaattgaaaaccctgatttaattcgtatattaaatgaatcaaacatttctaaaactccatgggcaattggtttcagagcaaccgtctttttaggacagtggccattaaattacgaatccacagaaacaaacgttaactggcagcaccagcgaatcaatacaaatcattatgataacagagcaggaaaaactcagtacaaaatgatgtacagccaggaaaatcaaagccatgtaaaaggcggattaacagcaaaagtgcctcagcctgatcatgttaaacaaatgatgctaattgaagcagctaaaaaaacaaagctcactttatcatttcaaacgtttgtaggtgccggaacgaaaaaagaccaggtctataacgtagctcccaaaaaagtaggttacctctatgcttatacgcctgctgtaagtgaaaagggaaaagtaacatatggagaagtgtatgtaacggtaaaaggcagcaagcgttcaattgtggtgagaaatgtaacgtctcaaggaattggagcatggattccagtacaagattatgtttccttaagctttggagcttatgaccagccgagataacaaaaaagagattccagtgatggaatctcttttttgttattttgtaatgctcgcttggagtttgctaaaatcagtatcttgataatagctgttttttaccaaaatattaggtcctaaacaagacactgccgaacaatgacagctaagttctttagaaatcgtgctttcctgccacgtatcaaaagcgtctgtaagctttgtctcttgaatgttgccaagaggaggcgtatcaccaaaatcggttacgataatatctccgtcaaaaatatttacatttaggcgagagcgcccgtctggatcgtttcgaacagttacatttttactgctatacaagcgctgtaagagcgctaagtcttcctcattattactgcatgcataaaacggcagcgtgccgaatagcatccacacattttcatctcgaatatcaagaaggtgatgaatagcttgacgcatttcaggaagagataatgtttctagagtgctggcaaagtcacttggatacatagggtgtacttcgtgacgctgacaaagcatttcatcaacaatttgacgatgaatcttttccatatgaggaagcgtacgtttatttaacattgtttcagctgatacggttacacctgcttttacaagcgcgcggctgttttcaatcatacggtcgaaatatttggcgcgctgctcataagtaggctttcgctccatcattgcaaagccagcttccacaaagtcgtccatcgttccccagttgtgagaaatatgtaaaacatctaaataaggaatgatttgttcgtaacgagcaagatctaatgttaaatttgaattaatctgtgtacggacacctcgttcatgtgcatactttaataaaggcaccacataatttttcacggaagatagagacatcatcggctctccgcccgtaatacttaacgctcgaagagttggaatttcatcgagacgttttaaaattaaatcaagcggcagtgcgtttgggtcttttggctgcagcgtatatccaactgcgcagtgctcacatcgcatattacaaagcgtcgttgtggtaaattcaacgtttgtaagcgtcggtttgccatattgtttcatatctaaatacgcttcccacggatcgaactccggggtaattcgttgtaaagtggccataaaaaaactccttttatttttccgtaaagtgaaatgatgatgaaaacatctcacggtccgtcctgctagactaaattatacgtctcattcaaaacggacaccagtgactattatggattttattgcttttagttgtcaaatatgaaagtattcgttaggatataaagaaatacgaatgaaaagctatatcaggagggtttaaaatgggaaacgccgttcgagataaagattcacaagtacgttatttaaaagatcgtttaaatatgtttgtacacgtattagactccatggagcctgaaaacacagacctagaagacattgaccgtttgattacgatgattgatgacctcgaagcaaaatgtgagcagtttaaaaaagataaagaatgaacaaaggaaaaagcgctagaaaaactagcgcttttttgcttgaagtggaaatcctcctataaaggtctttcgaaacaatttttgaaggagtataataaattttgaaagttgtacgacagatagataaatacatacattagcgggatatgggaggaattaagtgatgattgaagctttaaaacaaagcatgtacgatttaattgttgaaacatctacaaaattgccaaaagacgttcgacgtgctatcgcaaaggcaaaagcgcgtgaaaatgcaggaacgcgtgcagcaatgtctttagcgaccattaccaataatattaaaatggcggatgataatttatcgccaatttgccaagatacaggtatgccaacatttaaaattaaaacccctgtaggagtgaatcagcttcaaattaaagaagcgatttattgggcgattgaagaagcaacaaagcacggaaagcttcgccctaactccgtagattcgttaacgggagaaaacagcggtaataatttaggcggcggcacgccggttattaagtttgaacagtgggaaaatgactatattgatgcgcgtcttattctaaaaggcggcggctgtgaaaataaaaacattcagtacagcctgccttgtgaagtagaaggtttaggtagagctggccgtgatttagacggcattcgtaaatgtgtgatgcactctgtgtatcaagcacaaggtcaaggctgtagtgccggcgtcattggtgttggaatcggtggcgaccgtacaacaggctatgaattagcaaaagagcagctgttccgaaacttagatgatgaaaatccaaatgctcagctgaaagaattagaagagtatgtaatggaaaatgccaataagttgggaatcggtacaatgggcttcggcggagaaacgacattacttggctgtaaagtcggcgtaatcaatcgtattcctgctagcttctatgtgtcagttgcgtataactgctgggcttaccgccgtttgggcgttaaaatcaatgccgatacaggaagcgttcaagagtggctgtatcaagaaggcgaagaagtagattttaataaaaatgcaggcgcagaagagaaacaaaatgcggatgaaacaaaagaagttgtattacaagcacctattacagaagagcaaattcgtgaattaaaagttggcgacgtggtgcgcatcaacggtatgatctacacaggacgcgacgctattcataagcatttaacagatcacgatgcgccaattgatctaaatggacaaatcatttatcactgtggtccggttatgttaaaagatgaagacgaaaaatggcacgtaaccgctgcaggaccaacaacaagtatccgtgaagaaccttaccaaggagatattatgaagaaatttggtatccgcgcggttatcggtaaaggcggtatgggtcctaaaacgcttgctgctcttcaagagcacggcggtgtatacttaaatgcgatcggcggagctgcacagtactacgctgattgtatcaagagcgtagaaggcgttgatttgatgcagttcggtattcctgaagcaatgtggcatttaaaagtagaaggctttacagctgtagtgacgatggattcacacggaaacagcttgcatgcagatgtagacaagtcttcatttgaaaagcttgagcaatttaaagaaccggtatttaaataaacatacgtccggagcgtatggtaaaaagtaacgttcatgaacgagaaaattgagtggatactaagcgtaaaatgacttccgaaaggagcttcttatgcgccggttcaccttttttctcgtttttttattcgtgatgtcaacaggcatagcatctgttgaagcacaaatgtatccaaacactccgatcagctggggatttcaaaaaagtaaagatcacaagcccgcatccgcaggtacagcttatgaacaaattcttgctaagtatgatgctttttacctcggagatacaaatgaaaaaaatatttatctaacgtttgataacggttatgaaaatggctatacaccgcaggtattagacgttctcaaaaaaagaaaggttcctgcaacgttttttgtaacaggacattatttaaaagaagagcctaagcttattaagcgaatggtaaaagaagggcatattgtcgggaatcattcatggcatcaccctgacttaactcaagtagatgatgcacgtttcaaagaggaattacaaaaagtaaaagatgaatacaagaacattactggtcgtgatgaaatgaaatatcttcgctcacctagaggtgtatttagtgaacgaacgctagctctttcaaagcaagagggctatacgaatgtattttggtcacttgcatttgttgactggaaagtgaatgaacaaaaaggctggcgctactcatacgacaatatgatggctcaaatacatccaggtgcaattatgcttttgcataccgtttcaaaagataacgcggatgcgttagatcaagcaattgtagatttaaaaaagcagggctatacgtttaaaagtattgatgatttaatgaacgaacgcaaacaaatgaagaaaagtccttctaaaacgaaataacgataaaaaccgatgggaatgtttctcctgtcggttttttgctgttgaagtgttataatatgcgttgatgtcttttttaaagcaatacggtctaataggtttaagcagctaaggaccgttaataactataactatataaagaatttaaactaatcggagttggtctcatgaataaaccaaaaactgaaatgaaagttcaaaaaggacaaacgtttccgttaacgataaaaagactcggtattaatggagaaggcgtaggatattttaagcgtcaagtcgtctttgtaccgggagcattaccaaatgaagaagtggttgtagaagcaacaaacgttcagcgcaattttgctgaaggtaaaatcaagcgaattcgcaaaaaatctcctcatcgcgtagatccaccctgtcctatttacgcacagtgcggaggctgtcagcttcagcatttatcctatgaaggtcagttagaatccaagcgcgatatcgttctgcaagcgttcgaacgtcacagctcattaaaaaaagtagaggaaaaaacacgccaaacgattggtatggaagatccttggcgctatcgtaataaatctcagtttcaagtcggcttagataaacaaaaagtcatcgctggtttgtacggactgaattctcaccgcttgattgatattgaaaactgtcctattcagcataaagctacaaatcacgtgacaaaagaaatgaaacgaattttacaagaccttcaaattcctatctacaatgaacgcaaacgtcgtgggattgtacgtaccatcgtatctcgagtaggatttgaaacgggtgaagtacaaattgtcttgattacggctaaaaaagaaattccgaaaaaagagctgctgattaaagaaattcagcgtcgcctaccggaagtgaaatcgctcgtacaaaacgtaaacggccaaaaaacatcgcttatttttggagacgaaacgtttaccctcgctggaaaatcggtaattcaagaaacgttaggagacatttcattcgaactttcagcgcgtgcatttttccagttgaatcctcttcaaaccgtgaagctatatgacgaagtaaaaaaagcagctgcgctaacaggcagtgaaaaaatcgtagatgcttactgcggagtagggacaattggcttatggcttgctaaagatgccaaagaaattcgcggaatggacacgattgaagaatctattgtagacgcgcggaaaaatgctaaagatcatggatttgaacatgctacgtatgtaacgggtccggctgaaaaatggatgccgcagtgggtgaaagaaggctggaagccagacgtaatcgtcgttgacccgccgcgaacaggctgtgatgacaagcttctcaaaacaattttacaagtaaagccaaagaaaatggtttacgtatcttgtaatccatccacattagcgaaagatgtgcagcagctgtcgaaggcctatcatgtggattacattcagcctgtggatatgttccctcatacggcacatgtggagaatgtggtgagtctgacgttaaagaaatgaatagatgaagagtaaagggcagatttggttctgctcttttttctttgagctgtactcttattagtgggaaaaatcgttaaaattcagcacctgttcctttagtgtaaaaaatattttagtatagttaaagtaagttccaataaagtttcgctttggaaagttttacgtcaccaaggagaaattacatcagagagtgaacatcttcaaaatgaactataaggacgtttcttatacaaatgataaacgcaaatcctatctcaaaacccacacccttaaccacatcaaggatactatagtaatgaaaattatggaaattatttacaggggtggcagagttaagatgaactcaatgtttttaaaagggctttcagtctgtatggacagaaggtgcatttgcaagagcaaacagagattggcttcgcaagcgatttgaatatattaaaagtattatggtaggttcctatgtgaatttccctatcagcagccttagaaactacgagtatgagtattttggagacaacgcagagaggctagaaagagtgaataaaaagtacgatccgtttaatgtgttcaggtttctgcagggactcaggtagcatgaggaaaaggatactaagttgacgattgaaattgttcgattcccttctttcgaagaagggaaataaatgaaagtaatctttcctgttgacaaagcatccaactggtattagaataaacaactattcgacagtcattctattgattgaaaaatttaatacgtagaaagctatgattgctatggatcacactatagcaggagcagcttctggagagatcgcgatagtttcgcgacgccgaagggttcacaatctcaggcaaaaggacagaagagtaccggatatttatttggcatgttactaattggtagcatgtaccttgatatttgttattcttatgaccatgagattggagcgcatccaatctctttttttattggactttatttgtagtccgcacgatcgcatcaaaggttttattgttaggaggagttagagttggaacaacgagaattaaagagggatttatccaatcgtcatgttcagctaatcgcgattgggggaaccattggtacgggcttgtttttaggttctggtaaagcaatacagcttgcaggtccctctatcatctttgcttatttaattgttggtattgcgcttttctttgtgatgagagcgctaggagaactactgctgtctaaagcaggttatcaatcgttaactgatattgctgaagagtatcttggaccatgggcgtcatttgtaacaggatggacctactggttttgctggattatgacagctatggctgatgtgattgcagttggcgtatatgtgaaatattggttcaatattcctcagtggattcccgcacttatttgtataatcattttattagggcttaacttattaaccgtaaaattatttggagaattagagttttggtttgctttaataaaggttattacgattcttgcattaattattattggcgttattttgctggtaatgggatttaaaacagacgcgggatccgttactgttcaaaacctttggaatcacggaggactgtttccaaatggggtttcaggtttcttactctcattccaaatggttatattcgcatacgtcggggttgaattggtaggggtatcggcagcagaaacatcaaatcccccaaaaaatattccatcggccattaataaaattccgctgcgaatcttatttttctatgttggagcgcttatcgtcctcttatttattaacccgtggatggaattaaatgcagcagaaagcccatttgttaaaacctttagtttagtcggaattccgcttgctgctggaattattaattttgttgtattaacttcagccgcttctgcttgtaatagcggaatgttttcaacaagccgtatcttatataatttaagtaaaaatgaccaagggccatctaagtttgcaaaactgaacaaaaaccacgtaccaagcaacggattgtttgtatctacgctggtcatctcagcgggagctctgttaagcaaacttataccagaccaagctttcggaatcgttacgaccattagcgctatttgttttatttgggtgtggagtatcattctcatttgccatctaaggtataaaaagacgcgtccgcagctgcatgcagcatcagcattcaaagcaccgttaacaccatttataaactatgttgtactagctttgtttgcggtgattcttgttattatgctgttttctgacgcgacgcgcccagccttattgttgacgcccgtttggtttattctcttatttattttttactggactagaaggaaaaagaaaatcaatctttaaaggctagaaaatcagcagggaacaaacatgattttttataaaagaatatagtaaacttctgacctcatcactccgtgatgaggtctttttagtggaggataaataattgatttctactgcatgaataaaatgcaggaagcaaagtttatagaagaaaactaaaaaattgttctaacagaaaacacagtgagaaagctcatagttttctgataggaatgtagaacaaattgcttttcttctgtgtctaaagatggaattctgtcatttatatggaaaagttttcattttgcagtacaatggaggtagacttcattagattaaggtgaacaaacatgaaatggtttaaatctcatacgttttggaaaatcttcacgattaatgtgcttcttatttgtaccgtactgacgctaatgtttattgtttcaagagtgatgctgcctaatatttctcaagatcaatatcgacaggtaactgataaaaccgtcaagagaatgaaagagcaaattaacgtcgtcattaaagatatttggagcctaggcgacgaggtacagcaagatcctatttttttatcggatgatgaacaagaaatagacaaagaattgcagaaaatagttaatatttcaccgtatatcgatagcggaaccatttttaatgtaaaagggtatgttgagcattattacccgaatgatttaaaaaatatgaaacatgtgaacttaagtaaaagaaaatattttcaagaagcgctgcgaaccaaaaaaatatatttaagcgatgtcgtttcagcagatacaaagcactatattgtggtgatggcgattcctattttggatgggcagcaaaatgtaaaaaaggttgtaaatttagcgctgcgaattgaagaaaataaaagctttcaatccatctttcaaacgtttgatataggagagaacggctatacatttattgtagaccgcaatggtagaattatttcccacccagagaaacagagaatcggtgaaaatgctaagaaaaatgaaatcgttcagaaaacgatgaatcataaatcaggatatcagcgcgttgtgaacaccgaaggtaagtatttctttgcgtctttcgaatatattcctgttttggattggggaattgtcgctgaattacccgttgaagaaatttacaggccttatgaaatgtttgaaaaaacgctttggatcgtttcaggggttacgattttactgctttctttttttactgcgttatatgcaaggcaaattgtgaatcctattcataaactatatgaattggcgggacaagtagcgcgcgggaattttaatcaaaaaattccggaacgagaaattgagcggggcgaaatcggtattttatctaaacagtttaatgaaatgattagctatatacgccattctaaagcaaatttacagcaaaaagaaaatcagctgcaggaacagaaaacgtttttaagacaagttattgacattaatccaagctatatttatgctatcaatcacaaaagggaattcattctcgttaatgaatcttttgcgatgctcttaggtgaaaaatctgatgacttaattggacaatcaattgataaatatcagttcaaccttcgatcagatcttttatataaaggggcgttttcaaactgtacccaaaaagggatggtattagaagaacagtttaaagattcgaaaggaaaccggcgctgggtcgaaacagcaaaacttcctattatgaatgaaaaacaggaagtgattcaaatgctgtgtgtatccacggatattacggagcgtaaaaaggcagaagagaagcttagaacttctgagaagcttgccgtggtaggagaacttgcagctggagtggctcatgaaatcaaaaatcctttaacttctttaaaaggttttgttcacttattaaaagaacaacatcctaaagatgctttgtatatagatatcatggaaactgaattagaacgaatgaatggaatcgtagaagaatttttgatgttaggaaaacctcaggtaatgaaggttgaatctttgaatatgcaagcgcttgttcaagaagtgtgctcacttcttgaacctgaagcaacagaaaaggaagtagctttcatatttgaaagggaccaccagttaccaagggtgtatggagataaaaatcagttaaaacaagtatttattaatattattaaaaattctatcgaagcaatgcctgaaggaggagctattcatattacgactaaagtaaaagaaaaccacctttggctgcagcttgctgatgaaggacagggtattcctcctgaacggttagcgaagataggtgagcctttttatagtacaaaagaaaaaggtacaggtttaggactgatggtcagctatcggattattaaagctcatcacgcgcagatgacgttttctagtcagttagataaaggaacaagtgtggatatattgtttccaatcataaaaaagtaggggaacttcccctactttttttattatacttataatatatcaaaagcgttgatggtactaaaataaatgaaagtgctaaagaagatatccacaagttaacaagaagttaactgctgaattatataggatattcacaactttatccacactattcacattttttcagaaaatttacataaaaattacccactgttatttcaagttatgaaagcggtaatatgcatattcaataaagttatacacattatccacataattgtgggtaaactttgtggatatagtagagtattaaaaaaacgtaaatcatacgcttgaaatcttcgtgttattatttttacataatataaaaacgtccttccgatacaaactgtacagaaaggacgttgggatgatcaagcgttggatagagatgttttgcctcacttattttttcgtgtagccgcctgcacggtctgcttttttaaactcgcggccgtaatagatttcttgagcgctacttaacgtattttttgcgttttcttttcgttttttttcagacataaaaaaacctccaattaacgtttttcgatcatgctacttattttttccagaatctctcgtttttaatcataaaaaaagctctccgttacacggagagactcttacgcttctttaagttggtgatcttcttgaacgtcttgttcgtgacgcaagtagtatagtgtatacaagtcttttggaatttcgtataaatcatatacgtcttcatgttgattaatttcatcgtataaagctttatgtgtttcattcgccagtacggcataaggcagtttttctgcagccttaatagacctgatattaattttacgaattcgcataaaaattcgctctatatttaactcaaagaacagttcattaaagaacgcttcttttgcaatttgattatatccttttccatgaaacggtttgccaagccaagtgcctaaaaaaccagcttggtcctgtacatcaaataaattaatggtgccgatagggttaccccattcgtctaaaatcgtgcgagaaataatttctccatgatcttctgcttccatcgtttgtttagtcacaaataaaaattcttcataggaatgggctttatgacgaacaaaagggaagacatcaggatgtaccatgagttcgtatagagattgacagtcatttaggtcacgtttttttaacataacttttccctcctgatcgagggtatatacagactccaatcaagtccccaccctcgaaattttttaataattaaaaaaatttcggggtgggaatcgaacccactagaaccagttacctggtggcgcaccatttgccttcccattacaagtcaacaaacataaaaagtcaacgtgtgatgtttatgcttttgtgaaattcacatgcttctaaacgtatcatactaaaaaaaataaaaaaagaaaataggtaaaatgttaattttttttaaataatattttaccatctatcatggtgaaaaggggctttgctaagtagtgaaagggatgatggctccatagcactaaatcagcgtcttttccagcttcgatactgccgattcgttgatcaatacggagattccgagcagcagcaatcgtgatgccttctaatgctttttgttcttcgagtccttcacgtacggcaatggatgcacaaatatttaagtactgaatgggcgtataagggtggtctgttgtaatagaaacttctactccttcgttgcagagagcttgataggttttccacgttttatttttcaattcaacctttgagcggcgtgttaaagttggtcccacgcttacttttaagtttcttccacctagctctttagcaattaaatggccttctgtacagtgttcaatacgaacgtctaaattaaattcatctgctaagcgcagagctgatagaatatcatcggctcggtgagcatgaattcgaacgggaatctctctattcagtgcttgaatgagcggtttgattcgcaaatcatctttattatcactgctttttgcatgataaaaggcctctctcagcatccccataatacccattcgcgtaatggattctttattgccatggctgtgaattcgttttggattttctcctagcgcaatcttaagtccagctgtctcttgaatcaacatttgagaaatacttgttccggctgttttaataacggacgttgtacctccgatcacatttgcacttccaggcataatgtgtacagacgtaatacccgcttcaatggcatctttaaacccagaatctaaaggatgtacgctgtcaaaagctcggatatggggagtcataggctcgattgtttcgttagcatcatttccggcccagccggttccttcatcatatagtcctagatgtgtatgaacatcaataaatcctgggaataagtagcgctgtttgcagtcaatgacttctacttgaagaggaggctgcaagtttggcccaattaaaacaattttgccatcttgaatgagcacatcactattataaataggttttgacgtaataggatagagcgttgcgtttttcaagagaatggttttcataaaggatgctcctatctatcggcagcttagtcacctgttttaggtaaatataagaaaataactagagtaaatctcgcaatgcatcttctaatacagtatatgtaaaaatgtaattctgttgaatcaatttttcaggtaaaacacgctgtccctttaaaataatcatgctcatttctcccatcagcagttgaaggccaaagctaggtacgggcatccagtgagggcgattcaatacttttccaatcgtctttccaaactctttcatttgaacgggatttggggcagttacattaacaggtccttctatttgtttgtgatggatacaataatcaatgatctccacgacgtcttgaaggtgtacccaagacatccactgctctccagaaccgactgttcctcctgcaaataatttataaggaagggcagtagaaggaagtgcgccgccgtctttccctaatataacgccgaatcttgttaagacagtacgaatgttgagctccatcgcttttagcgcttcattttcccacttttttaccgtttcagctaaaaagtctgtaccgatagaaggggaagcttctgtgaatgtttctttcgttgatgttccgtaataaccaacggcgcttgcatttacgtaaagagacggtttttcgggtaaagaagccataatgcgaagaatttcttgagtagaagaaaggcgactttccacgattgcttttttgcgttcgtccgtccatcggccgctgttaagtgaaacaccagctaaattgataaagacgtctgctccttctacttgagcttcaggttggctgttttctcccatccactctacatatttaagtttcggatctcttgcagctttgtctgcattgcgtgttaaaatatatacataatgcttttgtgttaagaaatgttttgttaaagctttgcctacgaatccagtgcctccagcaataacaattttcatacgaatttcctcctttattgagataaacaaaaatgtgtatgatacgtttggcggttcttcagccatcaatttaataagaaatatgaggtgaaggtgaatgcctgttgtcacaaagatcacaacgcaaaagaatagcggtgaacgttataatgtgtatttagattacggtaaaggtgaagagtttggctttggtgttgatgaaaatgtcctcatcaaatacggcttaaaaaaaggtcgtgagcttgatgaatttgaactaacagaaattcagtacgcagatgatgaaaaaaaagcttataatttagccattacctacttatcttatcgaatgcgctctgaaaaagaggtgcatgattatttaaagaaaaaagacgttaactctactattattcaacaagttattcagaaattagtcagccaccgttatttaaacgatgaagagtttgcgaaagcatttgtgttaacgcaaatgaatacgacatcaaagggaccgaatgtaattcaaagagaattaaaagaaaagggggtttctgattccattattacccttagtttatgtgaataccctgaagaacagcaaattcaaactgccgtgaagttaattgaaaaattaaaagggaaatacaaaaaattatctcaagtgatgatgaaacaaaaaatggaacaagcattagtagtgaagggctattctttttctattattcaagaagcatttcagcgcacgaatacagaaaaagaaagcgatgaagcatgggaagctctgcaataccaaggaatgaaagctcatcgtcgtttttcaaagtatgaaggctgggaatatcagcaaaaaatgaagcaggctctttatagaaagggattctctattgaccaaattcaatcatttctaggttccattgaagaggaataaaggcgggacaaaagtgtgttaattgaagggaaatccgaacgatgaatcgagattcttgatgtagaatccaactcgttcggattttttcagtgtgatggtaaatgtatacttcatgtatttagctgcttctagcggttgattggagagcaagacgaagacttctgcggaaagcgaagtcttgcatggaaatcaactgccgtgtcatacgcaatttctataagatcatttatacaatttgtttatctttagattagattgatgtagttatgtttcactctctttttaaaacaaaatatcttctgagccgttctgttgtttataaataatctcagcaatttctgaagcggagcgcaatcggcttttatctttaatgtggttgttgtgatcccaaaaaggggtattcatgcctcccatgtatgctgcaatcacatgaaggctggtatcttggtattccacttttaaactttctgtaaatccccttacgccaaacttacttgccacatagacgctttcattagctttcccgcgaagtcctgcagttgaaatgatattcataactttaggttcaggtctcgttaagagatgaggcataagcgcttgtgttaaaaaaatagttcctttgacatttgtatcgatgatttcatcgatggcttgttttgtataatccgtcaaaggaccaaaatgtccaatgcctgcattgttgataaggatatctactgaatgctgcatcagcattttctctacagattttcctacttcttcatactttgtaatatctacagacatcgtatatacgttgtctcctagctcatgctgcgcttcatttaatttctgttgattgcgtccagctagaatgacgttatagtcttttgcgtaaagttttgcaagttcatttccaagacccgtcgcaccgcccgtgattagtactgttttcattcccaaaactcccttttcatagtctccctttagttataccttttgttataataaaatgaaagcaaacaagggggaaaacagcatgtctgaaaaacgttacagcgatatgacgacgtatgaacttcaacaagaaattgggtctcttcaagaaaaagcacgaaaagctgaacagcttggcatggtcaatgagtatgcagtattagaaagaaaagtaacaatggctaggtcatatttattggatcccgaaacgtttaaagcaggggaagtatatgaaattcaaggagatccgggttcatattttaaaattgattatatgaacggagtttttgcgtggggatttaggcttggcgcaccgcaaaaagaagaggcattgcctatttccatgttgaaaaaataacgggatgaacaagcagcacgaggtagcgctgcttgtttgatttctatagtcactctatttttaaacgtagagcaagccgttattcttcgcgttcattagaagcatgcatgcgttcttgcggatgcgtattgatggttccatttgcacgttttgaagcgtattcagcttttgctcgaggttcgccttcaaacttagtatgatgttggtttggaaaatcttttgctttattgcgcatcgatacctctccttttacaacagaaagcgttgcggttatgatatagtacatgagggagtgaataactccgcatttatagtgtaagttaaaagtgcaaacatactcataaagaattttggtaatcgaggtgttcttatgaacgatatatttgaaagattaacgaatcagctattaagtaaaaacagttcgctttcatatgctcaagcgcgcacatgggtcgaacttttctgggaagattttgagtcatcttacgcaaaagccggatatgattataaagggaaagaagcgacggaaaaggttgttacgatgtatatcaacagctatggtgacaaacttcatgaaatcgcggttaaaaaccctaaatatcagcatttattaaataacgatgactatttaaaacattaaataaaaacgaaccgtcttctcaagacggttcgtttttgggtttcatatttgttcttgttatgattagtgcgggaggtaatcaagctttttacgcaattttttctcactgaaaatccaacctgtgtacgagcaaataatatttaaatcataatcaagctggaccacggctacaaatggatagtaatccttgctgcggtagcgtaaatcaataaagcgcacttcgatatggtcgttatattcgtccagttcccatctataaataggtgaaaatgaaagaaacgcagataaattttcatcttttttcgctacttcaattacggctgattcaggaattggaactttatcaaacgtatcataaataaaaatttcttctccgattgctcttcctacatgaaaatacttttcggtcgtcacagctaagtgccagtgagtgaaacgcagtgtaggagagatattgagcttgattacatcaggaaactgttttcgtagcttcgtggcgatctggtggcgcatataaaagcgcagtccatagtaaaacgccaataacacatacagcgtaatgaatgttggccccggcgctgctccagcaaaccaaatgagaatcgcaaggacgtgggctgagaaaatcacgtaatcaaacgtgttgattaccccgagcgcaatccatttatttgtgaaaggccgtaaagcttgcgtaccataagcgttaaagatatcaacaaaaacgtgaataatgacgcctgcaaaggtccacatccatagatgcagcaagttagctcctggcagcagaaacgaaagaatgagcacgataagcaaaggccataaaataacggccgggatagaatgtgtaattccacggtgattccggatatactgtgcattgtttcgcagctttaaaacagtgtctaaatcaggtgctaatgacccggccattacgccaatcattacagcatccattgtggctgtattcgcagatacagtggggtctaatgttgcaaggccgcccagggcgattcccattgcaatgtgtgtaccagtatccagagcgaactcctcctttgtaagatgacgatcctagattattctaattcagcatgaaagcttgatttaaagcaaaaaatctcgttttattattaacgcagcaaattggctgtttttattcattatttgaacaattcattttactattcatatttgtagttgttataaggttatcataaagttactaagattcaaaaagcaacacattgtatatgtatagttaatacctcggaggctatgacgtgaaacaaagtaaagatattgtacaaaattttgatattcaagcatttcaaaatgacttaatctcttggtttgagcaggaacagcgcattttaccatggcgtcaagaccaggacccttataaagtgtgggtatctgaaattatgcttcaacaaacgagagtagatacggtcattccgtattttaataactttattagcaaatttcccactatcaaagacttagcttatgcgaatgaagatgatgtgttaaaagcgtgggaagggctaggctattattcccgtgcccgtaatttacaaacggccgttcgagaagttcacgaacaacacgggggagaagttccaaatacgccagcagaaatctctaaactaaaaggagtaggtccttatacgacaggagccattttaagtattgcatacggagtgccacagcctgctgtggatggaaatgttatgcgtgtgctatcgcgcattttatccgtttgggatgatattgcaaaaccgaaaacaagaaagctatttgaagatatcgtgcatgaaattatttcaaaagataatccttcttatttcaatcaaggcatgatggagctcggtgctattgtatgtacaccaacttctccttcctgtttgttatgtccggttcgtgaacactgtcgcgcgtttgaagaaggggttcagaacgagcttcccgttaaatcaaagaaaaaagcgccgcgtgctcttcagcttgctgcagcagtgattaaagacggggaaggaaattatctgattcataaacgtccaagcaaaggacttttagctaacctatgggaatttccaaatgtagaagtagatcttagtatagcgccagatcatcagcagcttcaggcatttattcaaaatgagtacggagccgatattaaaattcatgcgccgtttaccacaattcagcacgtgttttctcatatcgtctggaacatcacagtatatgaagcagagcttgtaagtgatatcagtgcattaaaaaatttgaaagtggtttctgaaaaagatttagaacaatatgcatttcctgtttcccaccaaaaaatcttaaaagaatatttacttgttaaataaaagaagcgtggataaactccgcgcttctttttatttaatcatatgatacatgcgtgccgtgtgtgtaatctgcttcgtggcgctgtaacccgccccgtgcttcaatttctttaataatttgctgatgaatactttgcccttcagcatttaaatacggcgtcatttgctgtaaagagtgatggaaaaacgcaagctcgctgtctttccactcgcttttagaaatcattgaaagagccgtcatgtctctacctacatacattctattcacctcgttcatttcatcaagttttatctattttccctatattacttgtttcttatgcgataaaatcagtacaatgtaaagataatacgatacataagggagatgacatcatgtcacaaaaggtagcactagttacgggaagcagcagaggtattggtaaagaaattgccttacgtctggctaaagaaggatacgatattgtattaaactatgcacgaagcaaaagtgcagcgcaggaagtagcagaagaaatcaaagcattaggcagagaagcattagttgttaaagcaaacgtaggaaaagtagagaaaattaaagaaatgtttgagcaaattgatgaagcatttggtcgcttagacgtatttgtaagtaatgcggcgtcaggagttttacgtccgattatggaattggaagaaactcactggaactggacaatggatattaacagcaaaggatatttattctgtgcacaagaagcggctaaacgtatggaaaaagtaggcggaggaaagattgttaccatcagttcgcttgggtctattcgctatttagaaaattatacaacagtaggcgtgtcaaaagccgctgtagaagcattgacccgctatttagcagtggagctggctccaaagaatattgtggtaaatgctatatctggaggagctgttgatacagaagcattaaaacatttcccaaatcgcgatgagcttctagatgatgcacgcaagcatactccagctggtcgtatggtggagccaaaagatatggtagatgcagttatgttcttagtgtccgatcaagcaaatatgatttgcggtcaaacgcttattattgatggagggcgttcacttttaatgtaaggtaaatgtgttttgtgcttgcgccttaaaatattgaaaaaagtttgcataccctatttacctcccgggcatattaattttcgtggaggtgattacaatggcaaaacaaacaaacaaaacagcatctggtacaagcacacaacacgtgaaacaacaaaatgctcaagcatctaaaaacaacttcggtactgaatttggtagcgaaacaaatgtacaagaagtgaaacaacaaaatgctcaagctgcggcaaacaaaagccaaaatgctcaagcatctaaaaacaacttcggtactgaatttgctagcgaaacaagtgctcaagaagtgagacaacaaaacgcacaagctgaagcaaagaaaaaccaaaactctggtaaataccaaggttaatatcaaaagcgaacttaacgtctttcatacggcgatgttaagttcgctttttcttatataaaaagcaacaaagtatgacaaaacttcttgaaactttacacaactcgtcaaaggaatctgtatcacctaaacagaatgttaacagaagtgccgcgtgtatggttaaagcaaatagggaggagctatcgtatgaaaaaatttgatcagctagtgactcaacaattggagaccatggatcaacttctgtttttgcagtctgagattgagcgctgtcaggaaatcgaaggtgaactaataaaacttcatgaagaagcaaaacttcattctgtgcaagatgaaattagtgaaatgaagctaaaattaaaagagattcaattgacgtttgaagcacaaaccgaagacattattcgtacatataaaagtgaaggggcttgctctacacttgcttaatgaacattgatgtgtcacttcctctcttttttaaggctgccaagcaaaggaaaagtagggggagtggcttttttgaactcaagaaggttagcacatttgtgttaaaatgagagagaaaccgttataataaacataagacaaatggagacgttatataaatttttttaagtgctaaaatgaaagtaggtattggagatgggaattccggtggaaggagaaacaattcaaatacacagctacaagcataatggacatattcatcgcgtgtgggatcggacaaccgtattaaaagcaaccaataacttagtgattggaggaaatgatcgtacggtcgttacagaatcagatggacgaacgtgggtcacaagagagcctgcaatttgttattttcatgctcagcagtggtttaacgtcattgggatgatccgtgaagatggaatttattattactgcaatatcagttcgccgttcatttatgatgacaatgaagcgctcaaatatattgattatgatttagatatcaaagtctatccagatatgacatacacccttcttgatgaagatgaatatgagaagcatcgaaaagaaatgaattatccagaagtgattgaccgtattttacataatcacgtcgaggagttaaaaggttggattcgacagcgaaaaggcccgtttgctccagatttcattgacatttggtatgagcgttttttaacatatcggcattcttgatgaatgatctagagaacattatgttaggccgtctaaagctgactgtttgatataatgttctttttggcgttatgctcaccatcttttagaagagataaaagcactaaaaaatcgacgcgtgtacatatactaagaaagcttgccctcatagatagaaaggggagattttatgggaagtataagacgctacatgaagtttgtacagccatacaaatggcaaattgtcggcactgtattaattggtattattaaatttgctattcctttattaattccgctgcttttgaaatatgttttggatgatatcgtaaatggacatggcatgtcttcctctgaaaaagttcataaaatggtgacgattatgggaatttcgtttgttatatttttagtgttaagacctcccattgaatattacaggcagtattatgctcagtgggtatcgagcaaagtactatatgatatacgagatcagctgtttagtcatattcaaaagcttagcttacgttattatgcaaatactcgagcgggtgaagtgatttcacgagtcattaatgatgtagagcaaacaaaaaactttgttatcaccggcttaatgaatgtatggcttgatatgatgacgattgtaatagctattgtgattatgtttacgatgaatgtacctttaacactggtatcgattattttgctgccggtttatgcgttctctgtaaaatatttttacagtcgtcttcgccatttaacaagagtccgttcgcaggctttagcggaagtgcaggggcacttacatgaaagggttcaaggaatctctgttattcgcagctttgctattgagcctcatgagcagaaacaatttgataagcaaaattcaaattttctacaaaaagcaatcaatcatacgaattggaatgcaaaaacatttgcagtagtaaataccattaccgatttggcacctttaatcgtgattacatttgctggatatcaagtcatcacagaaagtcttagcgtaggaacgatggtagcatttgttgcctacattgaccgcttgtataatccgcttcgccgcttggtcaattcatcgactacgctcacgcagtctgttgcatctatggaccgggtgtttgagttcattgatgaagaatacgatattacagacaagaaagatgcaaaagaatgcattgagcttcatgggaaagttcagtttgagcacgtttcatttgcttatgaagaagaagaaaaacccgtgattcatgatattaatttagatgtagaaaaaggaaaatctgttgcgtttgttggaatgagcggaggagggaaatccacgcttatcagcctaattccgcgcttttacgatgtgacagaggggaaaattctcattgatgacattgatatcaaaacctataaagtacgcagcctgcgagataagattggaatcgtcctgcaggatacggtgttgtttagtgacacggttaaaaacaatatactgcttggaaagccaggagcgacagatgaagaagtaattgctgcggcaaaagccgcaaatgcccacgattttattatgaatttgcccgaaggatatgatacaaaagtgggagagcggggaatgaagctatcagggggacagaagcagcgtatttccatttcgcgcgtatttttaaaaaatccagctattcttatttttgatgaagccacttcagctctagatttggaaagtgagcactatattcaagaagcattagctgaactagcaaaagaccgtacgaccttcattgtagcccatcgtttatctacaattactcatgttgatgaaattgtacttttagaaaatggaagagtagtcgaacgaggttctcatgaggagttaattaagaaaaaaggtcattactatcagctctttaacgttcagcagcttgatacaatttaaaaacaccacctattgtttaacaataggtggtgtttttaatcttcttgtcgctgatgattaatatcaaatgagttatcatctttgtgatagttttggaacgtatcaatcagcttatcaagatgctctaactcttcactatactcaatgatgaccgaaattaaagggaagatatgataaataaccttattctcttcatcattatcgtatattttgtactgcataaatttatcgattaaagctcgttttccaacgcaggcttcgtttggtacagtagtggttggctgtacgcgtaatttcccaatgaattttaataatacttgctcatgatacattaacaggcactcaacttcagatttgattaaatcttgaaattgctgcggcatgacttgaagatcattttctactcggtgaagtagtttcaaggttgtaagagctcgtgttgttacggtaatcatttgacgaaataaaacgagcttgcgtgacttaacaaaacgttttttagttgaataagtgcgttcttctttgtaaaaatcaaagatttgattcattttagccacattgtctttcattttttcaatgtcttcttttaacaatgtgtgctcagatgcatgataaagattcatgcgaatccatttaataatttcttccgttgtgcttacaattttataatacaatcttgtttcatactttggcggaataaaaataagattgacaataaatgctgagaataccccaagtaacactgtaccaaagcgtataagtgcatattcaacgaaattatctcctggattttccatgattgcaattactgtcacaagcgcaagcccaattgtattattaatacgtaattttaagttgactgcgatgacaacaacagcggtaaaaccaataatgatgggatgggtaccaaaaataagtccaaaacaaactgcagaagcagctccaatcacattcgcctgtatttgctccaatattgttaaataagatctgtaaatagacggttgaattgcaaaaactgccgcaattgccgcaaatattggagatggtaaacttagaaattcacctaataacaatgaaagtgtaatggcaattcccgtttttaagatgcgggcaccaagtttcatgtgcgttcgtagttcctttctgtaaaaaagttttttcgttatgaagaatgttccccaaaacaaatgataaattgcaaaaatcaatccttctttattacataacctgttggaaataatataaacaataacatactatacaaggtttaagaatggatatcaagagaaaacaagcagaaaaataagggtatttctcgggatttttcgacaggctgacaaaaaggagatgacgcgtaagaaatggttatgaaaggtgggaatgttctataaggaaacccaaaggtaaaacgaaaaagaggtcgagacataacgaaataaatccaatctaaagatgaacaaatgggatacatgggctgaaccgcttgtgacacagcagttgatttccgtgcaagacttcgctttccgcgaccgctgagcctcctcgtcgcatacgctcctgtaagttctcacctgttccgcttttcccgcaggagtcttcgccttgccctccaatcaactgctagaaagacctatacacatgaaacctacgtttaccataacaaaaaaaacgaaccactaatcaaacatcttgatcaatggttcgtttttcacttcgcctaaaatccttttatttcagcctctttagaataagaattagcgttcttcacttaattgtttaaatgctttttctactgcttctaatgtgtcggtaatatcttgttctgtatgagctgtagtaaggaaccatgcttcatatttcgaaggagctaagttgacaccttggtggagcattagtttaaagaagcgtgcgaataattcgccgtctgtattttctgcttgttcatagtttttgaccgtttctgttgtaaagtagacagtaagagcgcctttcaatcgattgatagtgataggcatgttatatgtacgagcatgttttaaaataccttcttcgagcatcgcccctagcttatccaactgttcataaacaccttcttgctttagtacttctaggcaagcaatcccagaaagaatagaagctgggtttcctgccattgtacctgcttgataagcgggtccaagcggcgccactttttccatgatttcttttttaccgccgtaggctccgattggaaggccgccgccgatgatttttccaaaggcagttagatcaggttttacaccaagtaaatcttgagctccaccatacataaaacgaaacgctgtaataacttcatcgtaaataacaagtgctccagcttcgtgagtcaattcgttgacttgttctaaaaagccaggttcaggctcaacaattccgaagtttccaacgattggttctactaaaacagccgcgatctgatcgccccatttttctaatgcttccttgtaaggctcaatatcgttaaaaggaactgtgataacttcactagcgatactttttggtacacctgcagagtcaggagttccgagtgtagaagggccagatccagctgccaccaatacaaggtctgaatggccgtgatagcaacctgcaaatttaataattttatcgcgtccagtataagcgcgtgctacacggatcgttgtcataacggcttctgttccagagttgacgaagcgcactttatctaatgcgggcatcgcttctttgagcattttagcaaatgtgacttcatgagcagttggagtaccgtaaagaacacccgtttcagctgcttttgtaatagctttcgtgatatgaggatgagcgtgtcccgtaataataggaccgtaagctgctaaatagtcaatatatttatttccatcaacgtcccagaaataagctccgcttgccttctccattgcaataggagctccgcctcctactgctttatatgaacgtgaagggctgttaacgccacctacaatatgttcgagcgcttcagcgtgtaattgttctgattttgtaaattgcatagtatgcctcctaatgaaaagttcaacttctttattctatcaaacttatttgtttcttgaaaaacattcgagaacgtgtatgatagaaatttgtgagctaactgctagaaaataggtcctcgtctcttggaggagctgctagcaagagcgccggaaacaataaaagaaaccactaatacgtcgacgtaacggagggaatacaatgaaaaatgctattgaggtgaatcaacttcggaaagaatttaaagcctattctagccgctctggccttaaaggggcattccgggatttatttacccgtaattatagagtcatgaaagctgtgaacgatatatcgtttaccgtaaaacaaggggaaatggtagggtatataggagaaaacggagcggggaaatcgacgacaatcaaaatgctgacaggaatcttaactcctacttcaggcgacattaccgtaaatggaatgaatcctcataaggaaagagaaaagtttgcccaaacgattggtgttgtttttggtcaacgctctcagctatggtgggatattgccgtacaagaatcttttcgcctgttaaaaaaagtatacaaagtgtcagatgaagattataacgctcatatggagcacgttattcaaacgttagatattggaccgctgctagataagccggtgcgaaagctttctctaggtcaaagaatgcgctgtgagctggctgctgctcttattcataatccgccgcttctatttctagatgaaccgacgatcggtttagatgtactagttaaattaaaaatccgccaatttttaaaagaaattaatgaaaaatataatacgacgattttgcttacgacacatgatttagcagatattgaagctttatgtgaacgcgttgtaatgctggatgaaggcagtattatttatgacggatcgctgcaaaagctgcgttcgaattggggagaccttaaacaagttacgtttgaatttggaaccgcgccaaataaagaacagttgaagctattaacgcaagggatgcctgttaactggattgaaggtgatcaaaaatatttgtggacagcgcagcttcaaaataaaggggacttgatgtcgcagctgattgctaaagtggtggcaaagcatgaaatcagtgatattaacattgaagaaatttcaacggaagaaattatccgcaacatttatgaagaaggtgttgtgaatggataaatatatagagatgatacgcattcgctttttaatgatgctggcgtatcggacgaattattacagcggaatattgatttatgcaattaatattggtgcttactactttttatggtccgctatttatggaggaaaagagaatattcaagggttatccattacccaaatgacaacgtatgtagcagtttcatggatggcaagagccttttattttaataacattgaccgtgaaatggcaatggaaattaaagatggcaaagtggcagtagagttaattaagccttatagctaccttggtatgaaaacaatgcaaggactgggagaagggatttttcggttgctgtttttctcagtgcccggcatgattattgtcgcgtttttatttccagtacagttctcagcaaatgcagcaacatggctttattttggattgtctttaatttttagtttcattattaatacacaaattaatttattaacgggtatcacgactttctttctctttaacaatgatggactcattcgagcgaagcgcgttgttattgatttgttttcaggacttcttctgcccatcagcttctatcctttctgggcgcaacatattatgagctatttcccttttcaagccattagttatattccgagcatgattttcacaaatggatttaaagggcaggaagtaataaatgctcttatcacacaagcagtttggtcaggacttctatttatccctattgcatgtttgtggaacatagcgaagaaaaaaatggttattcaaggagggtagtctatgaaaatgttttatttttcgattttctttcagtacattagtcaatatatgaaaacaaggcttcagtaccgcaccgacatggtagttgaaatcatttcagacttattgtttcaaacagttaatttgatttttattttagtcgtatttggacatactcagtcgctgcatggatggtcacgagaggaaattatctttatttatggtttctttttggtcccttttgctattttttcgtctttctttaacatttgggatttcaacgagcggtacattgttaaaggagaaatggaccgaattttaacgaggccgattcacagtttgtttcaagttattttggagcggatggaactagaatcattgtttggtggtatcacagggattgcagtaatggcttacgctgcgtcttctttacatcttcatttccagtggtatgatgtttttatttttctattatttattttaggaggagcgcttgtatacgcaggaattttcatcgccttagcaagcataggcttctggtcggatgccagaacctctattatgcctactatttataatattggaaactacggaaggtatcctgtagatatttataataatgtcatccgatatgttttaacgtggattcttccttttgcatttgtaggcgtatatccagctgcttatttcttaggaaggtcagaatggtatggatatgcatttttaaccccaattatgggaatcgtcttttttgtaatctctattttcttatggaatacaggtgttaaaaaatacagaggagcaggcagctaaatgcctgctctttttcgtggcttccgagtagtaatgaatggacaagaacgcgcgtatagtggtagtagagtataaattaaaggagtagaatgatggttatttttctaatcctcgttatcattgcttttgtaattggtagtatgaagtttctctttgaaaaagaacttggagaatttcattttttctcaattggtcatttctttgtcttgttttattcatatattacagttttattgggatttagccttatttatacagtgtgtgagatggggagtattccagtgttaagcggagggtttgaacatgaaggtcattatttttatacgctgtttaacagcatgtatttcagcgcagcgacgttattttcagtaggatacggagatatgtatccggttggaattgggaaattatttgcaacttttgaagcgtttatcggctatattatgcctgcaatctttgtgatgcgaactgttacccgcacttaaacttgtcatcttatctaatattgggtacgctattcaaagaaaatgaaaagcgtaaaggagaagataaatatgacagctgtagttggagaaaaagcacccgattttgtattgatgtctacaaatggagagcaagtatcattagcgtcgatgaaaggcaaaaacgttgtgctgtatttttatccgaaagatatgacgccaggctgtacgacagaagcctgtgatttccgagatcagcatgaaaattttgaagagctagatgcggtgattctaggagtgagcccggatccaatcgacaaacaccataagtttattgataagcacggccttccattcttacttttagctgacgaagatcacagcgtagctgaagagtatggagtatggacactgaaaaaaaactttggaaaagaatatatgggcattgaacgctccacttttatcattaataaagaaggaatgctcgtaaaagagtatcgcaaggttcgagtgaaagggcatgtggaagaagctttatcatttattaaagaaaaaatggcataaaaacaggcagataactagagcagttttagtcgttgaacatacaatatcagtgtagggcatacctcctcagatgttaatatatttaaaagtgtggattgatttccacacttctttttttgcataaaatatatgaaaaatttctacttattacataaaataggaataggcatcaagttgacaaaacgtgggtaaaacatgtagactaattataagaattataaagtaataatacttacagaagaggggtgcatgacgtgtcaaatcatttacaagaagcccttgaaacgttaaaaggtactggcgttcgtattacaccacaacgtcatgctattttagagtatttaatcaattccatgacacatccaacagcagatgatatttataaagcgctggaaggtaagtttccaaatatgagtgtagcaaccgtttacaataatttaagagtatttcgcgaagtaggtattgtaaaggaactaacgtacggtgatgcatcaagccggtttgattatgttacaacagagcattaccatgtgatctgcgaaagctgcggaaaaattgtggattttcattatcctggcttagacgaagtagaaaagctggctgctcatattactgactttgatattagtcaccaccgaatggaaatttacggaacgtgtcctgattgtacggctaaaaaagcgcattaataagctgatagtagtgatactatcagctttctttttgtttttttctattatacttttcgtcgaattgttttccttcgagagaccggtcaagcgtaagcggctcgttgcaatacatacacatatctacgcgccctagcattttggtttgcttttgacatgtagggcaggttacttgaaccgcttttgtagaaagcatgccaatccagaaataaacgccggtactggctacgatgcacagcaaccccaaaagcataaaaatagtcattagccagactgaagaccgaaagaaaattcccccatacataacaatgaaaccaacaaagatcagactgagtgcaaacgtgcgaatcttgttaattttatttgaatactttatccccatcagtatcccccctgttaccaatatatcatagagtgagacagtgaatgatgataaaaattgaatcttcggaaaattatcgttggtttttgagctttctgaatgatttccataattctgagtgggatatccgttatacatcgtatataataaaaaaagaaatcttagtccatagcctttaaaattttgaaaaatatttgtttattacagttaggagagctcaaaatggaagatgttttacggccaatatatcaagaaagagctagcaataaagacacactaggtattttactgattgaaaaaaagaaatcagaatctccagtgacggataatttggatgctatcttatttattgtgaccaaaactacagaaacttctctttttattaaacaatacgaatatgaaaatgagcgtgcggcactttatatggcttctgaacagcaaatgagtgaatggattatgaatgggacgaaccgccgtattattgattggatcttaaatggtaaagtgctatttgatcgaaacgaatatatggaaaacttaaagaaacgcttaattgattttcctagagaagatcggacaaagagaataggtgtcgagtttgctaagttgattcgccgatttaaagaaggaaaagacttttatgcgtctaatcattatttagatgcattcaatcatgtcattcatgctcttcatcatttagcacgactgtctgtgttggaaaatggatttcacccagaagtgacagtatggaaccaagtgaaaaaaatagaacctgaaattcatcgtctttacgaagagctaattattagccaagaagaggttagcaagcgtttagagctgcttttcttagcgagtgaatttctagtaaataaaaaaactgaattgggtgccaagcatcttgttcatattatgaaaagtgaaaagcaggaatggacgtttaatgaactggttcatcatcccgaaatacgcccttatgctattgatttaggaatacttcttgagtttttaattgaaaaagatatcattatggtaaaaaaagtagaaaccaaaggaaagagtttgtaccatagacactatgtggcgaaatgatagagaggataaagggtatctgatacggtgcggttatgacgtatagataccctgatatatgactttatagcctggataaaaggtttttctaaaaaaacacgatttattttaaaaaatctattgacgctttaaaatatccgtggtaaatttatatacgtcgccgatgagcgatactaaatttatcaaaaacttgaaaaaacttcttaaaaaagttgttgacaagaaagagataaactggtaagattaaaaagtcgcttaagagcgg

SEQ ID NO: 16 - DNA, 110134 bp, Priestia aryabhattai
  source 1..110134: mol_type = genomic DNA
tagctctggcttttatcattgtataaaatggaagggaagaggtgaaaaaatggagcacttttttacttatgacaacagactcggtataaaaattcctgctcttgaaagagaatggacattctattctgaaaaacttcagcaggatatactcctaacatgggaatccattcgggggcagattccagacaaaattcaatctttagaaaagagtattaatcaaaaacaagcggcgttagaagatgagactaattttatccgctcctgtgaattaaatagcgagataggagaacttgcttctattattaatgatttgtggatttggtatcgaacaaatgaggaaatatcaaaaaaagttcacggatagacaaaaaaaacgagtctcatgaaaaattaatgagactcgtttttcttatctagcaaatagcggtattggtaaaagcgctttgcataatctgtcacttgtttggccattcgataattcatccctccgccaaccatcatactcacaattggcaaacgattataaacttttcgcttcgcagcaaatatagctagcgttttcccaatttgcacaacgattttttgcagccacgttttatctacaatttgatcaacaccttcataaaaatacggatcaaattcttggcttaactcactctttaattgatgccacccctcagcctgaaggtgtctaggtaacgttgctgcatggaaaacttttagcgttagcataagctctgaaggagtctgaatatgatagccatagctaattgctgcctgttgcactgcttgaatattcatacataaaacagcaggtatatcaataccgactagcagcgattgtccggttcctgaaagtgctccttgactcagcgcatacaatcgaagcttggccatttgctgttcgcatatataagaaagctgatctacttgaagggaattcatttctgacagatctgtgatatcctctttgaatacacgagcggtttcaataattcgttttgtcgcttgagtttgcatttccgtaccttgaattaatgcagttaactgaaagagtccctcatcaattttatgtaaataggtctcacgaacagaagctggaattaagttaagccctttttctaaccactcttcgtacaataactccatctcagttgcttctacactctgtaagctctcttcccatttatagatttcttctaaaagctgttcttcgcgattcgttagtatcatcatgtcaccctttcaagaaataagtagttttatttttattataacaaataatgcatccgttacattttgcttcctatattatttctttcttctatacgttgtaaaccttctttcaaccgtcagctacttacgctatataaaaaagctgatttccttgttaggaaatcagcttttcgttagtttacctgacaatttatgagaattcatgcattgaagaggcactttatgaacttaaatattcgctaaacgagtaacgtcacgtgcaatcataacttcttcgtctgtaggaataaccataactttaactggagaatgagggtagctaataaatgcttcttctccttgtacactatttaaagctggatcccaataaacgcccatgaactctaaaccgcgaagaacgcgagcacgtacaacatcactgttttctccaatacctgctgtgaagatgattgcatctacaccagacatacgagcagcataagaaccgatatatttatgaatacggctagcaaatacttcaagtgctgtttcagcgcgctcattgccttcagcgcttgctttgattagatcgcgtaggtcactagaaataccagatacacctaaaagaccactttctttatttaatacatttaatacttcgtcagcagtttttcctgttttctccataataaatggaattaatgcagggtcaatgttacctgaacgagttcccattgctacaccagctaatggtgtgaagcccattgatgtatcaattgacttgccgccttcaattgcagcgatacttgcaccgttacctaagtgacaagaaattaagcgcaattgttcgattggacggccaagaagctcagctgcacgctcagaaacatatttatgagatgtgccgtggaaaccgtatttacgaacgccatacttttcataatactcatacggtaagctgtacaagaatgatttttctggcattgtttgatggaatgctgtatcgaagactgctacagctggaacatttggaagaatatcttggaacgctttaattcccacaatgtttgctgggttgtgaagcggtgctaaatcagataaagcttcaatttctgctagtgtttcatctgtgattaaaacagaatcagcaaatttctctccgccgtgtactacacggtgacctacaccagtgatttcatcgtatgattgaatgatgttttgagaaagtaacttttcaactaaaattttaactgcaacagcatggtcagggatttctgtaatatccgtttgtttttcaccatttaccgagatcgtgaaaacagcgttatctaaaccaattcgttctactaaaccttttgttaataccgtctcacttggcatttcaaataattgaaacttaagtgaagaactgccggcgttgattgccatgatttttgacatgaaaaaacagctccttctttattatacgtgcatcataaacataacgaacagaacataaaagtgtaatctctacaatattctatgcatttcgacacgatttctatccttattcatttaatcattcacgacaatagatttcaagagctatacatcaagaaaacgctaccggaaaatattcattattttcgaaaaagacttactttttattaacgctgaaccattggtccatttgagccataatatcactcattgcttctcgattactgaacttcggcaaattcacaagcagcgcttgatcaggcgctgttaccccttctccctgcttttgaagaatgataatactcttagcagcctgctcttgtttgaacattgaaagcggcagctgaacgattccttgaacgattgcttcctcttttagcagcggctgtaataaatgagactgttcagactcgaacaagttatttggaataagggccactacgtatcctccctcttttacatgacgcaagctttgttcaataaataagtgatgagcataggtgtgaccttcttcagctcttactttataatcttttgccccttcgtcgtttggataataaccaaccggcaggtcacagacaactaaatcaacaggatcaataaaaagcggctgtaagctgtcttgattgaataattgaacgccgtgcttctgtaaatttgcatttacatatgtcaattgaagtaataaatcatccacgtctacaccgtatacgtgttcaattgacgcagcgtgtgtatttaaaattgttgttaataaattccctgctcctactgctggatctaaaagcgtatatttatcttttcctgccatgaactttccaactaagtagctgacaaatagtcctacagcatcaggcgtcatttgatggttaggctgaactgcttctttcatgccttttaaaatcgctagctgatacgcttttcgaatcgtttctttttcaaaatgatcaagcgtgattgaatcgtactctttttttaaacgttttttagttacctcatctagctcttcttgtaaaatagttccttgaaacaaattttctcccgtttcagctactgcttctaaatatacgcagtttagttcttttcttaaaataatagctgtttgatcaattacaccaaatagcttttccatactagctaactgactcatattctgcctcccgtgtaatgaaataatatctatataaatgagtaaacgtcctatttggaacatcatattttatcataaaaacttcttaaaacacaaagaaggcgaaaaacattgttttccgccttctgccgaacgccactgacaatcttacttagctgttttagctgcttcgattgctgcttcgtagttcggatgctcagttacttctggtaagtactcaacatacgttacgttgtcatttgagtctactacaaagattgaacgagctaataagcgtaattcttgaatagctacaccatatgcttctccgaaagataagtcgcggtggtcagataaagtttgaacattatcaatgccattagcaccacaccagcgcttttgagcaaacggtaaatctacgcttactgttaatacttttacgttatctaatttagctgcttcttcgttgaagcggcgagtttgcgcatcacaaactccagtatcaatagaaggaactacactgattaggcgaacagaaccctttgtgctgtcaagcgttacttctgataaatcatttgctaaaacagtaaagtttggagccttctctccaaccttcacttgatttcctaataatgttacatcgttacctttaaatttagtcacgaataattcctcctttaaataagtatgtacactgttcatattagcttgtctgtctctatattgcaattaaatgacatacaaaacatggcaccccaagctagaaaacaaaccaaacaaaataagctttgcttgcttcttttactatttaaagaagcaagcaaagctttattttatacctacaaattaaaatcatttgcactatcatgatgctgattttgttgattatgatgatcctgctgatgattgtttcgtttaaacatttgctgcacgcgttcaattgcttgaggtgctgtatctaaaatcttttcatataaatgtgtactttcgttaaggtgaagcattttaattccgcttccactcacaattaaaaaggcaattggcgtaattgatacaccgccaccgctacctccaccaaatggatgacctgattcttgctgatgctgtcccggagaagatggtgcatgcccttctactccaaactcgcttccgcccgctgcaaaaccaaaacctacttttgagacagttaaaataacactgccatcaggtgtttctacaggatcaccaatgattgtattaacatcaatcatttcctttaaattttccatagctgtcgacattaaacttttaattggatgttctgccattaagataacctccttatgttttcacagagtgtgtcttgttcttatttgacgacttccatcttttgcgacgctttttggacgtatgccgccagtatctcaaggtccgtaaacctactagaatagcttgaccaactcgaaaagaaattatgcactcaaataccgtttctgaccaaagatgttgaaatacaggagtgacgctcatgacaggcatatcttttagtttcatataccggctgattataccaattatgcccccctttgcagaccatacagccccggtgagtacgcctgttaacgcagcatcacctaagccgaaacggctgtgccatctaatatcacttaccgtcactttctgtaagaaacgacgaaaaattttatgaaaaccgactacctgttcaaggaattgcttcgcattttctaacatgcttagcccgtcttctacagaataatcactccatgaattctcgtcttcttttccttgatcacccattcctttcttcttttcaacaagcaaacgaggagaatcttttttcactttcactaccggaatttcatatgtatagcgaataagaccaaaccaagccctgagtctcactctgtaataatcgttatctcggacatggtgaagatctacaaatagcgtgatttttgtccatacaataagtacaataacaattaaaagtgctagcaatatccataaaagccatagcacatccttcactccttcttagcttcacattatctccaaaacacagaatattaaaccttatggaaacaataaaaagaggttgagatataacgaaatgaatccaatctaaagacgaacatattggatacatgagctgaaccggttgtgacatcgcagttgatctccaatcagctgctagaaggatctaaacaaatgaaacctacgtttaccattacaaaaaaaagaaccactaatcaaaagtcttgatcagtggttcttttttcacttcgtctaaaacccttttgtcccagcctctttttattatctgctaattgtaccttcatgtatgacagttgtatctgcgtagtaatcatgggccccttgcttcttaggtaaaaacgcaactaataaatagccaagtaaaaaaactgttttagaaatataacgtccaactacttcacgaaacagcacaacaggccaagttaaagtggagtctttcagcgatactactttaagcccaaacaccatctttccaagcgtttgtccaaaatacttggtcataaaaacaaaataaccataaaagataataaccgttacaatcgtatagggagaaaaaaatccatctcctcgagaaatacctgctaaatggaaaatgggcttgatcagcagggagttcaagctagctaccacagctagatctaaaagatatgcccaaaagcgcatccaaaagcctgcataatggaattcactccctattggagtacttgctgctggctcatgttttatattatcgtttgattcggttgaatgagactgattttccatgttcccacctctattctgcatataaatacatcaggcgcggagagcttggctgcgcaaatgtttttaacattgcagtgacttgttcatctccacctattactttttgcatgctcattgaaagccaagaaggcagtccgaatccttgattgtattgaattacttgtgcaccttttaacttataatctttctccattcctgttaccgcatcttcaaaatagcctagttgatcgaccagcttcagctctttagcctgacgtccatcgtacactcgtccatctgcgatagaacgcactttttctttagacaagtgacgtccctcagagataacattgacgaaaccatcgtacgagttgtctacaagtgtttgcataatttctttttcttctccggtcatttctcttgttggagacataatatctttatgagccccgcttttgataacaacagattctactcctagtttatcagccagcttgccgtagttaacgctttgcataattacacctagtgaacctgttaaagtgtccgggattgcatagattttattagcagctgttgaaatgtaatagcctcctgaagcagccattgatcccattgaaatatacactggctttttcgtttctttcttcagctcttcaatttttttatgtatttcagcactttcaacgacgccgccgcccggtgaattcaccttaataatgactcctttaactgccttatcattttttgcagcctctagctgctttaaaaatgattggtggttataaccattttgggacataagcggagaggaaccgctccctgtatcttgaatcgttccattgacctctagcactgcaattttcttagctgcattccctttttcgataactgtttctgatagttcactgtcgtctcctccaaatatgcctgccaaaccgtcatctttttcttctttgactgaaaaaccaatattaacaatcgcagaaaaaatgaataagcaggccgcaattaaaagagcaatccacctttttttgttcataaaaatcctcctttttaggtgtcggaattaaaagattattcttttaattcttaaagcaataatgctataattattgtaacaaactttttttaaaaagtttactttatcgctaatattttacatatcagacaaacaagggggaactatctatgccaaatcgtcgcaacgtttatttctttcatccaaaaaaccaggaaacaaaggcgctcgtaagtccacttattgaacttgcaaaacaatatgactttcaagtagtagaccatttcgacagcgctaacatcattgtaagtattggcggtgacggagctttcttgcaggctgtccgtcaatctggctttcgagatgactgcttatatgctggtgtcacaacttcagatcaactaagcttttactgcgattttcatatcgatgaaacagataaaatgattgaagctattacgacagaaaatatagaagtacgtcgatttcccgttttacaaactcaaattgatcaaggaacttctttttattgcttaaatgaatgttcgattcgatcaggtgttataaaaacactcagtctagatgtttttattaatgaaaatcactttgaaacattccgtggggatgggatgattatttcaacaccaacaggcagtacggcttataataaatcggtaagtggagccgtagttgatccgttgattccttgtatgcaagtaagcgaattggcatcgttaaataataataactatcgtacattaggatcttcattcatcctaagcgctgagcatacgctcactttaaaactatccaatgacaacaaccacagtccaattattggaatagataacgaagcattaaatgcacgccaagttgatcaagttcaaattcgtttaagcgaccgtcaaattaaaacggttaagttgaaagataactctttctggcaacgagttaagcgtacatttctataataaaaagcgcccaatggcgctttttatttttgatatacaatttctccattaatagcagtcatctgcacctgtaccgatggaatatcatctgcaggtatctcaaacagatctctttctaatacggtaaaatcagctacatagcccttttgaacatatccttttttatgctcttgatgaatggcctgcgcgcttcctaaagtaaacagctgaacagcttcaaatacagtgagtcgctcagaaggtatgtaaatgaccgagctatttggagaagtttttctagaaactgctgcatgaatcgttaacatgggattgataggttcaataggcgcatccgatccgcctgcacacataacgccctcgtccaataacgttttccaagcatagcaatagtccaaatgctcttctccaattttttcaataacccatggaaaatcgctggctaaaaaccgaggctgaatatctagcacaaccgggagcttttttacacgattcactaaatcttttcgtagaatttgcgcatgaataatacgatctctttgccctgcttgaggaggatattgttcaatgctttctactacatattgaaacgctaaatcaccaatcgcgtgaattgcaacggtcatattcaattctctcgcttttctcactagctgttttaattcatctagtgattgaatagctacgcctcttgtagaaggatcgcttttgtatggaaagcttaaaagagcagattgactgccgagcgaaccatcagcaaaaatcttcattggccctatttcaataaaagcggatgtgtctttcttttctttaacgtatgtatacatatcatctacagcttcatgatgaacaagtaaatgagcacgaaacagctgcttttctttatgaataacgtcttgaaatgcttgatatgtacgcaaaaagcctccataataatttaaatcttccgtatgtccacccgttaatccgtgctgcacacaatctttgatggctactgagagcgcttgtcgaatgtatgcttctgatacttgaggaacatgagccgttactaattcttgcgcttgatcagccaaaaaaccggtaggattccccgcttcatccctctggataatacctccttccgggtcacgtgcttcagctgtaatcccggctattttaagagcagtcccgtttactactaatccgtgacgacagactcgcttcaacataataggatgttcagttgaaagctgatcaagatcttgatactgaatcaaagaggaatcttcccactgattttcatcccacccttctccaattacccattctccttttggtgtactctctactttttgccgaacgcgcatcagcacgtcttccctagaagtagcttgagacaaatcaagccgaaggagcttttcaccgtgaccaattaagtgaagatggctatctacaaagcccggatacattggatatcctttgaggtgtacttctttgtcaatctcagcaccccatttgattcttagatcttcttctgcgcctatatcttcaatgaatcctttttcaacatatacgctttctacatgctcatcttcttttagcatcgtatatattttgccgccgtaaaataaagtccccatcgccaacatctcctttactttataaagcttgatcttgtctctattatacgtgacaaaacaaacaagacaaaagagtgaggtttcccccactctttttagccatcattatttaattaatatgacttatttaccaccaagttgttgctcagccatttgaactaagcgtttagtgatttctccaccaacagatccgttagcgcgagctgttgcttctggtccaagatttacaccgaattcagaagcgatttcgtatttcatttggtcgatagcagctgctgaaccaggagctactaatttgtttgtgtttgccatgtgttttcacctccttgttgaatatagattgtgtcaaaacacatggcatcatacattatttttttggtaattttatgaaatttaacttttaaaacaaatcttctacgctgtctgcggtatttgtagccgaagaagctgtcatctcaagcgtttctacattatttaccgcttcttgaattaatgtttcaaaatcataaaattgttcgtatcgatttattttttcacgttttggcttcgtttttggtgagcttggcgtaaaaattgtacagcagtcttcatacggtcgattcgaaatttcatgtgtatcaattttgcgggcaatttcaacaatctccgttttatccattgttacaagcggacgcaaaattggcgtattagtcacttcattaatcgcatacatgctctcaaccgtttgactagctacttgccctaagctgtcgccagtcacgatagctaacgattcatttttttcacgaataaggtccgtaattcgaagcatcatacggcgtgtagaggtcatggtataattctctggaatttgcttttgaatcgcttgctgtacagctgtaaacggtacaatgtgaagctttactttttcgtgataagccgttaatttttgcgttaaatcgatgactttttgcttagaacgttcacttgtaaaaggcggactgtaaaaatgaaccgcttctatttctaaaccgcgcttcatggctaagtatcctgcaaccgggctgtcaattcctccagaaagcatcagcatcgcttttccactcgtaccaactggaagacctcctgctccgcgataatcaaaacatgtaatatacgttgcttcacttctcacttctactcgtacatttacgcttggttcttttacgtttacctgtagatgctctgtatttcgtagaatatgacttcctactgcataatttaattcgtttgtatcaagaggaaattgtttataagctctccgagtagatactttgaatgtttttccttctatatcaaattctttcattgcttctaacgctgcttcttgaatcgcttcaagctcattttcaacttttaatgctaaactaaagctttgaataccaaagatttgctgaagacgttggatgataggctcgtgattttcaccgtttaagtgaatatacatgcggtctcttgtgtattttacttgaatattttggaatgcactaagagccgttacaatattttttcttagctgggcaacaaatttttttctattttgtcctttggttgagatttctccgtaccgaattaaaatatggttatatatcataatcatttacctcattactttctttagatcttcaattactgtgaaaatagcatttacaatgggcgttacttcattataatcatttaagcctgacaagctcaatcgaatggactgatcggcttcttcgtaatttttaccgatagctaaaagcgttttgcttggcttttttcgctttgatgagcaagcagatgtagtggatacaaacactcctttttcttcaagagcgtgaacaaaaacctcacctttaataccttgtgctgtaaaatttataatatgaggtgccgaatgctcactcggcgtattaatcgtgattctttcgtgagcagaaagtttgtccatcagttctgcttttattttccgcattttttgctgattttgagcagcatgttcaagtgttaaacgaagtgctttagcaaatgctacaattcccggcacattttccgtgcctgatcgatgctgcatttcctgagagcctccgctaagcaacggatgaagctgaactccatttcgtttatataaaattcccgtcccttttaagccgtgaattttgtgtcctgataatgtgcataaatcaattttatgatccgctaaagaaagcggaacttttccaatcccctgcacatgatcgacatgaaaaagcaccttcgaatagttcgtcagcatctgtccaatttctttaattggctgaacggtgccaatctcgttatttacatgcataacagatactaaaatggtttcatctgtaattactgattcaatagccgcgggcgacacaaatccgcttgaatctaccggcacatacgtcacgttaaatcctagtgcttctaactgcttaaatggttcatgaacggaatcatgttcaatgtttgtcgtaataatatgctgacctcggcttttatattgcatcgctacgcctttaatagccaaattattcccttccgttcctcctgatgtaaagataatttcatttgacgatacgtgcagcaattctgccacttgctcacgtgaacggctcaacaaattctccgcttgtacgccaaattgatggagggacgatggattgccataataagttgtagctactttggtaaaagattgtattacttcattatagggttttgttgtagcgctattatctaaataaatcaaggatgcgcgcccccttcttcattttttaggaacaacgtattatcataccacaccttggtacttttttaaatcgggctttgccttagtaatcataacaaggatagacaatcttttcaaagctattcgccactttataaccaaggcctccgctgtatcatcctaaagttactgccgcattcatagactatactattagcattaaaagaggtacgagatagtatacaaagaaaagcgtcataaaaaagctcgtgtccaaaggacacgagctttttaactctgtgaagatacaatacgctgtatacgatccagcgcaccaggatctacttgctcaatagctgcagatgcctgttttaatgcttctttgtattcgtaatgacgaaatgcttcttctgcttcttctaaagactgtgcaatcgagtgatgagtacttctataacggttaccgtattgaatcactctttcaacgagtcgcgcttcttctaacattgcctctgtttcatcaaatgtatcctgaacaaaaccaacagcatcttcaagtaaagattgaacagcttgaatattaagcggtttttctttcagcttagcggttacttcatttaagatatgaaccgttttttcaagctgcactttatattcttcaggaacaccaggaaggttgcttttttgaataaggcgtcgtgcttcaatcaactgagatttcagttcttctattttgtccttagctgagagctcatctttgcgaagagcttgtagcatatcgctataggattcctgagattcttttaattggttaagctgtttggaaacgtcttcgagttcttcttggatcacactgtaggctaaattatgctccgccaccttgtccgaaatattatagtacaagttagtcaatcgttttagttcgcggtccattttataatatacgtctaaatcgcgctctttaaaatgatagctttgctgtacaaatagcgtttcttcacgaagttcacggtttcgttcttgaagcatacgaaggaagttagataccgtgtgagattcacggttcattttatgataggagaaaacctcatgctcaagtgagtcatataactgctctaagcgttcgttcacatcatctagttttgtaatcgcttcttccacatataattcttcaatatctgcaataatttcagcagtttcttgttttaaaagctctaccgtttcttctacttgcagatgatctaacacatatccctgctcactcatttcgcggaatccgtcaagcagttcattgaactgaacaggaagagtggtctgacactcaactaacacttttggaatttgttctaaatacgaatcaatagctgttaaatcagtttttaattgaagaacaatctcacgtgcttgaagatagtttccgttaatcgtctcttcctcgtattttttaaactgctctttagatgtattaattgcgtattctaacgttttttcagcatttccataggaataccgatgtgcgagcaattttttcttcacatggcgatgaagctgatttaactcctcaatatcatatcgattatcttgttcgctaccaattaaattttgaagttcagtaagtatgttttcaatatctatcttggtttgttctaaggcttgatcaatatgtatagataactgcttcgcttttttaaatcggtatttatctgctgcttcttccgtttcaaacagttctttatcaattttcgggagattagttgatataatttcatcccactgctcacgccaacgttcaaatagctcttcagtttgacctgtcatgttcaattctttcacttttgaaatttcctctgcaactggcgtatttgctaattcgactttgatcgtttccaggcgatcaatttcttgataaatctttttacgtgaaaacattccgtacacaactaatccgattataagtatgattagtgctataatgaattccatactaagcccccttacagtgcgttctacatgacaagtttcttatttataaaaagggtgaatttaatcctttaaatttttttgcgtcaatgtttttatgataccatgtaaagtccaacttttgagcaaaaaattaaatttttttatacaaaatattggcatggagtcactttgtgtcgttacaatggaaaaagaagaaaaaaggaggcattttttatgaaagttgacaaacatattcatactccattttgcccacacggttcacctgattcattgcaacaatatgttgaacaggcaattttcctgaactttggtgagatttcgtttacagagcatgctccattaccaaaaagcttcagtgatccgacacctgatcgcgacagcggaatggatcctgacaaacttgatcgctacattcaaaacgtacagcaagttaaaaaagaatttgagcgcgatattcgtattaatatcggattggaagttgactttattgaaggatttgaacacgaaacaacagatttcttaaacgagtatggtccttatctcgatgacagcatcctttctgtccacttcttaaaacatgaagaaggatatgactgcctagattttagcgctgacgtatttgcacatattgtacagaagtttggcagcgtaagcaaagtatatgataagtattacaacacggtattacgctctgtacaggccaatttaggcgtttataagcctaagcgcattggtcatatgacactcgtacataaatttcaaactcgctttccatatgaagacacactttcccctattattttatcaatactcgatgaaataaaaatgaaagatctggctttggactataatggtgcagggttgtttaagcctttgtgcaaggaagcgtatccagctccctttgtcgtaaaagcagcccaacagaaaaaaatccctctcgtatatgggtcagacgcccactgtgcgaaggatttaggccaaggctatggagagctgcatttaggataattgaacgcgcagtttgtttgtccgttcatatggcaaacataccgttgtgtgcacccatcgctcaagctcaatcgcatattgctgaacaaaatacggttcgtgaggcaatatatgaagaacttcacttaggtactgaggatgaagataaggcatagacagcatgcccttaagctcaatgattgtaaaggaaacgtgcagcttgcgaaattccttttctttcatccctctttcaaggattgtttttaagtagtatttttccttggttaaatacgtagtcataacttctcgaattaaaatcgtgtcaagagagatttctctatatacgagccgggcaatatgcctattttcatgctggtaatgtaagatagctcgaatcatcacgatcatactttctgttgaagacagctttttcatttcttggaatgcttgctccagtaccccaatataaccttcaaaataagaaatcactaaactttcaagcaacccttctttgctatgaaaataatatgaaatattcgctacgttcactttcgcttttcctgcaatctcgcgcaccgacgtaccatcaaaaccttttacgttaaaaagagaaacagccgcatcaataattttctctttcgtttttgactgtacagccatctatctacacctcatttcgatttatttttacaaaacacatatgattgcaaaattgtgtagaaatcgttacagtatttaaaaaggattttagtagcctctctacataattcgtgataggctttttagttcctgtaatcttttatcgacaaagtagcgttaaaactgacgtttcctgataaaaactcattaaatcttatgttgaatggaggagaatacattgtttaatgtcgaaaactacagcggctcaaaacaaaaggattatgaattagtaattaagcaattacgcgccttattagaaggagaaagcaatacaattgctaatctagcaaatgcttcagctttactaaatcaatttttaaatgaagtaaactgggtaggcttttatttaatggaagacggtgagttagtactcggccctttccaggggctgccggcttgtgttcgcattccacttggaaaaggcgtatgcggtacagcagctcaaaatcaaagaacagagcgaatcgaagatgttcatgcattccctggccacattgcatgtgatgctgcttctcaatctgaaatcgtcgtaccagtggtaaaagacggtaaacttttaggtgttcttgatattgacagtccaatcaaaaatcgctttgatgaaatcgatcaacagtatcttgaagaattcgtcaaagaactcacttcttttctttgaatatgaataagcaaaaaaaccgctgcaaatcagcggtttttgcttattaaacaaacgtttgattagcccatcaccaccgttttcttatgttctttcttctcctttcatacttcaaatgaatatatcctttcttttacattcttttaatcttcaatcttccttgactttatacgagtaaacacctataatactcgttgtgtgaaatattgcagcttatacaatcttctttatgttttttcattttgttcctcattaaaagattgttttacagaagtagcaattcttttaacaagatggtgtatcgtgtaactctctgctgctagagcgatggtacatgaaaacaaaatgagcatatcgctagaatgtgtctgtttttgttttgcataaaataaaaacacaaacaaggaggagtcatcatggctcgttatacaggtccaagttggaaaatctctcgtcgcttaggtctttctctaagtggtacaggtaaagaattagaaaaacgcccttacgctccaggtccacacggcccaggtcaacgtaagaaaatttctgagtatggtttacagttacaagaaaagcaaaaattacgccacatgtatggtgtaactgagcgtcaattccgtaacttattcgttgctgctggtaaattaactggtaagcacggtgagaacttcatgattcttttagaagctcgtcttgataacttagtataccgtatgggtcttgcacgcactcgtcgtcaagctcgtcaattagttaaccacggtcacattttagttgacggtaaacgcgttgacatcccatcttaccgtgtacaacctggtcaagtgatcggtgttcgcgaaaaatctcgcaacctttcaatcgtgaaagaagcgcttgaagttaacaacttcgtaccagactacttaacagtagacgctgagaaattagaaggtacattcactcgcttaccagagcgttctgaattatctgctgaaatcaacgaagcactaatcgtagagttctattctcgttaatagtaaaaagccgttccttatggagcggtttttttactgtctatctatatataaaaaaaaggcctttcggccttttttttatgcgtattgaataagcgtatattttttcttgcctcgacgaatcactgtgaattgaccttcaatacggtcttccgcacctactgttttttgtaaatcttgttcacgctcaccgtttaagtagatcgcaccatttgaaatatcttcacgtgcttgacgtttagaaggagaaattttactttctacaagtagatcaattaaaccaatatcttcacctatatgcgtgtaagaaggaacatccttgaatccttgcttaatttcttctgctgttaactctgaaatacttccgctaaataaagcttgcgaaatacgaattgcttgctcaagagcttcttcaccgtgtacaagcgtagtcatcgctgccgctagtgctttttgtgcttcacgtttttcaggagcttcttttgcagaagctgctaattcattaatttcctcgtgtgataagaatgtaaagtattttaaatattttataacatcacgatcatctgtattaatccagaattggtagaattcatacggacttgttttttcagggtctaaccaaattgctccgccttctgttttaccgaacttcgtcccgtccgcttttgttacaagcggaactgttaatccaaatgcttttgcatcttcttctgatttacgaattaattctaagccagccgtaatatttccccattggtcgctgccgccaatttgaagcttacagttatatgtttggtataaattcaagaaatcgtatgactgtaaaatcatatagctaaattccgtaaatgaaatgcctgattcgatacgagattgaacagaatcctttgccatcatatagttaataccaaagtttttaccgatatctcgtaggaatgtaataacatctaatgagccaatccagtcatagttatttgcaataaccgctgcattttcaccttcttcgaaatctaagaagcgtgaaagctgacctttaatacgctcactaaacatggcaaccgtttctttttcatttaacgtacgctctgcttttttaccgcttggatcaccaataagacccgtacctccaccaactaatgcaattggttggtgtccagcttgttgaaagcgacgtaaaattaaaacaggaagcatgtggccgatgtgaaggctgtcggctgtcggatcgaatccgcagtataaacgaacagactctttactcaaaagttcacttaaacctttttcatccgtttgttggttaatgagccctcgaaactcaagatcttgtaaaatatccatgttatatattctctcctttatctaattgctcgttacaatttgttgaacaacataaaaaacgccccttcttaaaaaagaagggacgaaaatatcgcggtaccaccctatttggaaataaattatttcccacttaaatgatgtaacggtctacccgtcttttgctactgtaagttcacaaaagatgctcaaggacgtatttcatatttgtctatgtactgattttcagcaaccatcagctctcttaaacagggagacaagtattacttcttcctatcactgcagtttattttatttaaaagtttacaccccacaattatgaatgatttcattttaaaattcaagtccaaaaaaaagttcaaacagctggctgtttgaactttataaaaatcatttattttccctacaaagattgaaacgtttactccttagtcttccatcgttgacaaatcgcccgtaggcaaatctaattcccacgcttttaaaacgcgacgcataattttaccacttcgtgttttaggtagcttatctttaaactcgatttcacgcggggctgcatgagcagctaacccttttttcacaaattgacgaatatcttcaatcagttcatctgaagattcatacccatctctaagtgcgataaatgctttaataatttccccgcgtacagggtcaggcttaccaatgacccccgcttctgctacagcaggatgttcaacaagcttactttctacttcaaatggacccacgcgttctcctgccgtcataataacatcatcgattcggccttggaaccaaaaataaccgtcttcatccatatacgccgaatcacctgatacgtaccaatcacctggcataaaatatgactcatatttttctttgttgttccaaatcgcatgcatcatagatggccagccttttttaattgctaagttacccattcgataaggtggaagctcttgtccttgatcgtcaacgattgctgcttgtacacctggaattggtttccccatagatcctggcttaattttcatagacggataattacaaatcgtctgaccgccagtttcagtcatccaccacgtatcatgaatacgtttttggaacaccttcattccccagcgtaccacttcaggatttaacggttctcccacacttaatacatgtctgagattgcttaaatcatagcgtttaactaagtcatcaccagcacccattagcatacgaaaagctgtaggtgcactgtaccaaaccgttacgccaaaatcttcaagtgcttgataccatgcatctggactaaatcgtcctcctacaatcacattggttgctccagcaagccaaggaccaaaaatcccataggaagtccccgttacccaaccgggatctgctgtacaccaatacacatcgtcatcttttaagtcgagtacccactttgcagtttgatagtgctgaagcattgcgttgtgaacatgaagtacgccttttggtttgccagttgaacctgatgtataatgaagcagcatgccatctgttctatctacccactcaatttccacctctttattcgccgcttctaatcgcttcagaaaatctagttgaatgccttcttcttctacattttcccctacaaggagaatgtgttttaaagctggcaaatctttcaccggaacgcggctcagcaattcaggcgttgtaattaacacttttgcatcactgtcttgcaaacgatcttttactgcaccttccatgaacgcttcaaataaaggcccaacaatagcgccaagcttcaccgcgcctaccaatgcaaaataaagttccggagagcgaggcataaagataaacacgcgatctcccttctctacgtctgcttgttttagcacgtttgcggctttgtttgaccattctttcatttctttgaatgtatatttttcattgcgctgcgcatctcgataataaagcgcaactttatttttacgtgtagagtttgcgtgcttatcaatcgcttcataagctgcatttaatttacctgtttcatgccatgaaaattccttctccacttgtgaccagtcaaaggtttgatacgttttatcatagtcctgtaagttgtataccccttcaattacaggaagcgcttccaccttcatcacaaactcccccttatgtataaaatttacaaacctattatataacaaaaatatacttttcacaattttataaaaattatttgtcggaattaggataatagtctcccttgttatatgacaacctttgttatagaagtgccgaattaacaagaatctcttttaattttctattctatgttttttaaaaaactccttttctttcatttaattttttgaaaacgctttaatatagagttttttttgtattataatacagataagactgcttgaaggtggtgattcatgtgaaacattcccaaacatacaatatgaaagaactaaaaacagctgttggggcaattgttattgaaggacctgtctcctcccagaccttgcaacaacttgattttcatgagcaactaacggcctttcgtccacctgaacagcaaaaagaagcattgatcgagattgccaacttgcctgaaggtagaatcattattgctcgccatcattatacaatcattggttacgtaacttttttatatcccgatcctctagaacgatggtcggaaggaaatatggagaatttaatcgaattaggagctatagaggtagccgctccatttcgcagctacgctgttggtaaaaacttgcttatcgtatctatgatggatgatgcaatggaagattatattgtcattacgacagaatactactggcattgggatttaaaaggaacagggctaaatgtgtgggattaccgcaaaattatggagaaaatgatgaataaaggcggactgacgtggtttgccacagatgatccggagattagctcccaccctgctaattgtttgatggtaagaatcgggagcagagtacctcaagaaagcatacaagaatttgatggcctgcgctttcgaaatcgctttatgtattaagctgacctttaagaaaaggagctgtgtctgatgattgttgaagagatgatgaaaactgatctcgttaccttaacccccgaccatacgattgctgaagctatgaaacttttagatacacataagattagacatattcctatcgttaatgaccttcatcacgtagttggcatcatttctgatcgagacgtaagagatgcaagtccatctattttagataatacttatacatctgctcttctatccgaacccgtgcggatgattatgcaaacagaagtcattacagctcaccctcttgattttgttgaagaaattgcaagtattttttatgaacatcaaatcggttgtattcccgtcacaaaaaacaagcggttagtaggcgttgttaccgaaagagatctattacatacgtttattcagcttaccggcaccaataagccaggttcacaaattgaaataaaagtagaaaataaggctggcgtgctcgctgaagttacatccctctttggttcaacgagaacaaacatcttaagcgtacttgtctaccctgatgtagatgaacgatataaaatccttgtgcttcgcattcaagctattaatccattgattagtataaatacattaaaagaaaacggctatgaggtgttgtggcctaaattaccggagatgacgtaatgactagtaatgctgtatttatttattcagatgatattctttcgtacaaattcagcaataatcatccgtttaaccagcttcgtgttcaactaacatatgaactgttacgggaatttggcgctttaggcaatcaagatattgtattaccgcggatggcatctgatgaagaacttcagcttgtccatgatactagctatattcaagcggtaaaattagcaggaagcggcgagctttctgttgaaaaagcagcagattttggtcttggaacagaagatacacctatgtttcccaacatgcatgaagccagtgcatttttagttgggggtacacttactgctgtagattatgtgatgactggaaaagctaagcatgctctaaatttaggaggaggattgcaccacggctttcgaggaaaagcttccggcttctgtatttataacgatagtgcggtagccatcaaatatatgcagcaaaagtacaacgcacgcgttctctatgtcgatacagatgctcaccacggtgacggcgtgcaatggacattttatgacgacccttccgtttgcactctttccattcatgaaacgggacgctacttgtttccaggcacgggaaacgttaacgaacgcgggcacagtgaaggctatggttattcatttaatgtgcctgttgatgcttatacggaagatgagtcttggctcgacgtttataagacctctttaaaagaagtagctgctttttttaaaccagatgttatcttgacacaaaatggagccgattctcattattacgatccgcttactcatttatgcggtaccacgaaaatataccgtgagattcctaaaattgctcatgaaattgcccatgaatattgtcagggaagatggattgcggttggcggaggaggttatgatatttggcgagttgttcctcgggcttggtcattcatttggcttgaaatgattgaacgaaaggcagaaggcatgcttcctctgtcatggcttgaaaaatggacaaaagtatcgcctcaccccgtttgcacgcagtgggatgatgaacctaatatctatcagccaattccaagaaaaccagaaataacagaaaaaaacgctcaaactcttgagcgcgctctttatcctattcgttctcatacatctcattcttaaaaaaggctatacaagcgtatggcctttttcactgtgcttcgggatctgaaataataatttcgacgcgtctatttttttgtagattgccattagacgtgttcggaacaagcggctttgtatctccgtatccaagtgcttcaaagcggttagcagaaagagaaaaatggttcgttaaataacgtatgacgccgctagcacgcgctgccgatagttcccaattagatggataacgataggtgtgaatgggtcgattgtcggtatgaccttctactttaatatcatttggaatagtactgaataaccttcctaattcatccagaaaaggggtaccttttttcaaaatgtccgcttgtcctgtttcaaacagcacctgttcttgtaaaataagcacaactccgcgttcatctcgcttagcagtaatgacattctgaagcttattttccttcaagtaatcctgcactttcgctaaaatgttatccagcttttgagactgctggctcttttctacagaagctaatgatccaccgcttgtaagcgaattgacaacggtctgaaacttttgattatcaacgctagacattgaaaatagtaaaataaaaaaaactaatattaacgtcaccaaatcagcaaatgttaccatccattttggcgactgtgccgaatacctttttcttctacgcttcacgaacgtgttctctcttttcttccagctttcgtttttcaacaggggcaaatacttttagctttgcttgcacaaagcgagaattttgacccgcctgcaagccgatgacaccttcaataatcacttctttaacaaaaagctcatactccgttttaccagctaatttagctgcgattggctgaaaaaacaagtttgaaagcagcgccccgtagaaagtcgttaaaagagcaattgccatgttaggcccaagcgatgaaggggtattaaggcttttaagcattagcactagcccaacgagcgtcccaatcattccccaagcgggggcataatcgcctgctttttcaaacatacttcgacctctcgcatgtctttcttccactgcagctatttcagcttcaagcagctctcgaatcatttccggttctactccatcaatggctagcaaaataccttttttcacaaatgaatcatcgatttgttcaagctctgcttctaacgatagaagtccttctcgacgcgctttttccgataaatgtacaaatgttcctacaatttcttctacgtttatttctttagattgaaacgcttgtttccctactcttcccatattttttaattgttttaaaggaaagctcacgcacagcgtaccaaaaacgcctcccagtacaattaaaatcgatggtacatcaataaaagctaaaaaaccgcttattcctccacttgaaataaccccaaacacaaccatagagataccaattagtatccctataggtgtgagcatatcaatttttttcatattctatctccccgtgtctgaactttggattcgttcttattcattcacaggtatttattttgttgattgtctgaactcgatgcggtgaggaagctgtacaatgctgctgtctaccgtttctttgttcatgtattttgttaagagacgcatcgctactgcaccaatatcatacattggctgtacaacagatgttaactgaggacgaaccattgttgaaagtcttgtgttatcaaaaccgataacttctagatcgtttggtacattcaatccgcgatcttgtgccccgtgaataacgcctaatgccatttcatccgttccaacgaaaatagcagttggcttttcatcttcttctaatagtttttcaaccgcttcaatacctgaatcgtacgtgtagtctccttctacaatataagaatcacgtacaggcaatccgctttcagtaagagcacgcttgtacccttttacttttttcgcatggttgattggttcttctaacgtacctgaaacgaatgcaatatttttatgaccgctgtcaattagtgattgcactgcatcaaaagctgcttgttcataatcaatagttacagatgggatttggttagttgattcgattgatgctgcaagtacaactggaaccggtgatttttttagctcttctacgtgttcttctgttacattgccactcatgaagatgattccgtctacttgtttaccaagcatgttatttaaaaggtgaagttctttatcttgattttgatcggagttacttaagatgatattatatttgtacatcgttgcaatatcttcgattccacgcgctaattctgcatagaaaatatttgaaatatcaggaatgataactcctactgtcgttgtttttttacttgctaatccacgcgctactgcgttcggacgatagcctagtctttcaattgtttctaatactttttttctagttgatggttttacatttggatttccgtttaccacacgagaaaccgttgccatcgacacgcttgcttcccttgctacatcataaattgttacgttcacaacaaacactccttatcgaaaaacatttcgtttattttatccttatttcatttcttgtatttacgtatataaatccatcttcctttatagaatggctatttctagctccttcactcttacatacagcttagataccctgtatgcatctaaatcattcctgttatgcccttattattacgtggcaaagacaattttaccagtttatatgtaacaatgtaaaagacggtgtatattaagtaaataaaaaaagtgaatcgcgaatttatatcatatgcaatcacagaatgatagcgaatatctgtaactactatacgatactatgtgcttcatcgcaacgtatttaccgcctttttccgacaagtttcacgagaatttcataaattcttgttttttggatttgcacttattctttcctattttgacaaaagttatcgactgttttcaaaatacgtgataatttcgcttatctttattataacgaaaggcaaacaagcttgaaaccattaagtgcctcaaacttgtcataaaagtatacgaatttttcatttttacgtttttttataaatttaagttacatataggttttagctgcttcataaattctgtaaattgcgggatatccatttgctgagctgaatcagaaagtgctaccgcaggatctggatgaacttctgccataattccatctgcaccaatggcaagaaccgctttagccgttggaacaagtaaatctcttcttcccgttgaatgcgtgacgtcgactaaaacaggtaaatgagtttcttgttttaaaatgggaactgctgaaatatccagcgtatttcgcgttgctcgctcatacgtacgaattcctcgttcgcacaaaatcagctgatcatttccttttgaaacaatgtattcagcagcattaataaactcatcaatcgtagcggctaagcctcgctttaataagacaggcttcttcaccgcacccgcttcttttaacagctcaaaattttgcatattacgagcaccaatttgaatcacatctacgtattctacagctgtttcaatatcagcgggatcgacaatttcactaataacggctaaatcgtattcgtcagctactctttttaaaatttgcaatccttctaagccaaggccttgaaaatcataaggagatgttcttggcttgtaggctccgcctctaagcatccgcacgccctgctgcttcacggcttttgctacggctgctacttgctcatagctttcaacggaacaaggtcctgctacaaaacgctgaagtccgtcaccaattgtttctccttttaccgtaacaattgtattttccggcttctttttacgggatacaagaagtgctttacgatgatcatcttcttgaagctctaaatgagctttgaaaatctctttgaaaatatgttgaagcgtagacgtttgaaacggtccttcattcttgcttaaaatagcatcaagcattgctcgttcacgaacgggatcaaaccgtttggttgactgcattccttttaactttcctattttttgaacaagctcgcctcgctcattaataagctttaacagtttcatatttacttcgtcaatttgagatcgcaaatgctgaagatctgaatttgtcatgtacgtccaccctttcactgattttaaaaaatccgtttagcagggttactacataagatgatagatgatggaggatatatgtaaggggcttctctgcttttatgtgctaaactacatctattgtacgaaaaagcggatgaaaccgcaatcagcttataaaaaaagaagttgaggcataggctaaatcgctccaatctaaaggcgaataaatgggataaacaatctattatggattgcttgtcataccgctgttgatttccgtgcaagacttcgcttttcgcgggcggccgctgagcctcctcgtcgcttacgctcctgcggggtctcgcctgtttcgcttttcccgcaggagtcttcgtcttgccctccaatcaaccgctagaagcagcttcatacagtaaacctacgttcaccctgccaatgaaaaaatccgaacgattaatgttcggatttttcttttactaaaatactttttcgattagtgagctacgtttttcgctaattcgtcttcgttaatgttccagtgagaagcatgccacttcacttttccatcttcaaacagaagcgcttgaggtgattcatgcttcacttcatacgtctcagcgatatagttagatacatcacgtgaatcttgaacatgaagataataagaaggaatgtcttcatgactagaagcaaatgctgaaaatgcctcatgaccagctgcactaattggacacgttgtgctgtgttttaaaaataaaaagcgattgttttcctttacaacttgttcgaactcttcaactgttgaaatttttttcatttttttcaccctttctgtacttactcttaagtttacatggtttgaccgtttccatacaaaaagagtgctcagctttatgtatgatgctaataaattcatttataaggtggatttttttcctgcaatgaaaagattatttacttgttgttatccagcctaaattacatacaaaaaaaagcgttcaccctatagggtaaacgcttttgattctttattatggtcgtggcactgtgctttccacttcatctagtgctttttgagcttctgttagcttctgctgaacgtcctcgttgctttgagactcaacttcatcagcaagcacttctaagcttgttggcggtaatgcttcgtgttcaggatctactttacggaagtttttcaccttgtccactacttgtgaagattgctcagacagtgtttgtgataaaccagccgttttttctttagccgtttgagcaaacccttgtcctttttcaacagcgctgtttttcgcttgctccgtttttaaacgaacgtaagctgcctgctcatttaaatcagaacggaactctttacctgattttggagcaagtagtaatgccgttgcagctcctacaactcctccaatcactgttcctactaaaaagcctttatttgaagtgttgtttggtttatttggtttgtttgacatatgcgtctcctcctttaaagttcatccttatgaaaatgagcgtgagcgttgaaccgctttttcttttacttcaacaggtacaggctctgcttcaacttttttctgttttcttaattttatacgttcccatacgtctaatgcaacattgctccattgaacgacttgagcaacagtttctttattttcttctactttctctgaaacgcttgatgatacgcttttaatagacttatttaggtcttggattgagtcacctacgcctttaacagaatccaccactgtgttcagcgcttcggatttacgctgaatatcttcagctaacagattagtcttatgtaaaagtgcagttgtttcggctgtgattcctgtcatttgcttttctacaccgtctaaagtacctgccactgaatttaatgtgtgctgaacggatttcaatgttttggacacggaaaccaccaggtaaaaaatcgcaatggcaacaatagcagcgcttaaataaagaataataaccatctgtgcaaggcacctcctattttcttctctcttgttataactactttcccaattttataaacaattaaaccttctattccctatagactctttaactttaccatattctctctgcttttattcagaaaaagggaagattgctacattatttcgcgatatatgagttatttcccttcctacagaaaaaaaggattttaaagcataaaaacaaacaaaataagctcagtggggtacaatagaaagtgaatcaccaatcattgttattttaaggagggactatttatgaaagatcctagaatttccacattagctaaaaatttaattaattattctgttcgccttcaaaaaggagaaaaagtattaatcgaaaactttggacttcagcgcgaacttgtgacagcacttgtagatgaagcgtacaaggcaggtggctatccgtttgtactgctaaaagatcattcggtagaccgagctcttttaaacggagcacaagaagagcagttcaatatgatggcagacttcgaagcaaatgtgatgaaagaaatgaatgcttatattggcttgcgttctggttcaaacatttttgaacaatcagatgttccggcagataaaatgaaaatccaagggaatacgatcggtaaaaaagtacatagagaaattcgcgttccaaaaacaaaatgggttgttcttcgctatccaaacgattcaatggcgcagcttgctaaaatgagtacagaagcatttgaagatttttattttgatgtatgtaacttagactatggcaaaatgagcaaagcgatggatgctttagttgagctcatgaaccgtacggacaaagtgcgtttaacaggtgagaatacagacttaacgttctctattaaggatattcctgcagtgaagtgtgccggggaaatgaatattccggacggtgaagtatacacggctcctgtacgtgattctgtaaacggaacaatttcttacaacactccttctaactatcaaggctttacgtttgagaatgtatccttaacatttaaaaacggtaagattgttgaagcaaccgctaatgatacagaacgcatcaacggcatttttgatacggatgaaggcgcacgttttgttggcgaatttgcgattggcgtaaatccatatattcaacatccaatgcaagacatcttatttgatgaaaaaattgacggaagtttccacttcactcctggcgagtgctacgaagatgcgtataatggaaataagtcaaatattcactgggatatggtgatgattcagcgcccagaatacggcggcggtgagatttatttcgatgacgtgttaattcgtaaagacgggctatttgtcattgaggaattaaaagcgttaaatcctgaaaatttaaaatgagttttgaaataaaaaaaaggcactctcctgagtgcctttttttatgatacggtttgctgatatagtttttcaaacttttgaatgtctccagcacccataaatactaatacagcttcattatggtcttttaacgattcaattgtttcttcattaattaattcagctccgctgattttgcttcgtaaatcttcaattgataatttaccttgatgctcacgagctgatccaaaaatgtcacatagatatactttatcagcgtgctgtaagcttgctgcaaagtcctctaagaacgtttgtgtacgcgtaaaagtatgcggttggaaaacagccaccacttcacggtttggatacttttgacgagcagctgaaatcgttgcattaatttccgttggatggtgtgcataatcatcgatcagcacttgtttgccaacgttcttttcactgaaacgacgctttacaccttgatatgttttaaaacgctcttgcagcacagcaacgtcaatttcttcataatgacaaagtgcaataacagaaagtgcatttaagatgttatggtcgccataccctggaatttcaaatgatgcgtggaatgtattacgaacgaacacatcaaatgttgtgcctgttgtgctttttacgatattacgtgcttggaaatcattttcttcgcctaatccgtaataaagaacaggtaccttcgcttgaatttgctgcagatgttcatcgtcaccacaggcaataattccttttttgacttgaagtgccatctcttggaacgcgctgaatacatcatcgatattggcaaaataatcagggtgatcaaaatcaatattcgtcataattgcatagtctggcgtataagataagaagtggcggcgatactcacatgcctcaaacgcaaaatacttgctgtcttttacacctttacccgtaccgtctccaattaaatatgaagtaggttcagctccttgaatcacatgcgctagcatacccgttgtggatgttttcccgtgtgctcctgttacggctacactcgtatactgtttcataaagtcacctaagaaacggtgatagcgtacaagcttgactccttcttttgaagctgcttctgcaatttcttcatgcgtatcaggaaaagcatttcctgcgattacagtcatgccgtctttaatattatttttatcaaatggtaaaacaggaattccctgctgttctagtgctttttgcgtaaaaatttctttttcaatatccgatccttgaacttgaaagcccatatcgtttaggatttgcgcaagcgcactcattcctgttcctttaatacctacaaaatggtaaactgtcatataaagaacctccaacattcgtctatctgtaagacagtatatgacggttatctagaattgctcttacaaacgtatataaatgtcgtttgattgctgatttcacgataacattcgtacattatatcacttcttataacataactccatgactccatttctactctcttcccttgcgaaacggccttttattttggcttcatcacatagtatatagcctgctgttttaaaaacgagcgccatgtcattgcattttttttgtcattatattgtgttactaactgttcaatgctttgtttatgtcctaaaaagaaagagtcaattaacacgtcatatccgattgattttatttttcgaatccaaattacttgttgttcctctaaatttgcaaatcttcctcttacatctttgatgataacctgctcatttgtcaatggggtatatccttttaagaaaaacgaattaggtactttagacacaataattggctccagtacactcgtcaaaaaaaaggctccttgaatcaaaaacgactctgttttctgcttcgcctgatcagctaaaaaaagctgcagcaaggtttttccctgaatggttacatattcaaatgcaaaccactgaaaaaataattgttcatgggaatcagacagaggcgcctcgtgaggcaagtttactaattctttaaataaatgtgaagcccgcactttttctcgtatattcgtatagcggttcacaaaaaagaaatattgattgtaaaagtcacaaatagcattgtcagactgaagctgcttttgttcacgaatttcattaaagttaatcagttcatgattttcttctgtcattactcttcactcgtactctaattattttggtttgtcctctttaaacgccttcatctcatatgtttctgctggtgagaaatgatagcaaactatcacatgctaaaaaagcaaaacacacattatccttacatatagtaaatcattttactagttctgacaaaccttttcctttttttcttgatggatttcttccaaaatctctactcaaattctgtataaacgaacttaaagcaggaaaaaaagaagcgacggatacagcgacagagcgttagctcacacaatgctgtatcctgctgattttgcatagcctcttttttaacaaaaacagcttaaaatgtagaagtggctgtttgactttccatttcttgaagctcgttttcggtaatgagcacatctctcggcttgcttcctcttgcttctgaaataattccttgctgctccatcatgtcaattaggcgcgctgcgcgattgtaccccattctgaagcgtctttgcagactggaagtagatgcaccgccttggtctagcacaaactcgcatgcttcatagaaaagctcatcttcttcatttgaagcaaagctttgctgctttttcaacaaatcttcttgatcaaataagtatgttggcttcatttgttttttgacatgatctacaacgcggtcaatttcttcatctgaaacaaagttcccttgaattcgaacacttttagaagagccgttttcaagaagcagcatatcacctttacctagtagcttctctgctccccctgtgtcgataattgtacgtgaatcaacttgcgaagaaacagaaaatgcaatacgcgttggcacattcgctttaattaagcctgtaattacatctacggaaggacgctgcgttgcaagcaataagtgaatgccacacgctcttgctttttgtgcaatacggcaaatagcttcctctacttccccaggagataccatcattaagtcggcaagttcatcaataataataactagatatggcagctccccgcttttttcattatgttcttttacacgttcgttgtattttgtaatatcacgtacgcccgcatgtgcaaacaattcataacggcgctccatttcctctactgcccattttaaagctgtagtagctgctttagcatccgtgataaccgggctgactaaatgcgggataccgttgtaaggagctagctcaaccattttagggtcaattaacataagcttgacttcgtgtggcgcagctttataaagcaagctgacgataatagtattaatacacacgcttttaccagatcctgtcgctccggcaatcaaaccgtgaggcattttattcaagtcagtcacaaccggcgttcctgaaatatctaaccctaacgccaccgttaaaggagagttatcttttctaaaagaaggatgcctcaaaatttcacgaattaacaccggcttactttgacgatttggcacttcaattccaatcgtatttttccctggaattggcgcttcaattcggatatcacgcgcggctaggctcagtttaatatcatctgttaaattcgtaattttgttcactttcacaccgggttcaggatgtacttcaaatctggtcacggtaggaccttgcgtgacgtttacgaccttagctcgaacgttaaagttttttaatgtcatatccaaaagctcacgctgctcatccgcccattgattatcttcttcaatagcagctggaggaatgttaagcaagttcattccaggaaatgcataaggagaagaagcctttacatttacaggttcttcagcttttaacgaagcctgcggaaccgcttctttggttttttcaccgtgaacttcttcttgcctacttacttccgtttttttttgcagagcttctgcctcctgcctttggtatgaaccttgagacggctgacttttttctcgagcgctgttattcatctttgtgcggtcttttttcagcatcatcacgttaaaaggcactaatcgcttaccgcgagctcgttcagcatttcctggctgttctgcaggtacaagaggttctacagctgactcttgctgtacttgttcttgtaactcttgactttcctgtatactgctctcttcctcttttatcaccgaattttcaagctcttggtgaacaacagccgatgccgcttctggttgccattcatcagctgcgggttgcgatgaatttaaactttcagaattcagctcatgttctgctgccatatgaacactgtttgctggctcttctagaatgacgtcactttctttctcagcagctggagcttcttctttctttctaggctttagtgattctacttcttctgctgcttgtaaaaacacttcgcttccgtccatcaacgtttctgcttctacttcttcagtctcatttcctatctcttgttggagagaaactgatgattcagacgggcgcgtttcctctgaaattggaacttcttcggccgctgtcatacctttcgctaaatcccagtcatgagttctctcttgtcccactaacggttcgaccgcgtgtgattcttcaaaagttggcacctcttcctgttcttttacggctactgaagaacttggcttttcttcagaaaatgatagcttctctttttgattttcctcatattgcttccactgagcaaaacgctgagaagacagttgcatcatttcttctgtttcttgaatcggtgcttcttcggctataggcttagaaactggttttcttaacggctctacaacagctgtattcatcgctcgtcggtaaatttcatcttcaaacgctgcttttgataactgtgtactcggaagctcatattctactacttcctcacttccgttttgtacaacattagaaggccgcttattaaacccatagacaggtgaaggaatttcagtcggacgaaacggacgttttcttacttgcggaaccgcttctttcttttcagataccgtttttaacggctgagatactgacttaggctgcgttagcgccgacttgcgaacaggctcttgataaaacggagccggtgccttttttgctacaggccttggttcatttttaggagctgctgccttttttgcttctcccgtatcatcaattaaaggaaaacgaaacgttccttttggatattgataagctacttttgtatgaacatcttgctgctcttcactgtaactccgcttttgcgttctggccgagtgtggaacagaaggttttggcgctgctttcatcactggcttttgatgaactgactgcatttgtttaggcttaggagccttctttttaggaattgttttttctctatttaaagggtattcttccgttgtatttccatgttcgtctacaacgatttctttcacttcgtatcctagtaaataatccattacttttcgtacaaaacccatttttatcactctttctatcagactatcttacttcgtttagcctcttataccgcagtgctgcgatatctacaaaaagctatccatgcatcctttatttacctttggcctcaaagtattctctgagatggatatatatactatcttttcatttatcattctatcacgtatgcttgaactcttactataaaatctactattttgcttcccttatttatacagtaaaattcctctttgcaaaaatatttttttgcgtctagttagcactcataattaaacgcgaaaaaagccactagtatatactaatggcttttaattttatcaaacctttttaagaattgacaattgcttttcagcaactgtaacgctttgaaatatacgtgtaaaaaaacatcatgcttttgccctataaatcagtatggcactctgcttttatgcttgaaaaggttgacctacttcatatttgtcttcaagtactaaaatccctttttcttgaggagcgttcggaagcgccagctctttagcagagcaaatcatacctgaagaaggtacaccgcgcagctctgcatctttaatgatcataccacttggcataaccgctcctacttttgctaccacgactttttgacctgcgtctacatttggtgctccacacacaatttgaagtgtttctgtgccaacatctactttacagatattcagcttatctgcatttggatgcttttctttttcttgaacatatcccactacaaatttaggagataaatccacttcaagtttaccttcaaaaccgctttcgctaagtacacgatttacttcttccaccatttcttctgttaattcaagagaaccatttccctctacttttaacttagaagaagcatgaaagatgttatagccggctgttatatttgatttttgatcaaagatacgcacaacgtcgccttttgtttcaaacgtgcgattttcaattgcgatatcttctagcttgacgattaatgtatcgccgataccttctttattataaaaaagattcataattagtcccgtcctttactgcgattttttcctagaataaaaataggttctagctcaccgttttcgtataaaaatgaaagagctgtgatgggtacacgtccacttgcaaaaaagctcatggtcatttgcgcaagaatatcataacccgtttcgttttggatatcagctagaatcagcacatcttgatgaggtactgctacagccattgtgcccgaaacactagaagcaaaatcttgcaaaaatgcctcgttaagaattcggcttgcatcgtatccatcgttctgatttacaaaataaaaatcattgcctgctaccgtatcttttttatgtgaaatcggcaaagagcgaagattaaatttagccatttcccgcactgcggatagatctaaattttccttgcgaattagtttctcatctaatagacgatatgtattgcctaaatcaagcgcataataaatgcgtgtttcagctgtatgttcatcataaatcaacggcacgtcttcattcgatttatctggaaaagacgttgagcgaataactggataaatgcgcttttcttttcccgttacctgctgttcatcgttcataacacgaagagcttcttttatataatataccatttcatctagagccgcttcctttttttcttcccattttgcaattagcccaggtaaagaaatggttacaccttttttcgtttcctgatgttcaacgcgcagcgtatctttttcacgatcaaataaaaatgaccaatccgcacccgttaatcgctcttctagtagttttctcatcttttgactattcattttcgccatatttacgcctccttttctcatttttatgtatgaagactgatagctgtagatcgctatcagtcttcacttgatttatgcatttaagccgttaataaactcttcaatttcttcttttgttttacggtctttgctgacaaaacgccctgtttcttctccgttgctgtaaccaacaaagcttggaattccaaagatgcttaattctgcacaaagatcgataaagtcgtcgcggtcgacatagtgaaatgtatactcgctatgattcgcctcaatttctggaagcacaggctcgattactcggcaatctgggcaccagtctgctgaaaacatcatgatatgttttccttctttaatgatttctttgtattgttcaattgtttgcattttttccatttttctttcctccactttttcttttactttcgtatttaaacggctaaagccctatacattatttaatccttctacatcaaaacatagtatatgagttgttgcaactatcatacactgatgcttttctattataaagggttacaaagaaatttcctattgaatagcttgatttgtcctaaaatccagctgtccttttagcattaaaacaacctgataaaacatagcggtccgatctaaatttccattggtaaaaataccgattgctccttctttttttcgaatattcttttggtttgtatacacttccatagcttcggctaattcttttttatcatgacgaagcataccggctaccgcttcaggaagctgaatacgagcccctccacctaaaatcggttcaaggtccttacaggtaacgagacttccccaattgcaaaggaataagccatgaggcgtttcctgcacccctccttcaagcccgataccaatatcagcacctgtctctttgacagcagcacgcgcgcggttaaccgctccttggatggtttcttcgtcagaaaaaggctgtggcgacaccccggactgcacggccacctctacatatgtaaaagtatctccaaatactttttttactgcatttacttttgttggattcttcgttccgattgcaattttcatttttttctcctgtcattatgaaacaaagcaaccgcaaaagcagctgctttgttctttttatccgttttccttaatcgtatcgagcattgtttggtctgtagaacgtacaagtttgactagtaattcttttgcggctgcatagtcatctacatgaatcatagacgcatgagtatgaatataacgtgaacatacgccgattaccgcagaaggaactccattattagaagtatgaacgcgccctgcatccgtacctcctggagaaacaaagtattgataagggatgctgtttgtctcagctgtatctaaaataaattctctcattcctctatgtgtgaccatcgtacggtcaaagatacgaagtaatacgccttttcctaattgtccaaacgcatttttatcgcctgatgtatcgttagctggactagcatctagtgcataaaacaaatccggtttaatcatattcgcagctgattgagcaccgcgaagccctacttcttcttgaacagtagctccagaatataagatatttggcaatttttcattttttacttcttttaataattcaatcgcaagtccgcacccatagcggttatcccatgctttcgccagtattttcttttcatttgccattggcgtaaacggacaaatcggtacaatttgatcgccaggacgaatgcccatttctgctacttcctgcttgctatctgcgcccacatcaatcatcatatttttaatggccattggcttgttgcgctgtgattcgtctaataaatggggagggatggaagcaattacgccagtgataggacctttttttgtaacaacatggacgcgttgagctagcagtacttgactccaccatcctcctagagtttgaaaacgaagcattcctttatctgttacagacgtaaccataaatcctacttcgtccatatgtcccgctaccattactttaggacctttttcttcattatagcgaacgccgaataaacttcctaacccatcttgaatgacttcatctacaaggggttcaatttgcgagcgcataaatgaacgtacttgatgttcgtttccagcggcacctggtaactccgttaatgttttaaatagagatagcgtttcattgttcatatatactctcctttatgtatcattttctttattgtatcgaaaaccggaaatagttgctagttccgtccttctcttctatgactcaacttaacaaagcattcgacaatttgatataatgatgaaaacatatccttaaaaagcaggtgaataacgtgaaatggactcaactaatagcaggagctgcagtcggatttgcaagcgcttatattattcaaaaaagaaagtcgtcaatttcctcatcggaagcccttacgattgttaaaagcgcttttaaacaaaatggggcaatcgacggctcatggattgaaacaacgactaaagtcattcaaaaacatggtctctctttttatggttatacaggtggaattatcagaacacgtgatgcaaaacaggaacattacgagtttttcattgataaaaaaagcggtgctattattgaattgacgctgaatgcatccgtttaatttcgtcaactatttctcctttattatcccattttacagctcgataaaaagcatcatgataaaaacttagccaagcttgattctcataggcataagctagccactgctgcttttgttcaatcgaagtcattggataatcatcatatgccattacccataagacattttgatgtgcatgtgttggcaacagatcgcccatatgcactaagatgtcattgtttccttttaatacaactacagcatgaccatcgctgtgaccgccggtatgatgaaccgttactccaggcacaatttcatctttgtcgctaaatgttattacttgatgctgaataaattcccaattttgtttccaatacgtatttttagaacgtatattaggatttctcatttcattccactcgatttcactaacaaaaattcttgcatttggaaaagcagaggaaaaatgtccgttgctacattttgttaagcctgacacatgatcaaagtgaagatgcgtcataatgacatgagtaatatcttcgcacttaaaccctaacttttgtaaatcttcagcaataaatgattcttgtgttacaccaaaatgacgcttttttttctcatccaacataccattccctatgcctgcatcaattaacatgaggtgtttttcagtttgaacgagcaaaggatcagtcctcattggaattcgatttccttctgagataggatatttttttgtccaaagctcttttggaacaacaccaaacattgctcctccgtctaaatgattattccctccacgaagccatgtcacttttaattcgcctattgttaacgtttccattttacacctccattatattcctttttattttatcactatcttcttctctttttgaacaaaaaaagactgaggaactcagtctttttcgttcaggtattttacttcacagcggtaaatgcggctgcctttttgtgaaaatttctcttcatattccgtcataacattgccttcaaaatcgcttttatgcaaatctaagctaatgtatttgagaagaagcccatattctgaaaagcttgtcaatgaatattcaaatagcccttgattatctgttttaaagtgaatttctccaccatcaaccagcaggttttcatacatgcttaagaacgttttgtatgttaaacggcgtttggcatgtctcttttttggccatggatcagagaaattgagataaacgcgatccacgtcattttttgcaaaaaactcactaagatggttagcatctacattcaacagctttaaatttggaagctcttcttcaatcagtcgttctagagcacttaagatgacactttcatacatttcaattccaatatagttgatatgcggattttgtttagccatccctactaaaaattggccttttcctgttcctacttcaatatgaagaggattttcgtttccaaaaacctctttccagtttcctttatactctgctgggtttggaaccacgtattggggattttcagcgattttatcttttgcccaaggtttgtttcgtaatctcatgttgcacctctttaatgtattttgacgcattgaaaatgtcggttattcgaaacaaccgacattctcatgcataattgtgtttagatagaaaaaaataagagcatcatacgagaaaggatgatgcttaatgcctttaaatgccgaacaccaaatgaatatattaaaagatattttatctaatcatcaaagtgattgctgcggaacggttgcggaatgtgaacaggttgaacgtttaattcaatcaatgttagcaaaaggatacgctagcacagacgtacaagcaacactacaaaacgtgtataaatacacgcaagatgcaaaaagtgctgctcatttagacgaacatattcaaaccaatcaacaaaatttatcacaatgggtccaagaactatctaccttgtcataatctttgctactgtgcttgaatgtcgttgacgagcaacatccgaagatattcaagccagtaattcatttcagaatgttcatttttcgaacgatgccattcaatgaataaaatggtttgacttatcacataccacttcattctctttttcaagttctcggttagttcaaccccataatgctcaagccattcttcccactgagatggattgatgtaccaataaagcaataaacctaaatcaatagcaggatctgcaatcatcgctccgtcccagtcgattaaatatagctgcgtattctctccaagcatccagttattgtggttcacatcacagtgacacacaacatatttatctgtctgaacggacggaagttctgcttgtaaataactgattccctgctctacaatactttctttttgaagtcgctcgtccacattctctacaatatcggctagcacgtcttcgggaagaagcggtgtttttcccaaccttttcaacatatctaataactcgtttgaatgatgaattttactaagcaattctgtcactcgactcgaattcatatcttttggttttaattctcgaccatctagccagtgctgagctgtgatcacatctccattttccattcgtcttgtccacacgagcttcggtacaattccttcagctgacaatactgctaaaaaaggtgatgaattacgctttaaaaaaagctttcggtcttgaaattttgcaaaataagcttctcctgtcgctccgccagcaggagtaatttcccattcgcttcctaatatatcttccaaccaattcaccttcaatttcaacacacacatttcgtttaaaaatttcactcaataaagcaatctattaagacatcatgacgttattttcttagtaaataaaaaagatggctattgaggatatgtatcaatagccatcctttataaatattatctccatcacacttttttcgtcaagtggttgaagacaataattacgtttgaaataaaataagaacgctaagctttgaaacgtttatagcattatcctctatagtaggatacccatttttatatactttacaatgatcaagtgctattttccatggtccttctggcaaaactactttttcttccattaggccttgattaaaaaacacgataatattcttccacggaccgtaagccaatacgtttgataagcaatagccaataacggattgcggcgtgtttaggaaagagacatgctgcctaatcgctgaagcatctcccaagcgaaatgcaccgtgctgtttgcgaatacgaatcagctcttgaacccaattcacatcaggagaaaatttgatccgtcgattccaatcaagtgcattaatatcatcgggtgaattgtagctgttctctacgccttgtttagtgcggtaaaactcttgaccactatgaagaaacggtatgccttgcgaaagaagtacaatagcagtagcaaggcggtgacgacttctacgagtgtcttcgtcttcttctccgtttgaattcgttaacttatcccacagcgtatggttatcatgtgattcaacgtaattaactgattgtgctggatttataaataaagcccggctgtcttctttatccagaatgctccccgctatcacagattgcacggtctctttttgatgaatatttccgctgataaaacctttttcatacacatcaaacgtgcttccttttacagaatctcgaaagcgatcattaaaatagccgatttgaggcgtttggcgggcattcgccataattgctttttgattgtaggggagaggagtatttaaatcccagccttcgccaaacaccaaaatagtagaatcaatttcatttattttttcccgaatcatgttcatcgtttctatatctaaaatccccatgaggtcaaagcgaaatccatcaacgtcgtactcttttatccaaaataatactgaatcgataataaacttttgcgccattttccgttcagaagcaaaatcatttcctactcccgtcccgttcgaaggcatcccaaactcatcatgtcgaaaataataacccggaacaattttttcaaaaggtgattcctctcgtacaaatacgtgattataaactacatctataataacacggaatccctgttgatgaagtgttgatattaattgtttcacttcagcaatacgagtggcaggatttgaagggtcagcggagtagcttccttctggtacattaaacaacaatggattatacccccaattataagaagcatgaggatttaattcatctactccgccaaagtcgttaataggaagaaattcaaggtgggtcactcctagctcttttaaataatgaagacctgttgttttgcctggctgcccgcttgattcagtaacagctaggtacgtaccctttttttctatcccgcttgaaggatgaatagaaaagtcgcgaacgtgcatttcgtaaataacggcatccgttggctgaaggaaaggtggcttttcatggagatgaacataggctgtatgaagatttatcagaactccgtattcactatttgctgtagctgcaccggcataaggatccaccgcttcatttgtccggccgtttacatctattaaaaatcgataataatacccttctttatctaagggaagttccttttcccatacgccttttctttgacgagccatgacgtacagttcttccttcccgctgtttgcatgtattaattttaaaaccactgctgatgcagtcggggcccaaatttttatcataatatgatctgaataaaatgctgcacccaaatcattttgattataataaaatctctcatcaaactctttggttcgtataacagcccctacctgcagcggaactttctccccataattatcacagataacgtacgactgtccaatttctatgctaccttcaaccttgccttcatatttgataaaaccttctaattcatgtacgttttcaatagagatggtctcatgcatttgtgtacttttaatcacaaaaaaatcaatttgaccttcatgataagaagttggaactaaaagagtaatacgatctatttgatctaaataagcctgaaacttattatcaccagtcatccttttctcctccttatgccaattacctctttagtagcattatatgtagcaaacgcaaaaacgaaagcactttcatagcgtgaatgttcgtattattcacctgcttcgaattcccggtcaaaataaatactctggctatgttcgagcaatacttgagctgctttcatctgcttaaactttaaaggtgctttagatttcctaagttcataaaaccactcttcatactttctagtatctacaaattcaacctgataaggctccgcagcgtaatcaatgtatccatttctgctcagtaatattttctttacgttatgttcaatatcgtgagtacgatagatgcttcggacaatttgctccgttcgatttaacccaattaaaggatttaatatctttttttgatctcttcctcttaactctgtccaaaaattttcttttgaatactgaaaaacagcgcttttatatgtttctattaaacaaatacagagggtttccgttggagtaacaataatgatatctccttctaccggagctttattaattaagaaaacaggcttgtacatcacgagacaggtatcaggaaagcgctgaataaaataacggagagcttcatcatggtaatatttacgatctgcttgtgagaactcaaataaagtggatgtagcccatttcatttgaagatcaaatacattttctaaaaacaatattttcaagtcttccgctgtttgtggaagagttgtaaacctcaatagctcttgattttccacgctatcgctagagaacgcttcttccacttcacacgtttctttttttcttgtaaaccgctcttttgctttttgcaaaaatgaacgttgagcttttgtttcttcttgtacaggcggctcatgtaatagcccttcttcaaataattgctttgctttcttccaattatgcttttttaagtgattaaactgagacgtgtagtgataaacgtctttttcataacgggaaatataatcttgcaccttaagtagctgcgccacgtttacatcaatcccctaattaaaattcctctaaaactttgttcgccgatgatttctctattatcatcggcgttttctttcctttgataagagtgatttttaaataacctctctccatgcttgtatgttcatatgctactgtgactgcaaggaaaaagatagtatttttttatatttaggtttgctagcaggatgaacttcaaaaagggcaaacgaacttacttgaaactgttcttcaatcgacgtttgctttaactgttcttccaaaagtccggcttcccctccccacttctttgcaatcgtaatatgaggacgataaggacgtttttcgtataagccgcttagatcttcccgtatggcctgtatatccctttgcagattcataagcttatcatttggcctaaggcttacataaagaactctaggcttgttatacgcaccgaacacatcgtactgacctgtctgcagcgaaaaacttgaatgacgggaggctacttcttttaagcgcgtaatcagcttttcctttttttcatctaaaaaccctaaaaattgtagcgttatatgataatcgtcagggtatgtccattgtttgaaaggaaaaggtattaatttctttgcccaattttctgcctgatgtgcaatggatacaggcacgttgattccaataaaataatgtttatcgcctttcatcaaatcgctccttttctttttattatctttccccaattggttatgctcaaaaagagctagatctattttaaaggttttttcggatgaaatagagaggtttttctgaaaatttgtcatgtgcttaaaaaataagaatttgtgttatcatagaaacaatacagagaatttttataagaaaaggatgagaaaaatgaaagttgttaacaatatggctgatttgattggcgagacacctcttgttaagttgaatcgtcttcaacctgcagatggagcatccgtttacttaaaactagagttttttaatccgagccgtagtgtaaaagaccgtgctgcttttaatatgatcgtggaagctgaaaaagcaggcttgctcaatgaaaattctactattattgaaccaacgagcggaaatacaggtattggcttagctatgaatgcagcggcaagaggttatcgttctattttagtcatgccagataccatgactcaagaacgaattaacttgttaaaagcatatggtgctgaagttgttctaacaccgggtgatgagaaaatgcctggagcaatccgcaaggcagaagagcttacaaaagaaattccaaatgcatttatgcccatgcagtttgaaaataatgcaaaccctgacgctcatcgaaaaacgactgctaaagaaattatcgaggcaatgaacgagttaggcaaagacctatctgcttttgttgctactgctggaacaggcggaacgattacaggaactggtgaagtcctaagagaaaactacccaaatatgaccgttcatgttgtggaaccagctgggtcccctgtattatctggaggaagacctgggaagcacaagcttgtaggaacaagccctggatttattcctgatactcttaatgtagatgtttacgacgaaattttaaaaattaaagatgaacaagcctacgatattacgcgacgcttggcttctgaagaaggaattttagtcggtccttcatctggcgctgcgtgctatgctgctatcgaggtagccaaaaaattatctcctgatcaagtggtcgtatgtattgcttgcgatacaggtgaacgttatttatcaagcgacctgttctcatttgaataataaaaaagcgaacgcaaaggcgttcgcttttttatttagctaattcgtaaatagcctgtgcataaatagctgttgcacgaagtaaatcttcaattaccatgtactcgtctttttcatgcgctacttcttcacggcctgggaaaagaggtccaaatgccacacccgcttctaatgctctggcatatgttcctcctccaattgaaataagtgtaggttcttcatttgtttgttcttggtaaaccttttgaagcgtttgaataagctcatgtttttgatcgacgtgatgtggtttagaatctgtaaaatgtttgatggtcatttgataagattcacttttttctttaatcgtatcaataatatcgtcaatatgagctgatacaggataacgaatgtttaaaccaaagtgccccgcttcttcttgattgtaagacatgattccaacatttatcgttaaatcacccgtgacctcatctttgcgatttaagcccattttttctcctagtgcatcttggactaaatacgcatttgcataacctacaaactgattagcttgtacatcaagttctaatgtgtgtaaaaagcgaagaagtgtaagtccagcatttttccctttatcaggcacactgccatgtgctgaaacgccttctaaagtaagtgtgtatacaccgctcttttctgttattgaaccttttaaagactgatcctttaaaaattgatcatatttatttttaatatccgtttcactatggaattcaagaacagctgttgcaagatcaggaaccatattgtagcgtcgcccagagacaaatgatgtaagctgaacgcttccctttgttccttcaattggctgctggcgaatttctacgtctgtaatgcctttttcagcaaaaatgataggaaaatccgcatccggcgcaaaccccatagttggcatctcttcatgattgaagtagtggtccacacatctccagtcactttcttcatccgttccaatgatcattcgaacccgtttagatagaggaagccctaaatctttcacaattttcatcgcataataagcagccatcgtcgggcctttgtcatcgattgctcctctagcaaaaattttcccgtcttttatttcaccgccgtatggatcaaccgaccaaccgtctccttcaggaacaacgtctacgtgacaaagaatgccaagaagatctttcccttctcctgcttcaatatgaccagcatatccgtctacgttcttgacggaaaacccgtcatttttccctttatttaaaagaaagtcaagcgcttgagcaattccaggtccaaatggctcttcttgtttctctgtgcttgtcaaaacacttttaatttgtagaaaacgctgcgtctcagctagaatttcagcttctcttttttgaacttcctctttccaattaattgccgtcatctgtttgtctccttttcctgcttttacagattgtatctatcattactattggtaaatttaactttatcatacctttatatagaaagaaataattgtctctttcctttcatatcaaaggtttacagagtcaaaatttcgggaaataatttgtaggcacaatcgataaaaacggattctatttgtttattgtttacatatactataaaaaatgtgcaaatagaggaaggagatgttacgaaaggattacatatttatatcattttttgtaaatattgtgttaatttgcgttttctcttttatttttctgtcgattttgtgtacaataagaataaggactgaaatagtgcttgacatctcagagttataaagaagttgtgccttacgaaaaacgaataaggaagtggttttttgaaaccttcaactaatcgaatgctaactcgtatcaaatcggtctatatgttcatttgtaaaaatggaacagttacaacgcaagagctcgtagacgaatttggtattacaccaagaaccattcagcgtgacttgaatgtgttagcatataatgatttagttcgcagcccaagtcgcggtacatggacgactacgcaaaagaaggtcaagatgtcatcctagtaagtttatttcaagggtagtaagtgatttatatatagagataaaattctacgcagtagaaagtcaagacttggacgagtgcatagtcccccgctccatttgcacgtcaagcagagttggtactcgtttaagtgctttaacgtgaaatgtttcacttgtctaataaagtggacaaaaaaaggaaccattttagacttaggttcctttttctttcgcctcttcttaggcatttgatttttgcaataaagctagttcctcttccgttaactccctatactctcctaaatctaacgactcgtctaatagcaaagctcccatagataaacgttttaaatacgttactttttttcctcttgcttcaaacatacgcttcacttgatgaaatttcccttcaacgatcgttaattcaatttctgattccacaccgcttgttagtatctttaactctgctgattttgttacataaccatcatcaagagtgacaccttgtctaaatgcttcagcatcttcttcagtcaccggtgcattaatttttgcaaaatatgttttaggaacgtgttttttaggagatagcagctgatgtgcaagctgaccgtcattcgtcagcagcaagagcccttctgtatctttatctaaacgccctaccggaaatgggtcatacacagcatcgtcaagttcaagtaagtccataactgtttcatgaagagaatcttctgttgctgatatgacgccttgcggcttatgaagcataaagtaaacaaattctcggtaagaaacggcttcgccatgcacagttatttcttgttcatctggattaacgtggaccttagcatctttaactgctgtaccgtctaccttaacagctccagtctttaaaagacctttaacttcttttcggcttccgtacccaatggtagaaagcaatttatccaaacgcatgtaatatcctcctcttttttgaaaagaagatgactctaacgagtcatcttcttaggcactgcgctgtttatttcggcgcagtatctttcgttcaattgcacctgttaccctcgctcccattactttttcaagcaggcttgaacgataggtaataataaagtaaataaggccgcctactgctgctcctataatcgtaataacagtggcagagaatcgtcctggcattgtaaacagtccaatcactgctgcgacaatttttacgctgattcccataatcgcaacaaaaatgagaataagcacagagcgttttataaactcactgtagttatattttgcgtgtttttgaataagcgcaaacatataaacaagagatacgatatagcctagtgctgtcgctaaaactgaaccaatctcgtggaacataagaataaatggaacgttcacgacaattttcacaatcaatccaaataatagacttaaaacagcatatttttgtttgttgattccttgtaaaatagctccattaaccgtaaaaaatgagaacaataaagctaccggtgcatagtaaagcaagacatttccacccgcatccgatgcatctgttccaaagaaaaacgtataggctgggccagctaaagccattaatcctacagatgctggaagcacaagaaacataatcgtttgatatgtttgatcaatttgcttttgcagtacgttataatctttattcacaaaggaacgtgtaatcgttggtacaagagtcaaaccgaacgcagtagctaatgaaacgggaatcatcacaagctttggaacataagactgaacaattccgttcattgactctgctatttctttttgtccagccgctaccatcgcacggttaaatgtgaattggtctacatactgataaagcggaatagccaagctgacaaagacatatggcaatgaatacgtaagcagctctttaaaaatggatacggtagaaatacgcgtaggcgttaccgtctgctcgtttaccattttatcgagatgaggctttcgttttttccagtaccaaattaacacggccagtccagcaagagctcctacaaaagcccccatcgtagcaaatccaacggctagtgcgagactcccatgtacaactttaatgacaatataagtagatgccaataaaaagacaactcgcacaagctgttcaactacttgtgaaacagctgttggccccatagactggtgaccttggaaaaatcctcgcattaaactcatcatcggtactacaattaacgcaacgctaaccattcgcataaccattactacatcttctaaggagttatttaaatcagaacctcccagtgtaattctagacataacaggagctaacgaatataaaagtaaaaatgcaagtattcctgtgacaagcattaatttcatgccggcccggtacattcttctactcgtataataatcaccgagtgcattatattttgatacaaatttcgatacggccattggcataccggctgtagcaatacttaaataaatagcatattggttatatccataaccaaacagtgctccccctacggttccaacaaggatcgcaaatggaaataaataaatcattcccaagattcgggatacataggtgccaagcgttagcacaaaggtccctcttaacaattttgaatcagacatacgtttgcctccgatacttaatgttacatactgataataatgatagaattgaaaagaagcaagtgacagtatacactaagaagggtcttatattcactcgcactcgtcaacaaactaaaaaacaaagactatagcccattttatccaatgttgagagatttgtcagtgaacaaactaaatttttttaagaatagacaggttggtgaaagtatgatatatgatgtagtcgtaatcgggggaggaccttctggtttgatggcatcgattgcagctggtgagtcaggtgcaaacgtattattaattgataaaggcaataaacttggacgaaagcttgccatttctggaggcggacgctgtaatgtgacaaaccgtcttcccattgatgaacttattaaacacattccaggaaacggacgctttttatacagtgcgttttctgtttttaataacgaagatatcatctcttattttgaaggccttggaattaaattaaaagaagaagatcacggtcgtatgtttccggtcagcaataaagcgcaatctgttgttgacgcattaattagcgaacttcaccgtcttcgtgtgacaattcgcacaaacacagccgttaaacgcgtaaactatgagaacaacaccgtgaaagaagtcgtgcttcaaaacggggaagcaatccaaacgaaaagcgttgtgattgcagtaggtggaaaatcagtacctcatacaggttcgacaggagacggttatcaatgggcaaaagatgcggggcataaaattactgaactttacccaacagaagttcctattacatctagcgaacactttattaaaaccaaaacgcttcaaggtctatcgcttcgcaatgtaggactaagcgtgcttaataaaaaaggcaagcctgtcattactcatcaaatggatatgattttcactcactttggcatctctggccctgccgctcttcgctgcagccaatatgttgttaaagagttaaagaaacaaaaaagcaacactgttcaaatgtctcttgatttatttcctagccaaaacgaagaagatattttccaaaagttagtcaaaacaacaaaagaagagccgaaaaaagcaattaaaaatgtcttaaaaggttttgtatctgaacgctatctattgtttttactcgagcaagcaggcattgatagccaagcgctagcaggacagcttcagcatgagaaactgagagaatttgcaagactgtgcaaacgatttgaatttgctgtaaacggcacgctttctttagaaaaagcattcgtaacaggaggcggcgtatccgttaaagaaattcacccaaaagaaatgtcttcgaaatttatgcaaggcctttacttctgcggggaaattcttgatatccatggatatactggaggatataatatcacttctgctcttgtaactggccgtttggctggcagtaatgcaggagaatttgcaacaagcctagcataatatgctaggctttatacataaccatggctgaaaaacagtacacctgctcatcacgatcaacatccactgtcacttggtatttaatatcaacgacgtcttcatcctctaatttccgtaaaaatcgattcaccgcaaattctaaatctttttcatgctctttatcaaacatttttacttgtatcatagcttctaccaccttgtcctatcaaatttgtttcaatcagaatggactgtttctcttgatgatggtttttgtacggattttcaatctcttactacctctatttttatgagggcttttatagatttagtcatcatttgttttcctgctatcattttagtcggatggcagaagtttcattcaaaaaagaggttgagacataacgaaattaattcaatctaaagacgaacaaatgggatacatgagctgaaccgcttgtaacacggaaatcgactgctagaagaaacgaaacaaataaaacctatgttcaccataacaaaaaaaacgaaccactaatcaaacctgttgatcaatggttcatttttcacttcagctaagatacttttgtcccagcctcttttttatttattaaccgtttttccttcccactctaacataccgccaaccatatttgttactttatatccttgttcttgaaggtagtaacatacgttttcactgcggcggcccgaacggcaaatgaaaatatattctttgtctttatcgaaataatccacattagctggaatatcattcatacgaatgtgtttagcagttggaatcattccttctgctacttcttcaccttcgcgcacatcaactaaatgaagttcttctccattttcaacgcgtttttgaagttcttcaggcgtaattacttttacttcttccattttcgtcattcctctctattctttcattcagcttgctatcgctattgtagcaaattcaaatacctttatgccactaaataagaaaagcttaagcagcaagcctgcctaagcttttccaatcgtagttaaaggtttgactaagcgcctgatgtcaaccccgaaagggggacatcaggcgcttaggtctagaacagaacccctgactgctctttagtcaggggttctgttctacatcaatacttaattagctacgatgtttactaatttaccaggcacagcaattactttgcgcactgtcttaccttcaatgaactcttgaacgtcttcattagccattgcaatatcttgaagctcttcacgagatgcctcagcaggtacgtttactttcgcacgtactttaccgttaatttgaacgacaatttccacttcatcatctacaagtttcgcttcgtcaaacgcaggccaagcctcatacgaaattgtatcttcgtgacctagtttgctccataattcctcagtcgtatgaggacaaattggtgctaatagcttcacaaacccttctacgtattgctttggcagcacgtcaactttgtatgcatcattgatgaataccataagctgagagatacctgtattaaaacggagtccttcgtaatcttccgttacttttttcaccgtttggtgatacacgcgttcaagcgtagtgtcattgctttcttgaaccttgctgcttaattcaccattatcttcaataagtaaacgccatacacgatctaagaaacgtcgtgcaccatcaagcccttttgttgaccaagcgattgatgcatctaaaggtcccataaacatttcgtaaaggcgaagggtatctgcaccgtggctttcaacgatttcgtctgggtttacaacgttaccttttgacttactcattttttcgttgttttctccaagaatcataccttggttaaacagtttttggaacggctcttttgttggaactacgccgatatcatataaaaacttatgccagaaacgagcatataataagtgaagaacagcgtgttcagctccaccgatataaatatcaaccggcaaccattcttttaatttatctgcatctgctaacgcttcactgtttgttggatcaatgtagcgtaagtaataccagcagctgcctgcccattgaggcattgtatttgtttcgcggcgcccttttttgcctgtttccggatctacaacgttcacccagtcatcaatgtttgctaacggagattcacctgtgcctgacggtttgatttcagttgtttttggtaacacaagcggaagctgatcttcaggaactgccgttgttgtgccatcttcccagtgaataacaggaattggttcaccccagtagcgctgacggctgaataaccagtcacgcagacggtatgttacttgtttttcacctttttcatttgcttgaagccactgaatcatatttgaaattgcttcttctttatctaaaccatttaagaagtctgaattaacgtgctcgccgtcgcctgtataagcttcttttgaaacgtctccgcccgctactacttctttaatcggcagttcaaatttaacagcaaattcataatcacgctcatcatgagccggaacagccataattgcacctgtgccatagctcattagaacatagtcagcaatccaaattggcattctctcgccgttgacagggttaattgcataagcaccagtgaatacgccagttttgtctttggctaagtctgtacgttctaaatcgcttttgcttttaatttgatctaaatacgcttctactgcttctttttgttcggctgttgtaattttttctacaaacggatgttcaggtgctaaaacggcatacgttgccccaaatagcgtgtcaggacgcgttgtgaacacagtaaatgtgtcgtcgtatccatcgattgtgaagtgtacgtgagctccttcagagcggccaatccagttgcgctgcatttctttaatactttctggccaatcaagctcatctaaatcttctagtaaacgatctgcataagctgtgattttaagcatccactgcttcattggacgacgctcaaccggatgtcccccacgctcacttttgccgtcaatcacttcttcgtttgcaagtactgttcctagagcaggacaccagttaacagctacttcatccacataagctaagccctttttatatagctgtaagaaaatccactgcgtccatttgtagtagtttggatcagttgtattaatttctcgctcccaatcgtaagagaaacctaacgatttgatttgacgacggaaattattaatgttaagttcagtgaattcagccgggtcgtttcctgtatctaatgcatactgttcagcaggtagtccgaatgcatcccatcccatcggatgaagtacattgtatccttgcatacgcttcatacgagataaaatatccgttgctgtataaccttctggatgcccaacgtgtaaaccagcgccagatggataagggaacatatctaatgcgtaaaatttacgctttccttcatcttctgttgttctaaatgttttattttcttcccaaactttttgccatttttgttcgatcttttcatgattaaaagccatacataatcctccttgtacgctccagctgtatttaattaaactaaaaaacccctcatccctcaaacaaagggacgagaggttgaataaacttcccgcggtaccacccaaattagcacaattatgtactcactcattttccttaacgcggatagacggcaaatgttactttacttcacatttacaactccaaggtgagttcatgaacgctcgtttgctgactcgcaccaaccgtcagctctcttagctcgcttcgttcactactattccttatcatagtttttacatcatactaccttgtattgtaaataatatgttcgtaaactgcaagttgttcaacggattttgtaaaagtttctgcactgcagcactgctttgttgctaaatcctctctttcattcttatatatgaacaacttctcccaaaaacatacatccacggccaaacaaaaaagggattgagacataattaaatcaatccaatttaaagacgaacaaatgggataaatgcgctagtatgaatctcttggttacaccactgttgatttccgtgcaagacctctctttccgcgggcagtcgatgagcctcctcgttgcttacactcatgcggggtctcacctattgcaggagtctttgtcttgccctccactccacagctagaagcacctaaacaaatgaaacatacgtgcaccataaacatgaaaaaatccgaacgattcatcgttcggatttcccttcaactaaaatacttttatcccagtccctgcttcctttagctgctattattaaatgcccaatccaaaagaaaacaggatgatcgcaagtacaagaccaacaagcggcacaatcaccgtcattgctgcaactgatccatacgcatctttatgagtttctccgcaaatagaattaattgttgttacgacataaccattatgaggcaaggaatctaatactccagaggaaatagctactacgcgatggagagcttctggatttacgccagcatctagatagtgaggtgctaaaattggcaaagcaatcgcctgacctcctgaagccgaacctgtcatccccgcgataacactcacggcaatagctcccccaatcaacggacttcctggaatatgcgtcatggcatctacagccactccaaacgcgggaacagccttagcaactcctccaaaacctacgacagcggctgtattcccaatagcaattaacgcacccagcgttccttctgaagctgcattccaaaatcctttaaaatgctttcggttcacaatataagtgacaatgatcccgcttaaaagtgcgacaatcaacgcagattgctgaagtggcttatgaagtgcaaaagaaataatgagcacaaccacaagcggaagcaaacttaataaaggattaggaagagactgattttccgttactactggatctttctcgcgtgatataaaacgctctccatttttaactgcttttgaaatcaagcgctttaaccaccagtagccgaatacagccatcactactgctacaactaaactaacttcccatcctgcatacggactagtcttcaaatattcaattggaatccagttttggatttcaggcgacccagcggaggtcatcgtaaacgtaacggaaccgaatgctaaagcagcagggataaaccgcctcggcaaatcggcttgtttgaataagcttaaagccattggatagacagagaatgctactacaaacagactgactcctccgtatgttaagaccgcacaggcaagtacaatcgccaacactgctcttttcattcctagtttactgacaatccagcgagaaacactatcagcagccccgctgtcttccatcacttttccaaagacggcgcccaatagaaacattaaataccaagaagcaataaatcctgtgaaaccagacatataatttccaacaaaatttgcttctccttctttcaccagctgtggaaataaaggcattccgcttgttaacgcaacaactaaagcactgagcggacctgctataaataaattcatgcctctcatcgttaatacaatgagcagcaataatcctccaattaatccaatcatactaagcatgtttagccccccatgaagtcatataattagaaaacgcttacatatttacaggtatatactcctttctttgcttgtcacaacccttactatattattaaaggaatgctgaagacattcctacgtttattaagcggtcaaaaataaaaccatctctatttatttagagatggttaatgaacgctgacgtttttcttttaatttataatcgtatatccatgttgtacacatgctgaataacaatagcgcaattaataaatagcacagcatagacatattaaacgcatcgaaaataacgcctccaaaaagaggaccaatcattttacctgcagtagccatgctgttaactacaccttgataaaatccttcttttccagatggagctaactgacttgcaacagccggaatggctggccaaacgaacatttctccaattgttaacacaaccattgctgttaggaactgcggaaatgttgtagcattcaccacgataataaaagaagccacaaaaataaccgttccaattaggacctgtacttttaatgtttttgctactttttgaatgatgggtacaatcaaaggctgaccgactacaattaaaatcccgttaatcgtccaaagcaagctgtagctagaaagaggtatattcagctcacgcgtatgcgtagcaatcgttgtttgccactgaacatacgccacccagcataagacataccccgtacataaaataagaagagcagtcagcttcgttttatgcccaatactcccagcttcattaaggacattcgtttgcccaactgtaaccgaaatatggcgatatgaaaaaatagcaataagcagaaaaataacgtataaaattgtattagctaagaaaatatacgtaaatgaataagacgctacaatgcctcctaccgcggcgccaatagctactcctgcattttgagcaacgtacatcgcattaaatgcttttcttccgccttgtggccaaacggaccctgccattgcatacatagatggaaacacaataccagatccaaaccctacaacaaccaagagaacaacgtatgtaggccaaccatggaaaaacacgagtcccactaatgcaataagagtaataataattcctgataaaatagatttatatcctccgattttgtcaaaaagcgttcctccaagcaaatttcctactacgcttgcagcagaattcagcataagaaccactcctgcgacggataacgactttcctaaatgttcatttatataaattgtattgagaggccataaaaatgaagctcccgttacgtttacaagcataccaataatcaaaaaccaaagtgatttgggcattgatctcccccctatctattcgaatgccaacgtacattctagtcttttcttaaagggttcgcaatgcttttacatatagacaatttatttgaaattcgctgactatttaaaaaggtgatttcacatgacaatatcatgcaaaatcacctttttactgcttacttttgcttcgaacgaaccggctgtgcacgcttgctgtttcttgcttttaattcttttaccggatcaaaatcttttcctagctcaatgtcattgctgttgatcccgttttttgttttttgttccggattattttgatttgaacgcgttgccataaaatcctctccttaatgctgagttgtgatcaatttattttgcagctgctgaacttgcaggcgcatgcgatatagctgctctctttgctgtgcatttgcactgtgagaaaactcttcaatttctttataagcattttctaattttccctgtgcttttgtatattcagtgtcgttataatgttcttgcttcatgccttcctgcaactggccttgtccaaagcgaatagcatcttcacactgttgcataagttgatccactgcttgacgagttgtcattctctattcctcctattcgttcatttctgtcttattgtgcgcaactttacttccctttacgacaagaagaacctgttaaatataagcacccttaaatttgtttggcactttttcacgtttttgatacaatttgttgatgtatattgcatgtaaaaaggaggttgctgatttgaatcagacaaacccatttccgtataaatctgaaaacaaacgttatcatacctggaattaccacttacgtaaccactttggccataaggtatttaaagtagccttagatggaggatttgattgtccaaacagagatggcacggtagctcacggcggctgtacgttttgcagtgctgccggttcgggggattttgcaggaaacagagcggatgacctggtgacacaatttaatgaaatccgtgaaaaaatgcatcataaatggaaagacggaaaatacgttgcttactttcaagcatttactaatactcatgctcctgtcgaggagcttcgtgaaaaatatgaagccgtcttaaagcttcccggagttgtcgggctttctatcgccacgcgccctgactgtcttcccgacgatgtggtggaatacttggctgaattaaatgaacgaacttatctatgggtagaacttggactgcaaactgttcatgaacgaacttcactgcttatcaaccgggcacacgatcatcaatgctatgtagatggcgtagcaaagcttcgaaaacacggtattcgcgtttgttctcacatcattaatggtttgcctttagaaacacctgatatgatgatggaaacggtacgtgaagtagcaaaattagacgttcaaggaattaagattcatctgctccatttactaaaaggaacccctatggtcaaacagtatgaaaagggccttgttgaatttctttcatttgaagaatatgtaaagcttgtatgcgatcagctcgaagtaatcccccctgagatgattgttcatcgtattacaggcgatggaccgatagacctcatggttggaccgatgtggagcgtaaataagtggagcgtattaaatgccattgatcaagagctcgaacgtcgtcaaagctatcaaggaaaatattatgaaaaagagttgatggaaagatgaaaatagaacgtatcctgccttttgcccgcacattgctcactaatgctgtggaccaaggagatgtggcgattgatgctacagcaggaaatggacatgatacactgctcttagctaacttagtcggagatacaggtcatgtatatggatttgatattcaacctcaagccattcaagcaactcagcaacgattgaccgaacaccatgtagaaaacagagtaacgcttatccaagaaagccacagcaatataaacatgcttcctcgttctattacaggacgagtcacgggcgccgtctttaatttaggttatttaccaggcggagataaagacattgtcaccacttctgaaacaacaatctctgcaattgagcagttacttgatttactagcacctgaaggagtgattgtgctcgttatttatcatggacacaaacaagggaaacaagaaagagacgatttactaacgtatgtccaaaatcttgatcaaaaagacgttcacgttttacaatatcgtttcatgaatcagcaaaacaatcctcccttcatcattgctattgaaaaaagataagccgcgtatggcttatctttttaacattcggtacaaacgtccgttgatatagaaaaagtagctgagggctccccccgcttttattaacctacgtgcattcacatgaacatgtttttgtgcccgcactttttgatcagacaaataaacgcctaagagtcctttataaataaagcagtgaaagtgataatccggcagttttttagcatattcgtccgcttttacgacaaaatgcaaaaagcgatccatcatttgctgataatgaggataataaaaacaaaagttcaaatctcctcctgctttatcttcttcttggtcaattaaataatcgagtaaaatatgtaagccttgaatataaggaaaatatcctgcttttattttctgcgtcatttcttcggtcatctcttcttgaaagctataagcaaccaaacaaaaaattcctaacgttgaaccagagcacgctgaaaattcataccactccatttcaggaacactgtgccggtgagcatcgaaccaattctctaatcgtggaactctttccttgatttcaacatgcttatgtatttgcaaatcacaataataattagctagttctaataaatgtgaagagactatatggtaattacaagcttttcgcaaggactgctgacaagtctggacaagtccggctaagtatcctccgtcgtctttatccgttcgaaaacgatagtaatccccaagagatgcatgaggagtcaacgcatctggcatcgattcatgtaaggcggcaaaatctttagggtcaagcgaattgctgcggtcacataagttatctaagtaatcgctgattgtttggtaggcaacaataaatttcacgcattcaatcatgttttctttcgctaaaatcgataggataccgcctccttcacaatgaaaagtttttgtatcgatacttgccaatgcttgagtacgcaattctttattaggaatctcttttgcccgttcgcgccaatgattaagctcatgatgaacgacaggaaacacttctcgataaatttttctcattaatgaaataggatgagacggaatcttcatttattttcacctcaatttcttaccgcacttattaaatgtgaagatcgacaaaacttttcgcatatgtaaaaacgtattctctttcaggctcattaaagatttcgtgatacagctgagaccattctttgtagattttttcacttagctctatttcatcaaaccactgcctaacaatcagcttttcaataattttatcttctcctgcctgcatcacaagaagcgggacatcaggcaaacgatcgatatctttaaaagctaagttgacagcttggatcaattcccggtaccatcttacagaaacttttgtaacatacagtgagtcgttttcatcttcatctcgaacttcttggtttcttgttgctttttcaacagtgagacctaaatcgaaaagtttgttcggcatgactttatttaaccctttagatagcatatctaaataagccggtacttgctcttttaatcctagacaaggagaggaaagaatcgcaccccatatagggaggttttttgtctggagcgtacgaataaccgccagtcctcccatactgtgacctaacaggaaaataggcaaatcatatttttgcgcttcacgtacccattcttccacttcatacacatattcatcaaaggataggatatgtcctcttcttcttgttgttaagccttggccaggaaggtctcccataattacgtgcattccaaccgaacgccacatctcaatcagccagcgatagcgtccgtgatgctccgctgctccatggaccatgacaataacgccttttggatttactgcttcccatttatgcatttgagttactccttcttcctttttttgtttacctgcttaaaaaacctttgtacacttacattagaagatttactactttttttcaactaataaagggagatgatttgatgatttatccgtataaagaaaaaatgcctaacattgcacccagctgcttcatcgcagactatgtcacgattactggagatgtcaccattggtgaagaaagcagcatttggtttaacactgttattagaggagatgtttcacctacgattattggtaaacgagtaaatatacaagatcaatcaacactccatcaaagcccaaatgctccattgcttattgaggatgatgtgacagtaggacatcaagttattttacatagctccatcatccgcaaacgcgcgctcattggcatgggttctattattttagacggtgcggaaattggtgaaggtgcttttgtcggtgctggaagcttagtgcctcctggtaaaaaaataccacctaatactctcgcaatcggccgacctgctaaagtgatccgcactctgacagaagaggatttaaaagatatgcagcgcattcgtacagaatatgtagaaaaagggcagtattataagtctattaagaaatctgattcttcattataaaggaaacgttccctcagaaagtcatactgagggaatttttttagtatctccacaaactctccaatcatgttctattctctccacaattgtaaagaaatttccatattaatttacatcgttttagtactgcctccacaattaaagattaaactgaataataaagacgtatttattgaaaagggagcgactctatgaaagccaagttaattcagtatgtatacgatgccgaatgccgattattcaaaagcgtaaaccaacattttgatcgaaagcacttaaatagatttttgcgtttactaactcacgccggaggagccacttttaccattgtgatagcgtgcttgctgctatttctgcatccttcatccgtcgcttacgcttgtgcgttttctctagccgttagtcatattccagtcgcgattactaaaaaactatatccgagaaaacgaccttatattcaattaaaatatacaaaagtgttggaaaatccattaaaagatcattcatttccatctgggcatacaacagctattttttcgttggttacccctcttatgattgtttatccagccttcgctgctgttcttttgcctcttgcagtaatggtaggaatttcaagaatttatcttggtctgcactatccgacggatgtcatggtaggtctgatactgggcatcttttcaggtgctgtttcactgaacatatttttaacttaattgataggaggagtactaatgagaattgctttatttacggatacatttgctccagaagttaacggagccgctaaaacactttatcaatttactcagtacgtcaaatcaaagcaaattcccatccaggtatttgctcctgaatttgctcatgatcagtcattttcaacgtatgttcaccgttcgcccagcatgccgtttttcctttatccaaacagccgcttttcattgccaaacgttctaaaaattaaaaagcagctgcaggcattcaatccttctattattcatttggccactccttttacaatggggctttgcggctcctattacgggaaaagattaggtgttcctcttgtcggctcttatcataccaattttaatgattatttatctcactatgaacttgaaaaaatgcgtgtaccactgcaaaaatatatgaaatggttttataaacctgtacaaaaaatattcgctccctctgaagtaaccaaacagcagctagaagaacaagggtttcacaacgtagctatttgggcgcgaggagtaaatcataaattatttcatccccactatgaccgctttgatattcgtattaaatataatattaaaaaaccctacattttaacgtatgtaggaagattagctaaagaaaagaacgctgattttttaatgaaaatcgcacgatctctacctgatcatatccgccatcaaattcactgggttattgtgggagacggccctttaaaagaacaaatgcagcaacaagcatctgagcatatgacatttacaggcttccttgaaggtaagcaacttgctcatatttattcatcatctgatttgtttgtttttccttcagaaacagaaaccttcggaaatgttgtactggagtctcttgcttccggaactcctgtagtggcagcaaatgcaggaggagttaaacagatggttcagcacgggcgaaacggctacctttgcaaacctcactccttagaagaattcagttcggctattacagatttactcgatgatttgcatcagcggcttcactttggccacgcagcgagacaatacgctcttactcaatcatgggacgccatttttcagcatttgctttcagaatatgaaggtgtcgtagaaaaatctgctgcaggtattcaatgggcataaaaaaatctccgttttcacggagatttttttattatttagctaaagcttgagtttttaatgcttccgctttgtctgtgaactcccaaggaagctccacatccgtacgaccaaagtggccgtaagctgctgtttgtttataaattgggcgacgtaaatcaagcattttaatgatgcctgctggacgtaggtcaaagtttttgcgtactacgtctactagtacttcttcagaaacttttcctgtaccgaatgcatcaattgaaatagatactggttgtgcaacaccaattgcatatgctagttgtacttcacatttgtcagcaagatcagctgctacaatgtttttcgcaacataacgagctgcataagctgctgaacggtctacttttgttgcgtccttaccagagaatgcaccgccgccgtgacgagcatatccgccgtaagtatcaacgataatcttacgaccagttaaaccagcatctccttgaggaccgccgattacgaaacgtcctgttgggttaatgaaatactttgtattttcatcaattaactcgtttggaacaactggattaataacatattcttttaagttacgttgaatttgctctaacgttacttctgggtgatgctgagttgaaataacaattgtatcaatgcgaacaggtttgttgttttcatcatattcaactgttacttgtgttttaccatctgggcgaaggtaaggaagaatttcttctttacgtacttctgttagacggcgagcaagtttatgagctaatgaaattggaagaggcattaattcttttgtttcgttacatgcataaccaaacattaacccttggtctccagctccgattgcttcgatttcttcatctgacatttgaccttcacgtgcttctaacgcttggtctacaccagcagcgatatcagctgactgctcgtcgatagatgttaatactgcacaagtttcagcatcaaatccgtattttgcacgagtatagccaattcctttaattgtttcacgaactgttttaggaatatccacgtaagtagaagttgtaatttcaccacttactaaaactaaaccagttgttacgcttgtttcacaagcaacacgagcatttggatcctttgctaggatagcatcaagaattgagtcagaaatttggtcacaaattttatcgggatgtccctctgtaacagattctgacgtgaacagacgacgttgtgttgacatcagttttcctccttataaatacgatacattgtgatacggtactcattcccttattttcattacacgttaaaaaatataaaaaaacctttccttgtatcgaggaaaggtatcaaattctacataagcctttcactcttatcgatcaaggttgtgcccttgcatcaggttagcaccttatcgtctacacaaaaaaatgacgatggttgctgggtttcatagggcctgtccctccaccagctcgggataagagagtatccgttcaaggacatataatacatgaaaaagcgcttcactgtcaacaacattcaaatggaaatcatctctttatgtttgaacctgttttaatgtaacatactcaaattctgaaatagtacatcttattaagaatcatcactaagtttggttaataagacagatcaaaatgaggctttcacttaaaaccgcttcacttttttcgcttttggcacatatacatgtgtctaaaataggtataacgtacatttttttataatacacaaacatttttaattaaatagtatagaataattgaataaatgtgttatactaattataaatttcaaacattaatgaataaataatagctaaaaaaggaaggtagtgcacatgagtactgttgatatgtctatcgaattaaatggtttgcttcaattaaaaacaacaaaacaccaattatctgttccacaacttgttgaaaaaattctagctcgacgcgaaggaacgctgacttctacaggtgctgtgtcagtcgaaaccggaaaatatacaggtcgctctcctttagataaatttattgtaagcgatgctgtgtcttcaaaaacggttgaatggggacctgtcaatcagccaatttctgctcagcgattcgatgcgctatacaaaaaagtcttaacccacttaaaaaagcaggatgaactttttgtttttaatggatatgctggagctgataaaaagtatcagttaccaattcaagtagttaatgaatttgcatggcacaacctattcgctcagcagttattcattcgcccttcagccgaacaaaaaacaaatgatgatgtgaagccgtttacaattgtagcagctccaacgttcaaagctgatcccgaaacagacgggacgaattctgaaaccttcattattctttcgttagagcgacgtattgtgctaattggaggaactgaatacgctggtgaaatgaaaaaatctattttctcagtgatgaacttcttgcttcctcaaaacaatattctatccatgcactgttctgctaacgtaggagaagaaggtgacgttgcattattctttggtttatctggaacgggtaaaacaacgctttctgctgatgcaaaccgtcgtttaatcggagatgacgagcacggttggtcaagctctggtgtatttaatattgaaggaggatgctacgcgaagtgcattcagctttctgaagaaaaagaaccgcaaattttcaatgcaattcgcttcggcgccgtactggaaaatgtggtgttaaatcaaaatacgaaagtagcagattacaatgataatagtttaacagagaatactcgtgccgcttattcaattgactctattgataatacggtattgccaagcgttgctgggcaccctacagctattgtctttttaactgctgatgctttcggcgtcttgcctccaatcagcaagcttacaaaagaacaagcgatgtaccattttctgagcggatacactagtaagttagctggaacagagcgcggcgtaacatcgccacaagctactttctctacatgctttggtgagcctttcttgcctcttgctccaacaacttatgcagaaatgctaggaaagaaaatcgatgaacataatgtaaatgtctaccttgtaaatactggatggaccggcggtgaatacggcgtgggcgaacgaatgaagttaagttacactcgagctatggttcaagcagcccttgaaggagaactagctaataccgaaacagtaacagacgctatttttggtttatcgattccaactcatgttccgggagttcctgatgaagtgcttcagccttctaaagcatggaacgatgcaacagcttataatcaaaaagcaactgagcttgctgctaaattcaaagctaatttcaagcgttttaatgatgtagcatctgacatttcaacattaggcggacctagagtctaataaaaaaccgatcgtcttagagacgatcggttttttaattagtcgaatgtaattttgtcagttcatatgtgacaatggttttttcctgctccatttctaccttacgcacaacagcagttccaatacattctccagttttcgttttgtgaatgtttaatggaatatctaacggatacaagcgatatccttttttctcaatttgaaaaatgttatccgttacacgcttttcgttgccttttgtcacaatcattgtatttaattctagcggcatccccattttttctcactcctcactgttattctacttgttttctctatcgtagcatatcttttattgcgctttcatccacttcgttaacttcttcaccgtttctcggttttcttttggtggaaaagcatgtggaaagttttcgaagtaccagctggtaacttttttattggacttctttagtttagattcgagctgataggaatgatcaatcgacacgtttttatcttctaaaccatgaataagcaagaccggcggctcgacgagatgagcacggtgcaaaggtgtcctccattcgtatctttcagggtatttagaaggagttcctccaatcacccgcttcatcattcttcttaaatcttctctttcttcatatgtcagcaccatatccgtgacgcctccccataacacaagagagcggctgtcgcttttttcaatagctgtgagtaaagccattactccccctcttgaaaacccaaaaatatgaatgcggtcatggtggacgttagggagctgtttcagtaaatcgtaagcagcaaaagcatcgtaacgatcatctcctgcaaaatcttcatttccttcgcctccttgatttcccctatagaacggagccatcacaataaaaccttgagaagcaaattgaataagtcgagcaggacgaaccgttcctacgttcttaatacctcctcttaagtataaaaagccgtcatacattcctttttcttttggctctgcgagcattcctttaatcttaagcccttgacatgcatatgtaatcacccacagcgccacgcgagggtttgatgatgggaaacgctgtttatgaagaattgttccatctttcatttttttcctccattctttatatgagtggtatattttttcccgccacggtggactttcaatcgttgtctaatacttctttgattttccacatggttatgtaggcactcaccttcttctactttcttacatacattatcataaaatattttattcttttaaggaggtttgctttatgaaaccaatcaaatggctcttttctttgcttgctattatgattttactcatcccactaattagctgcagcaaaacaacatctgtacaaacggttcgtgtcggcgaagtaactcgctctatcttttatgctccccagtacgttgctatttcaaaaggcttttttgaagaagaaggactaaaagtagatttaaaaacaacgtggggcggagataagacaatgacgtcacttttatctgacggcatcgacgtcgccttagtcggctcggaaacttcaatctacgtatatgcacagggatctagtgatcccgtcatcaactttgcacaactaacccaaaccgacggaacatttctagtagcgcgtaaaaaggtcgatcaattctcatgggatcagcttaaaggcaaaacgtttcttggtcaacgtaaaggcggcatgccgcaaatggtaggggaatatgtgttgaaacagcataatattgatcctaaaaaagatgtaaaactcgttcaaaacattgattttgctaacgttgcgaatgcttttgcttctggtactggagattacgttcaattatttgagccaacggctagtattttagagcaacaaggaaaaggacatatcgttgcttccttcggaaaagaatcaggaacagttccttatacaacatttatggccaaagaaagctatttaaaagataaccctgaagcagcagctaaatttactcgagctatttacaaagcacaaaaatgggtgaatacacatagcacagatgaaattgctgaagtggttgcaccgtattttgaagatacacctaaagacacgctaaaaaccgtgattgaccgctataaatcccaaaaatcttttgcaactaaccctttattagatcaaaaagagtgggatcatttacaaaaaatcatggatgaatctggagaacttccaagacacatcgatcacaacaagctagtcaacacaaaattcgcaaaagatgcaatgagtgagtaatatgacaaaacttcacattcaagatgttcagcatatgtatcttacgacaaagtctgctaccactgcacttgaacatattaatttgtctattgaagaaggagaatttgtttcctttctcggcccaagcggatgtggaaaaacgacgcttctatcgattattgcaggcttgattgaaccaacgtccggctttgtcacaatagacggtgaaaatattggaacatcagtcccaaatatcggttatatgcttcaacaagattatttgtttccgtggaaaaccattaaagaaaatattttacttgggcttgaaattcgcggacagctaacagataaaacagagaataaagcactgttactcctaaaagaaattggtctacaaggcgtagatgacctatatccacaccagttatccggaggcatgagacaacgcgtcgctttagtccgaacacttgccattgaccccgctattttactcttagatgaacctttttcagcacttgattttcaaacaaaactcaagcttgaagaacttgtctccaaaacgctgatgacttatcaaaaaacggctgttttggtcacgcacgatatcggcgaagccattgctatgagcagccgaatctttttattctcagccaagccgggaaaaatcgcaaaaacattcacggttccttctattttacgaaccctttctccgtttgaagcacgacagcaccctgtctataacgatttatttatggacatatggaaggagcttgatcaacttgaaacccactagctccctagatactcttcacgaaagctaccttcgcaaggttcggggcgaaaaacgattagtactgagcgtgcagctggtcatgttcttagccttttttagcttctgggaactggcttctcgtttaaagtggattgaccctttaattttcagttcccctactaaagtatggcatttatttttaattaaacttgccgacggctcgctggcagaacatattggttttacattatttgaaacggttcttggcttcattctaggcacattactaggtattttacttgcaacggccctttggtattcaactaggcttgcacatatattagatccttacctcgttattttaaacgccatgcctaaagtagcgctgggccctattttaattgtagcaatcgggccaggatttttctcaattttaacgatgggagcgattatatccgttatcattacatccatcgtcgtttacacagcctttaaagaagttgatccaaactatattaaattactaaaaagcttcggggcaacgaaaacccgctgttttaaagaagcaattcttccagcttccatgcctgccattatttccacatttaaagtaaatgtcggcttatcttgggtaggcgtcatcgtaggagaatttttagtttcttcgaaagggcttggatatatgattatttatggtttccaagtcttcaactttactcttgttcttctcagcttattattaattgccattttcgctacgattatgtaccaaggcgttgcttatttagaaaagaaattgatccgacgctcataaaaaatccccccgtacaaacggggggatttttattgatacgatgcttttacaaaaatgttctctttacatatttcattacatattgtaaaacattatctttcatgatgaagctgtatgcatcatcttgttgaatgcccgaaggtagttcatcaatcattacgggaccatctgtttccatgtagtcttcttttttaattacatttccaatagtagcaaaataaatatttttaataatggtctttcctttacttactactttgtactgaccaatataagttaaagaagagacttctccgcctgtttcttcaaatacttctcgaaccgctgcttcttctggtacttcattgccttctagttttcctccgggaaattctaaacctcgttttgagtgattcgttagcaaccattgattttcatacctgcatacgacccaaacatgacgtggagttttcgagaatggatttttttcaaatgataaaaatacttgattatgatatgcatccttaaatgtgtacatggtcgactcaaactccatttgatttttcccttattttatcatacattacgaccatacctgataagaaaagtatgctcgtactttttttatttactttttaccccttattccactctgtctgaagataaaatattcatctgtttgatatgtgattttgtttcatcgtctcccagctgataaagcatggcatatatgtcaactgttgttttatcgtacatatcattttgagaatcatgatgatactccagatacggaatatgtgatcgccaaaagcttgaccaatcgcttgaagcgcgctgatctaaataggttctcagctgctccacttcttcatctgttgcttcaatcgcataattccaatctgaagcagtatttgactgattgatttcccctgaactcagagatacataatatttttttgtcatgaaagatattcagctccttctttctagtgccaacttatctttcttatttgtatcttattctttttttatacactctaagatttaaagcggtcttttaaaatcgctattgctttttttaacggctctggaatcggaacccctacaattcttgcgttttctgtaattgaaatcatttcgtttaaaatatagaacaaaatagctccatctcgaataatatgaccgttttcccaaaatacagaatcgataaagtttgctacagcaatcatggcaaaaataaaaatctttttggcaattcctttaaaacctactttgctagataaacgtttatttataaaagctacaatcgtgcctgtcaaataatccattgtcactaatgctactaaagccattagtaaatagtcccactctccaaataaaaaaaaagccagtgaacctaaacttgagattatcaagacagaaagcttctgcatatccacttttttcaccctttcagcagtcatatccctacagtatatgccggtgaaaaaaaagtgttcgtccatcttatcataaaaaaacctgcgattactcgcaggttttaattatttgcctaggaatgattttaacatccacgtatgcttttctaagctttgatgaatggctaacagcatgtctcctgttgtttcgtcgcccgcttcaccggctgcgtccattccttcttttaattctgcagttagcgtatcaaaatcgcttactaaagaagcaaccatatctttagccgtttcgcttccatccgcttctttaatagaagaaagttctaacgattctttcattgttgccacaggttttccttctaatgctaaaaggcgttctgcaaggtcatcaataattgtagctgtttccgtatacagctcttcaaacttttcatgaagagtgaagaattgttcaccttttacgtaccagtgaaagttatgaagttttatgtacattacactaaaattcgctacttgtttattaacgatttcatttacatttgctgccatgtttttcgctcctttgtgaactctttgtataatatagttgtacccttttttagttgattaaaacatttttttcataaaaagagacatttccctttctttagactcagaaaaacttcttcatcttttttcaaataaaataagcagtccagcggactgcttatttttagccaaatactttttctaaatcttctttgtcctgttctagccagaacttcatcaagcgttttgctccttctaaatcgtgaagtttcgcttgaccgcactgcttttcgtttgctgctggaatttcagtaatgttaattgcatcttttaacgtatcgtctaacaagtcaataatttcacgtacagtcggctcgccgctcactactaagtagtacccagtttgacatcccataggcgaaatatcaataatatcaaagtgatcatatttttctacatgagtacgaatgttaaaagctaataaatgctctagcgtatgaataacgtccggcttcattgcttgtttgtttggctggcaaaaacgaatatcaaatttatttacaacgccgtcgcttcccactttgtgaacaccgcagtgtcttacgtaaggtgctttaaccgcattatgatctagctcaaaactttctactgatggcataataccactccttttttcttctttcacctatcataacatgcaattccgatatatttcatccatttaataacctttatttcttttagttgctttttattccttctatcccttatagtatgagcaaacacgaaagaaagaacgtgataataaatgattgcaaagcttttgcttttacttataaaaggatatcaaaaaggaatttcaccttttcttccggcaaggtgccggttttaccctacttgctcccagtacggagttgaatccattaaacgctttggtgccttaaagggatcttatttgactgtaaaacgcattttaaaatgccacccgttccatccgggtggcatcgatgaagtacctgagaaaaaatcacactaagctttagttgttttcgattgcttcatacccatttacaacaacatctagctttcctgtatttggatcaataactagtccatgtacaggagtatcttttgaaaatagaggatgattacggattgtctctacactatgctgaacagtctcttctactgaatcaaaacccgttaaccattgtttcaagtccatagaatattcaatggtattaatcacttcatctgagatgccttttgctcttactttctctaaaaaaggttccgcctgaagtttacctgctccacagtcgtggtgaccaattacacatacctcatctgcttgaagctcatatacagctactaaaatgcttcgcataatacttccaaatggatgtgaaacaagcgctcctgcgtttttaacaattttcacgtctccgttgcgcaaattcaaagcgtgtggaagtaattctaccaatcttgtgtccatacacgataaaataaccatttttttatcagggaatttgcttgtttcgtaaagttcatacttcttttcttctacaaatttttgattgaattctaaaacatcttgtaataagctcatctgctgtcttctccttcataaaaaaaattctttcttgtattataatactttttcctataagatgaaaagtgttaaatcgtaatcattattatttacaaacaagaaagtaggttataacagtgaaaaaaattcccgttaccgttttaagcggataccttggttcaggtaaaacaactcttttgaaccatattttaaaaaataaagaaggtttaaaggtcgcggtcattgtcaatgacatgagcgaagtaaatattgatgcagacttagttaaacaaggcggattctctcgaacagaagaaaaacttgttgaaatgcaaaatggctgtatttgctgtacgcttcgagacgatctaatgaaagaggtagaacacctagctgacaatggtgatattgattatattgtcattgaatcttctggaatcagcgaacctatccctgttgctcaaacatttacttatattgatgaagagcttggcattgatttaactcagaaatgttcgttagatacgatggtcactgtagtagatgccaatcgcttttgggaagacttttcatccggcgaaagcttattagaccgcaaagaaggaacagatgaaaacgatacaagagaagtgattgatttattaatcgatcaaattgaatttgcaaacgtcattttgttaaacaaagttgatttgttaacaaaagatgatgcagatgaactgcaggctgttcttcacaaattaaactcagaagccactgttatccaaacaattaatagtgaagtaagccttgaagccatacttcataccgacttattcgactttgaaaaagctagtcaaggagccggatggattaaagaattaaatgaggagcaccatacgcctgaaacggaagagttcggtatttcttcttttgtatacagaaggaatcgtccccttcatcctgaacgctttatgaaatggttagagaactggccggttgatattgtacgtgcaaagggatttttctggcttgcttcgcgtaataatatggcaggacttctttctcaagcaggtacgtccattatgattcaagcagcgggtgaatggatagcaacttacgcaccggaagaaagagaacaaaccttaaaagaagagcctgaattacgagcaaaatgggatgaacaatttggagatcgtattaacgagcttgtgttcattggtattgatatgaacaaagctgaaataattgaaactttagaccgctgtttgctgacaaatgaggaaatgaatcaagattgggctactctcaaagatccccttcctaagtttacagtaagtgcgtaaatttttagttttcaaatcgtaataattacgatataataacatagatcataaatggttacgatacgaacggaaggagcaacataatgaaattcaaaccacttttaatggtgcttgcattaggaattggaacagctcttgcagggtgcagttcaagcagtgcaaataacgcatctgataataaaaacaaaaaattagaagtttatacaacaatctaccctttacaggactttactgaaaaaatcggtggaaaatatgtagaagctaaaagcattttaccaaccggtgtagatgcgcactcatttgagcctacaacaaaaacaatggtcaaaatcgccaacgcggacgcatttgtttactcaggaattggacttgaaggttttgcagataaagcacagtctacacttaaaaatgaagatgtagctttagtagaagctgcaaaaggaattaaattagcaaagagttctgaagatgagcatgcccacgaagacgaacatgcccatgaagaagagcataaccacggagatacagaccctcacgtttggcttgatcctgttttagctattcaattagcagaaaatattaaagacgaacttattgaattaaaaccagataaaaaagcagagtttgaaaagaacttccaatcgttaaagactcagcttgaagatgtggaccaagagttaaaaacaacgattggcgacgcacctcataaagaaattttagtatcacatgcagcctatggctactgggaaaaacgatacggcttaaagcaaattagcgtagcgggtttatctcctacaaatgagccgtctcaaaaacaattagaaaacatcgtaaaacaagcaaaaaaagaccatatcaaatactttatctttgaccaaaatttaaagcctaaagtgtctacgcttgtaaaaaatgaagtgggagctcaagctttaacacttcataacttagagtcattaacaaaaaacgatgttaaaaataaagaagattatttctccattatgcaacacaacattgatacgttgaaaaaagcattatattaataaaaaaactagcctcccggctagtttttttattgtaatttatatttttgcttaaagcgttctacacggccgcctttatcagcaaatttttgttttcctgtataaaatggatgtgtatccgaactgatttcaacttttaaaagcggatatgtgttgccatcttcccattgaacggtctcatttgattgttttgtagatcctgataaaaatgatgttccgctatttgtatccataaatacaactttacgatagtctggatgaatatttgttttcattaaatatctctcctttaaaacaatatacacttattataatcgtaatgattactattttcaagttatatgttttaccaattctgatgcataaagcgtggtaaaaagtggacaataaggtttatcaatactttactggaaaggttgaaaaatgaatggatcatttagttactgcacgttcaatgtttggtctgaacatgggagtacatatcatttttgccactcttggcgtcggcattcctctcatgattttattggctgaaattctttactacaaaacaaaagataaagattatgaacttatggcacagcgttggacaaaaggagctgctgtcctgcttggagtcgccattcctacgggaacgattgctggtgtacaattagcgttgctttggccgggttttatggaaatcgtaggaaaagtgatggctcttccctttcaaattgaaatttatgctttctttattgaggctctgtttctctctatttacgtatacgcagcggaccgtatttctcgaaaaatgaggattatcagtctaattttagtagcaataggcgctcttgcctccgccgttttaattacaaacgtgcatgcatttgaaggaacacctgctggctttcgaattttaaatggtgaaattgtaagcgtagatccttgggcagctttctttaatccgagtttctttgtaacgtccggtcacgtagccgtttctgcttatacaaccggaggctttgtcattgcttcagttgctgcctttaaaatgcttcgtgtgcgaaaacataatccaagagaatataaatttcatcataaagcgttgatgatgggattagtaatcggcgggattttttcttttgtaacagctttgaatggacatgaatctatgcaaaaagtatatgaatatcaacccgaaaaacttgcagcagctgaaggtctatttgaaacgaaagatcatgcgccattagccttaggcggatttacagatgaaaaagaacagcgagtcaagtatggaattgagtttccatggatgctcagctttttgtcgggtaatagctttaatacagtgattactggactcaatgacttccctagggattattggccgccgctttttgtacataccttgtttaacggtatggtcattatcggatcgattttaattttagtggcgctagtgggcgttgtttggtacaagtttttaaagaagaaaagcttccctaaaattttcatgtgggcatttgtcgcaacaggccctcttgcgatcatgggcattgaattcggatggatttttgcatgtacaggaagacagccctgggtcatttatcgcatcatgcgtacatcagaagcagttaccacttctgctaatttgcatattttattttttttatttttgcttgtttatatcgtacttgtggctgcagtcgcccttgtactggtgttttatttcagaagaaatccgctttctaaagagcttgctgcgcaagcagattaaaaaggatgtgagaatatgggtgattcattactagcaattactgtaatatggggcttcatttttatctatgccgtaatgggaacgatggactttggagctggcttttggtcgatggtatatattaatcgtacgaaaacaaatgctacagatgtagcaaacagatatttatcgcctacttgggaagtaaccaatgtatttatcgttgcgattgttgttgcgctgtttagttttttccctcgagctacatttacgcttggcacagtgttactaatacccggaagtaccattttacttctcttatctattcgaagcggatttttagtgttttcacactatgctagcagcttcaaatatcggagagcgttggtttatatatccggtatatccggcgtgttaattcctgcttttttaatcgctgtactgccagtaagtcaaggtggatttattgatataattgatggcgcgcagcgattaaatttagcaaaagtattttcaagtccgcacgtctattcatttatcggatttgccataagctcttcgctgtttctatcgtctctgttattagcggattactcgaagtcatctgacgaaatggaagcttatgcggtctatcggcgtgatgcgctcattacgggacctctttccctgctaatggctatctttattatgattacaatgcaatcagaagcaagctggttatatgataaaatgatgcagtttaagccccttctttacggatctgtaggtctatttgtagtagctggtattgctctgctgctaccttctcaaaaaggaaaaggcatgcctcgtttagccgtggtatccattatccttcaatatttcttagcaagttacgtatacggacgaagtcatttaccttatgttgtctatccaaacgtaacgattgagaatggatttacacatcccgatgcgtttcattctttatttattgtgtatattgttggctttgctattttatttcctggattcttttatttctggcgtctatttatgaaagataataaagaatacagcaaaaagaagccatattaaaaaacccggtcagcacttgaccgggttttcttatgaagcagccgattttgctactacttcagcaaaacctttagcaaataccttacagttttctacatcttctccaaagggagagagctcgattttcaaaccgggaacggctatatttccgttacgtctctttattttttcttcaattaaatcaactgctccgcaaaaaacatcatatgatgaatcacctgagccaaatacagccatctgcttttgactgagatctatatcatccatttcatcataaagatctaaaaaatcatctggcagctctccatctccccacgtataggctccaaagataatagattctgcggatacaaggtcagaagcatcaatgtcatacacttctgctcgtttcacatgcaatccatgcttgactaattcttcttcgatcaaatcggctatcgcttctgtgttacctgacatactcgcataagctagtaagatttccttcatgtaaatgacgctcctttacaccagcagtgttggccgcatatccccttcttcagcgcattctcgttgaagaggacagttttcacactcactggatgcataattcttttgaaaatgttttggttccattaacacacttttgacaatatgtagttgaagtatggctttttgataatcgtctggtgcaatatgataagttgttgtttctccagttaataatgaataaaaacgaatttgttcaggaacctttttaaaagcttgtttcgaaaaaacgataataaagtctttcattgcgtttttcactacttcatcgtcatctagaatgaattttgttaccgtataagacttctctgtccatgcagcaaaatcaatggttagagaaaggttgctttgaatttcttctacataaacgctgtatttctcaaacacaaaaagcggtagttccacatgtgctttctctcctaaaaaccttagtaaataatcgcttactttagctaacacatcgtaatagtgaacgggtgatgaaaacatatttggctttacgcgccaatatttttcaataagctgtaaaacatagaggtttgagcgatactcaactggcttgctatagtatgttttaatgatttgatggacagttacttgaacaagctgtttccaatctatagatttttttttcaaaagaagctgctgctgataaaatttgtacggacatcgaataaattgttcgatgtggtcgttagagagtgtctttatatgcacttttatcggttccacctatgtctcaccaccctaattgaaatccattctcaataataagtaaaaattaaatcatgaaatttgctcaatcactttacgaatagcactccatgaatgtttgacgaaataaatcggttttttttgtttttttgctttctctttaatgacttttgccatattgtgattaataaaatccgtaataactaatacaaacccaatatgttcgggtatttctcgcttcaccatattgcttttacggccatctaaatgaattacttcattaaatccttctcccgctaaacgatctgtaatatgctttaacctgtctcctcctacaaccataactgatgacatgtttgttccctcccaattaattattcatttaatgatttgacaacaacttgtattctttactatatacacagtttaattgagaatgattatctttgtcaatgtttaattgataaatattctcaattaaaatgaaagtctaccacctttcttataagttagttgaattttgaccatactatagctatcacatacaaaggagggttaacgttggaacaaaacattctttgtgaagtaaataactgtcacttttggaaaaatggaaatcactgcagcgcagaagaaatttacgtggtaagtcatagcggaaaacatgcagcaagcagttatgaaacagactgtaaaacgttcaagccaactgaagcgtaacccgcaaaaggacagcctctgggttgtcttttttctctcttcaagatcataaaaaaggagactaatatgaaaactgaacaactgattcatttttttaaagaagaagcaataaaagcaaatgaacaaacctttccaatctatgtacaatcgtttactcatttatggacatataaatggggaacacttgaaaacattccagaagaaattgatgacttaattaccacacgtgcgttagaacttggacttattcacttaaaaaaagctgactaatcaataaggaaattagtcagcttttgtatttatagatcatcaaatccattcgcatctgatgcttttgtatattgtcttgatttctgttcaaagaaatccgttttccctaaatctacctcttgataagcaataatccaacgaagaggattttcaatcggtgcttctgggaaagcagctcggccgaagcctaactgattacagcgtttattagccatgtattcaatatactgctgcagttctttcatcgtgatgccgtcgaatttttctccgataacagattccgcccattcaatttcaagacgagctgcctcttggaacgtttcaactacaaacgtttctagctcctccgtacgataagctggattttcatttagtacttccttgaaaatcttttcaaataacccaacgtgaagctgttcatcacgattgatatagttaatcatcgtagatgtcgccaccatcttttgatttctcgcaagattatagaagaaagcaaatccgctatagaagaaaaggccttctaaaataacatcatataccatagacttcaaaaagttttcaaccgttgcttcttcgctaaatgctttatatccgtttgtaataaagtcatttcgagcacgaagcttttcgtctgtgcgccagtattcaaatacttcatcttgttttccttttggtacaagacttgataaaacatacgaatacgaatgattatgaaccacttcttgctgcgctaaaataatcattagagcattaatcgaagaatcggttacatagtcagctactttgctagcataatctgattgaatactgtccagtagcgccagcaagccaataatttttaaaaagctctcttgttcgtcagccgttaactgagggaactgcttaatatcttgacccatattaatttcaaacggcgtccagaagttagctagcatacgtttgtatttagggaacgcccatgaaaatcggacgtcatcccagtttagaatatttgagctcttgccgttgatgattcctgtcgaacggttcggagctgtttcgttcattaattctcgttttaacatgcttgtcatcaattattcactccttttaactatgacagctttcacattcttcaatgacttcacttgatgttgaacgtacgtagtaggtcgtttttaacttttctttccatgccgtcatatgaagatccagcagctcttttgctcggatatcattttgcacatataagttgaatgaaatggattgatcaatatggcgctggcgcttggcgttttgcttaatgctccagtgctgatcaattaaataaacggacttataataccagtttgttgctggtgataaatctggtgccgtcaccgggattttatagtttttcttttcctctgaataaaacttacggaaaatcggatcaatacttgcagtagaacccgcgataatagatgttgatgaattaggtgctacagccattaagtatccatttcttatcccattgttttgaacttcattacgcagttcactccacgcttcgcttgtgtatttacgtgtttcaaaataagcgcctgactcaaaatctgagcctttaaataatggatatgcgcctttttctttagctaagttcatgcttgcctgtacggttaagtaagcaatttgctcatataattcatcgcaatatgctaccgcttcatctgtttcccatgctattttctttaaggcaagcaaatggttccaaccaaatgtgccaagccctactgcgcggtacttttggtttgttagttttgcttgaagtaccggcaaatcatttaactcaataacgttatcaagcatgcgtacttgaattggaattaaacgttcaagcacatcttcagttacggctctcgctaagttgatagaagaaagattacatacaacaaaatcgcccggattctttgtaataataatttttccgtcttccgtaatttcctctgttactaccgttgtgctttggttttgcgtgatttctgtacataagttgctgcagtagaccatgccctcgtggcggttttgattagctcggttaaccgtatcacgatagaacatataaggcgttccggtttcaagctgcgaaagcataatgcgcttgaagatctcaatagcaggtactgtttctcttgaaagctgttcattatttacacactcagcgtaacgagtgcggaacgaaccgctgccttcttcttcatcataaaaatcttctaacgaatagcccatcagcgtacgaacttcgtgaggatcgaataagtgccagtcttcacgtgcttctactttttccataaacaaatctggcaaacatacgccagtgaataaatcatgcgtgcgctggcgttcgtcaccattgttcaaacgcgcgtctaagaatgaaaagatgtctttatgccatacgtctaaatatacggcaatagctccttgtcgttgacctagctgatcgacacttacagccgtattatttagctgtttcatccatggaattgttcctgatgatacgcctttaaaaccttttatatcacttcctcggcttctaatatgaccgaggtagacaccaattccgcctccatttttactaagcgtggccaaatctgtattgctatcataaataccgcgtaagctgtcatcgatcgtatcaataaagcagctagatagctgtccgtagctctttcctgcgtttgaaagtgttggtgtggcaaccgtcatatatagactagaaagcgcccaatacgcttcttttactaatgctgttcgattttctttcttttcttgagacatcagcgtcatagcaatgataagaaaacgttcttgcggtaattcgtatacgcgcttatcatgtgatgtcgctaaatagcgatctgctaatgtcaacaatccaatgtatgtaaataaacgatcgcgttcaggaataatgactgaagcaatttcattaatttcttcttctgtatatgtttttaatagttgtttattataaatgccgatttttgttagttcttgaataagctgataaaacgaaccgtacttctcttttttatcataacctcggttgtccgctgcttttcgatatagttcgtttaagtagacgtctgccgctacgtacgtccaatcgggttcttccattgaaatacgctctaaggctgccaaaattagtacgtttgcaaccttttcgtccgtcatattttcctttactgtaacagtttgaataaccttttcctcatacaaagaaaaatcaagctgcgtaaattctttttttaaacgttcaatatatgcagttaattcatgtagaattgtaggctttaatgtattcaccataaatatggctcctctcttcacttcaaaataaaaaatcgctcaccgtacctcagtgagcgaatagaacgaagatagaagaagacactaagtcttttctcaatcctcgctctaccctctcacctcccgaagaagataaaacgacataaaaaaggcaggtctcctgacttatgcttctttttactttaaggccttcccatgatgtttactcacagtggatctccttatttcatcagcattcacagttgcggggacagctttggattttcaccaaattcccttttaagtctttttatcagacacctttttcactggaaaacacaaaatatagtattttattatcgatttcaaaacaacatattgtgttatgttataaacacattatataggacaacttagaaaactatcaacctattttcaaaaataattttgttttttacgataaaactcttcgacttttttcatcaaactattccatcataacatgttttggcacgcttgatggaacaatgtgctctttttaaaaaatttgtcctatttttctactaaacattgacaacctcaataaaaaaaccgtttttcataaaaaaacggtttttaattatttgtattctttttcaaatgctgtgattgttttgataaactttttatcaatatcgtatcctatccccggttttcccttcaccgttattactccggattctacctctacttccggcttaataatatctttttcccaatagcgagacgacgcagaaatatcacctggtatcgtgaaagaaggcagtgtggcaagggcgatgttatgagctcgtgaaatcccggcttctaacattcctccaacccaaagtcttacaccatgctgggcgcataaatcatgaatttgctttgctacggacagtccgccaactcgaccgattttcacgttgataatcttacagcttttttgttcaattgcatgacgtgcatcttcatagctcacaatactttcatctaagcaaatcggcgtcttcagttgcttttgcaacaatcgatgatcaaggatatcatcagaacttaacggctgttcgatcatcattaaattcaattcatctagtttcttcaatgaatcactatcgcttaacgtataggctgaattggcatcagccataagaggaatgcttggaaattcatctcgaatttgtttcagtagctcatagtcagcacccggcttaattttcactttaaagcgcttataaccatctttcatgtaagtctttatttgttctttcattacagaaatgtcatttaagccaactaccactccggcttctacagcaagccttactccgccaattatttcagataacggcttattttgccgctttgcgtacaaatcccatacagcacagtccaaagctgctttagccatgttatttcgctttagaggtttgaatagctcttgaacatcctctggtttttgaagctgctgatgaagaagcgaaggaattaaaaaatcctctaacatatgaaaacatgtctgaatcgtttcttccgtataccaaggagatgaaaaagcaactacttctccccaccctgtaaaacctttttcatcttctacttcaagcaaaatcaattctcgatcctgcaccgtaccatagcttgttgaaaaaggagaaagaagcttcatgtcaattttataaagatgtactttttttataatcatcgattagctccctttctgtatgaaagatgatagtttccggcgtatgattttattagaagccgttcgtggcagttcctctactcgaacgaaatactttggaagtttgtactttgctaaaaattgttgaatgtgtatagataactcttcatctgaaacgtcttcatttgtaacgatgcatgctgccggaacttgtccccatttttcatcggctactcccgttacaccagcctctttcacagcagggtgcttcaataaaatattttcaatttcagctggatatacattttctccacctgaaataatgaggtccgaacgtctgtctaatacatataggaagccttcttcatccactttcccgatatctcctgtatagaaccagccttgttgaattgctttctcagtagcttcaggtttatttaaatatccttttgtgacatttggacctttaacaatgatttctcctgcttcgcttgtctcatttcctttttcatctacaattttcattgcacatggaaataatggtttacctgctgatcccagttttcgcaaactatcttcaggtgaaagcgtaacgaattgtgaagatgtttctgtcattccatacgtttgataaacaggaatttctttactcacacaagactctaaaatagtaagcggtgcaggccctcctcctaaaagcatacagcgaaacgtatacggatatttccgttcctctaactcatcaagcatattggatagcatggaagtgacaactgaaataatcgttacccctttgttttcaatcgcttcatttactgctcttgcttcaaatcgttcttctaaaatgattttcattccgtaaaagacgctccgcattaaaatagataagccgctaatatgaaacaaaggaaccgctataagccagcagtctttttcgtttaatcctaaattaagcgctgaaccaacggaactccaccagtgatttccatacgtctgcagcactccttttggatgacctgttgttccagacgtatacataatggtgaatgtctcctcgagattccacgttttttgaaaacctgtttctgcttctggagaactttttaaagcaggtaaagtaagctgtgtaatggaactttgaaattctctcattaaaaaagtttcatccgcaataagcaacgacacgtttgcatctgttagctgataattaatttcttcgtttgtcaaacgcgtgttgacgagcagtaaccgagcgccaatataagaaaccgcatgtaaaatctcaataaactccactctatttttcatgtataaagcaatggtatcgccttgttttacaccgttaaacgaaagctgctgtgctactttttgaacacgcttatgaagctcttgaaaagtaagagacgtttgcggtgtttctaccgccactcgatttggcgtcaaatatgctctttgcataagcccattaggaatcgtttggcaactcatgaatttctctcctttttatactgattaactaaattaaattgaaaaaacagcctgatgataatcaccaagctgtttcagctgtttaagggaaacgtgggaactgttggaagtctggattacgtttttccttaaatgcatcgcgaccttcttttgcctcatcggttgtgtaataaagaagcgttgcgtcacccgcaaattgctggataccagctaagccatccgtatcagcattaaatgctgcttttaagaaacgaagagcggttggacttttttctaacatctcttcacaccattgaattgtttcagcttcaagctgttctaatggaacgaccgtgtttactaaccccatgtctagtgcctcttgagcgttgtactgacggcataagaaccagatctcacgcgctttcttatgacctacgatgcgagctaagtaaccagagccatatcctgcatcgaagcttccaactttaggacctgtttgtccaaagactgcgttatccgctgcaattgttaagtcacatacaacatgaagaacgtggcctccaccaattgcatagcctgataccatcgcaacaaccggctttggaattacgcgaattaaacgctgtaaatctagaacgtttagacgtggaatttcatcttctcctacatagccgccgtgaccgcgaactttttggtctccgcctgaacaaaatgccttatctccagcacctgctaatacaattactccaatgcttgcatcgtcacgagcataagcaaatgcatcgatcaattccattactgtttttgggcggaatgcattgtgcacttctggacggttaatcgtaattttagcgattccgttatatgtttcgtataaaatgtcttcatactgacgtgctgatgtccattcaactgtcatctttatttcctcctaattatgtagtagctaagaactcacttactattctaccaaaaatctcgggttgttccacgtgaattgcatggcctgtctctaaaataattttagaagtagcatttggtattaatgtttgcatttctttggaaattaaacaaaacttttgatctacttctcctgtaataagcaaaaccggcatcaacagatcgtccagcttctcccaaagggacggctggactcctgttcccattccttttaaactgttggaaaggccgatttctgtatgcgaaagtctttctttacgcaccgcttcttgaacatggctaggcaattgcttttgagaactaaaaagagggatttcctcccaaaagtttacaaattcttcaatcccatttttcataatgcggctcgccagctgttcatctttttcttttcttatcttttgttcttctcgcgtttttaaaccaggcgatgcgctttctaataccaactttttcacaaggtttggatatcgctgagcaaatgaaagagcaagccttcctcccatcgaatatccaattacattcacctgtgatagagatagctgttcaagcagctcatgcattgcttcaacaactgcttccattgaataaggtttgatttttttcggagctgctgattggccatgaccaataatatcaacagcaatcacttgatagtctttagcgaatttcttcataaaggtacgccaagtttgagaagaaccggtaaagccgtgaagcagaagcagcggctttccttttccttcggtgtgcacatagtaagatacaccattcaattgatacatcattgcttattcctcaccgtttgacaaatttatttccccggaaacaagtttccacaaactgcgatgagtctctacattttctttacgaattgtacgaatctctacaacatgcaacccgccttttgcgaaagcatggttcattgcatgtcgaaattcttcccagctgtttgctgaagaaaatgtgccatcatacagacgagtggcatgctcaaaatttaatccagttggcgtaccgaataaaaattcaaagtgcttttcttgttttgactgcggtaaaaatgaaaaaattcctccgccgtcattgttaactagcacaacggttaaatttaaattatgcattttagctgccagcagaccatttaaatcgtgataaaacgataggtcaccaataaataaaacggtgtgatcgtaagccgtgcttacgcctagagcagacgaaaccacaccatcaattccatttgctccccgatttacaaagagtggaatatctttttccgtatttaagaagaaagaatcaatatctcgaacaggcattgaatttccagcaaacaaagccgtgccttcaggtactacatcaacaatttcttgaactacttgtccttcgaaccattcctggccagaagttaatgttctcagagcctgtgcagtttgagtattaatctttttccacagactcagccatgaagtagactcctcttgattcgctgaaagacgcttgatcagttcttcacaaaataatgtctcatcggcttcaatcatcactgttgaacgcaaagtaggatctctccagcctttaccttggtcaactacaaacatttctgtcggctcgtgtgctttcaaaaattgcaatagcggtttcgataccggcatcgcgccaaaacgaatgacaacttccgggtgaaaacgctcatcaaccttatcactttttaaaaatgtatcatatgtctctattacattttcttttgaatgcttgccgcttcttaattgtgataacggatctgcaaggaccggaaagcttaaagattcagctaaacggcatacgctgtctactgcttttaaagacatttgatctccgcatataataagtccttttgttgttccctctaagcgcttcgcaatttcttcgaatcctttttcagatagagatgcttctccatgaatagcagccacatatgatttaccgcgtttcccctgactccataaatcttcaatagacaaatctggtacaatcggttcacgtaaaggtacgttaatgtgtacaggaccgcttggtatagcttgagctgtatgaacagcccttgaagctactgttcgaatataacgattcatatctgcactttcttctggtaaagctgtatctacaaaccacttcgcatattgaccgaaaagatgattctgattaatggcctgcggggcacctatatcccttaactcatgcggccgatccgctgtgataactactaaaggaatgcgtgagtagtgagcttcaattactgcaggataataattcgctgcagctgttccagatgtacatacaagcgccactggttttttctttgcttttgctattcctagagcaaaaaagccggcggaacgttcatcaatatttaagtgcacatgaatatcagggtgctcagccataagcatcgcaataggcgttgaacgtgaccctggactgaccactacttcttcaacatttgcttctactaattcatccacgaatgacgcaatatacgttgttaatgatttaatgtgttccacgcataatccctcctaaagctgaaagcatcgggttgaatttaattcttgtttcttcatattcactttcaggcgtagaatctgctacaattccacagcccgcaaataaaacggcttctttttgctgaataacagcggagcggattcctactataaattcaccgtttccgttgatatccatccatcctaaaggagctgcataccaccctcggtcaaaggattctagctgtcgaataataggcatagcctcctgttgaggatatcctcctagcgctggtgttggatggagcttttgaataaatgaaaatagcgttacatcttcctttatacgccctttaacaggtgtatacaaatgttgaatatgctttgttttatataaacttggcgtacttggaatttctacttcataacaataagaattcatcgcttctttaatcatatgaacaacaacatcgtgctcaattaagttcttaggatcttgaagcaattcctcacccagttcgtgatcttcctgccttgtctttcctcttggaatcgaacccgctaaacaagtggaaaacacataatcttcttgtttttgcactagcctttctggggaagcgccgataaaatgctggtgctctccctctaaaatatatgtgtagctagttggctgttcctttaacagacgctgaagcacgtattcagtagaaatatcttcattaaattttacttttaattgacgagcaagaaccactttctctatagcctgttgcttaattaaagtagtagctctttcaacatttcctttaaatttctctaccccaatttcctctttttccaacagcaaaggtgaaatatgagattccccgtcgtactcttcacaaagaacaagtttttggacctcttcgaaataattgatgtgctttttaacagaatcttgtcctttaaccatcatattaacggtaaggtatccttctttgtctacctgagtatataacacagttggaatcataaattttgaactcgggaaatcactccaatagttttctcgatactgatttgggtcaaatgaaaatcctccaaataaaagaggacccgtcccgtctgggaaaatttgattatttttataaaagtcttcttttataaagcgcttccattcattttcaatgtggaaataacgttcttttgccgcattggtgcaaatagtatgcgcatatcctaatccaacaaatgtataataactgttgggatctttccaaaaaaagcgttctttataaaactggtcatgtccgttcgcataaaaaataagggggtcaataggtcttacttttttcactaaactgaccaattttggctgattttcattttttgcacactcaatcgcatctttaatgtattcttgtactaactgttcggtcgttgcaatcacactacgtccccccgttcatcttttttcttaagtctgtaactaacttattataaactttcagttcaaaaaaatctagcatcgcgattcacgagaaaaaattaatttcgcttgtctaaattatgccttttcattaaatgaatcaaaaatttttatgatctatttagtactccttagacctcaaaaacgttatttttatcatacccttttctataacctttaactttctttaattttccactccttttctctcttagcttcatgaataccccaaatactcctaatatgaatcgtgtttttttgaatttttaacacatactacaaaagcacaataaatttttaagggggagcttcatgacactttcaaaacaagaaatcagtcagttaaaacaaaatttacagcagcagcaggctgatattcaatcgcactttgatcaaaatgatcattttggtctaactcgaagcgacgctcacgatgctgtaggagaactttcaagctacgataaccaccctggtgacacagccacggaaacatacgagcgtgaaaaagaccttgcactaaatgaacatgcaaaacaagagctacatgaaatagaagaagcacttcaggcaatcgctcacagcacgtatggaacatgcaaagtatgtggagcagatatctcgtttgaaagacttcaggctgtaccaactactttatactgtagagaacatagcccatcacaggatattccaaagcacagacctgtagaagaaaatgttctccatcacccatttggtcaatacgactatgacgataccgaaacgacaggatatgacgcagaagattcttggcaagacgttgcgcgttacgggacgtctgaatctccttctgattttatagaagatacgtctaactatagtgaaacctatattgaggcagatgaagctatcgggtacgttgaagattatgaaaactttgccgctaccgatttatatggacagcctcttcctatttacccttcaaaagagcatgagcgatatgaaaatgcactggatgaagaaggtacgatgaccatatttggagatttaccggcctatgagaaagatccatacactgaaaaggagtagttcttcatactactcttttttctatttttagtaggagctataggagatgacatcgaatgaataggagattagaattaataatgaggtgaaaatgatgaatgcacatgaaattgattataaattgtatggagatgacatgcagtttgttgaaattgaattagatccttcagaaagtgttatagcagaagctggaggaatgatgatgatggaagatgatattgagatggaaaccatttttggtgatggttcttcctccaacagcagcgggctgtttaataaattaaaaggagctgggaaacgcgtattaactggtgaaagtttatttatgacggtatatacaaataacggatatcacaaacgaaaagtatctttcgcttcaccttttccaggcaagattattcctgtcgatttagagcagctcgatcataaaatcatttgtcaaaagagctcctttttatgcgcagccagaggcgtatccgttggcattgattttcaaaaaaaactaggaacgggcttctttggcggtgaaggttttattatgcaaaaattagaaggtaatggcttggcatttttgcatgcaggcgggaccattcataaaagacagctgcagccgggtgaacgccttcgtgtggatactggatgtttagtagccatgacccgtgatgtaaactacaacatcgaatatgtagggaaaattaaaacagctctgtttggaggagaaggcatgttttttgctactctgtcaggaccgggaacagtttggattcaatctcttccttttagccgactagccgatcgcgttttatcaagtgcagtttcgccaacgggaggtaaaggtgaaggcagtatccttggttctttaggtgatttcttaaacggggacaacagataaaataaaaaaggtgtagtctttgactacaccttttctatttattgatttaataaatttttagtggagtgaattccccaaatatcagatgcatattcctcaatcgttcgatcactagaaaaaaagccggaatgtgcaatgttcgtcgcactcatttgaagccatttattttcatttctataagcttcgtttactttttgctgtgccgtaacgtatgagtcaaagtcacggagtacatagtattcatcattttgcattaataatgaatcatatataggctcgaataagtcatatgtgtcaggtaggaagccgtttgtaagctgctcgagcacttgtcgaatccgcttatcatgatggtaataatcataggcacggtatcctccattttgctgatagctcaacacttcttcggcttttaatccaaaaataaagacattatcttttcctactgcctcgctaatttcgacgttcgctccgtccatggtgccaagagttaacgctccgttcatcatgaatttcatatttcccgttcccgaagcttctttgctggcggttgaaatctgttcactgacatccgctgcaggaaagatatactcagcaagtgacactcgatagttttctaaaaaaacaacttttaaaaacggtgatgtttgtggatcatgattgacaacatcagctacggaattaattagcttgatgactttttttgcataataatagccgggagaagctttcgcaccaaaaatgaatgtacgaggaacgatttgaaaattagggtcttcttttaatcgattgtacaaatacataatgtgcaacacatttaaaagctgtcttttataagcatgaagccttttaacctgtacatcaaaaatagaattagaatctattttaattcccgtttgctcttgaataatatccgcaagcagctttttacgctgttgttttactgtttttagtccttgtaaaaagcttggatcttccacatactcttggagctttataagagaatgcggctgtttaatccatttatttcctatcacctcggtaataagagaggaaagctgcgggttagcttttaacaaccagcgccggtgggtaattccattcgttttattgttaaatttagcaggataaaactgataaaaatctttcatttctcgttcttttaaaatatcagtatgaatctttgccacgccgtttactttataacttcccacaattgctaaatgagccatctttactaacccgtgcgctaaaatggccatattttcaatccgctgccagtctcctggatatgcttcccataattctttacaaaagcgttcattaatttcttcaataatcatatacacgcgtggaagcaagggttgaaataaatcaatgggccatttctcaagggcttcagaaagagtcgtatgatttgtgtatgatatggtattggacgtaatatgccatgcatcctcccattccattttttcttcatccagtaaaattctcattagctcaggaatcgcaagtacaggatgcgtatcattaatatgaatggctactttttcgtgaaagtttgtaagtgtttgataggtatttcgatgcgctctgataatactttgtaagctagctgacacaagaaaatattgctgtttcaatcttaatattttaccatcttcatgtgtatcatccggatataaaaattctgatacagcctctgtttgacgcttatactccatcacatctttatgtactggaaatgatgaaggctccgcattccaaaggcgaagtgtattcactgtgtctgttttatacccgataactgggatgtcataaggaacagcagagacgggttctccttttacatgacgaaaagagaattttccgtcttcctgtaccatttcaacttcgccccaaaagttcacttcgatggcttgatctaatttgcgtacctcccatgaattcccatgccttaaccactgttctgggagctcaatttgaaagccgtttacaatcttttgatcaaacaaaccgtgtttatagcgaatcccataaccgtggccaggaagattaagtgaagcaagagaatctaaaaaacaagcagcaagcctgcctaatccgccgtttcctaatcctgcatctacttctatttcctcaatattttcaagtgaaatattcagatcacttaatccttcttttacaacttcccgaattcctaagttcaacagattttgacccaatagtctgcctaataaaaattcgatagaaagataatacacttgctttgtatgtgaagacctatgaatttcattggttgaaatccaatcgctgctaatatactctcgcaccatatttcctaatgtatgatagtgatcttgaacagtagattctttaaagctctttccataagtcatttccagcttttttagaaaagcctcttgaaagctttttttatcagagaacaatctgctcaccctttcacgatggagtagatgtcaaatttgaatacaattgattatacttaaatgccgattgcccccagctataatcctgactcatagcatccatcattaattttttccatacatctttctggtgataaaatgaaacagctctttctaacgtatgaagcatgtcatgagcattataattcttaaaagagaagccatttccctctccgctatattcattataagctttgaccgtgtcattcaggccgcccgtttcacgcacgactggaatggttccatattttaaggctattaattgtccgagtccgcaaggctcaaaacgggaaggcattaaaaataaatccgtaccggcataaactttatgagcaagttcttcattaaaaccaataatagcttttacttgttgcgggtacgtatcttccatctcacggaaaaactgctcaaactcgtgttctccagttcctaaaataacaacttgggctcctaagttaaccgtctcatggaaaacgtgcttaactaaatccaatcccttctgctgagttaaccttgtaaccatcgaaataattggaacatccttattttcttctaattcaagatagcgctggagctcttttttatttttatattttccttcaatctcttttaccgaataaggataagatataagctgatctgcgtctgggctataagcttcttcatcaattccatttacaatcccaattaaatcttgatttcgctgacgcaataacccatctaaactttctccgtaatatggcatttgaatttcatctcgatatgtaggacttaccgtggtaattttatcagctgatacaagagcagctttcataaaattaatattcccataaaactcgagctggcttgtagtaaaataataatcatttaaatttaataactcatataaattgctcttagggaaaattccttggaattgcaagttatgaatcgtaaagaccgtctgaatatgatcatacatatcataattagcacgaagtaaaaatggaatcatagccgtatgccagtcgtgacaatgaataatatcaggctcattctctaaaaatgggatagcttcaagcacggctctgctgaaaaaagcaaatcgttcagcgtcatcgtagtgcccatataagctatctcttttaaaataatattcattatcaatgaaaatatatttaacgccatccatctttaacgattcaattccgcagtactgtcttctccacccaacctgcacatgaataactttttcaagaaccatttcatcttgataatgttgaggaatcgttccgtactttggcatgactacacatacgttcgttcctaacttttttaattctttaggcagggcaccagctacgtctgctaatcctcctgttttaataaaaggtacacattctgatacagcaaataatacattcacgacttcatcaacgctccttgggttgttcctttagcaatgactctaggtagacctgactcacctagcaacgtttcattacttcctattttcacatctttgtctaaaacaacattttctaatacactattttctaaaataacgcctttttgcatcacaatgctattcttaacgaccgtaccttttccaattttaacgcctcggaagataatactattttccacatgcccttcaatcacgcacccgtttgcgatcattgagtttttcacaaccgctttttttgcgtaacgagtaggcggttcatcttttactttagtgaaaacaggacgttcgttgataaataactgcttccagacatctggagataaaatttccatacttgttttatagtaggcatctaggctagaaatctcagccgtatatccatggtgctcatacttttctacacgatgagattgtgccatatatcgaaccatttctttaatcgtataaaaatcatgggattcattttgcaaaatattaactagaatagatttattaataatatacatattaagcgatttatcaccctgcttcatttcagtaatatctgcatttgaatcaatatgacgttgcagcacgtgctcaaagtcaactgtacatatcgtataactattcgcaattaatacgtattcctgcttacttcttaagaaataatcaatatgataacggaactgcgtgaatagtgatggactttctaagtgtaaatcacttgtcataggagggaagataaacaatccatctcgcttccgatccaaatcccactcttttcctgaacctatatgatccatcaatgcgcgatagcgatcacgaggaaaaatggcaacgctcgaaattccggagttcaccatattagaaagcgtaaaatcgattaatcgatagcgccctgcaaaaggaatagcagcaatcgatctataaaaggttaaaggctgcagcgctgttgtgtttgtacaagcatcaataataccaagcatttgattattcaatgtcgttcatcctctctgtccgttaaatgcatttagcaactgattcaatcaattcttgagtaacaagaattacttcttcgcttcctttggtcggtcgaataatagtaccgtctggaacttcaatgtccgatggaacaattgcgttttcaatatatacgttagaacctatctttgcagtaggcatgacaaccgttttcttgacctcagaacctgagccgatttgtacacctggaaataacacggactgctctacgtttccttcaacaacgcacccttcatttactaatgactccaccacgcaggcgtttggcgcgatatattgaggaggctgattagggttaacagagtatactttccatgaagagtcaaataaattaagctcgtctttatcacataacaaatccatattcgcttcccacaagctttttacagttcctacatctttccaataaccttggaatgggtatgcaattagctttttcttttcatctagtaaaagcggaataacatctttaccaaaatcatggcttgaatatggattgcgtgcatccatttctaaatattcttttaaaatactccatttaaaaatataaatccccatggaagctagattgtttttaggacgctgaggcttttcatcgaactccattacgtctaggtcactatttgtatttaaaataccaaaacggctcgcttcctcccaaggtacttcaataacagaaatcgttacgtctgcttctttgtttatatgataatcaagcatattttcatagttcattttataaatgtgatcacctgatagaatcagtacgtactcaggatcatattgtgttaaatagtttaaattttcataaatagcactagccgtccctttataccactttactccatctgactccgcgtatggaggcaataccgtgacgccaccattccgtcgatccaaatcccaagcgcttccaattccaatgtatgaattgagaactagcggttggtattgtgttaacacacctactgtttcaatacctgaatttgtacaattacttaaagcaaaatcaataattcgatacttaccaccaaatggtacagctggctttgctagattttttgtaagtgaacttagccgactaccttttcctcctgccaataacatcgctacgcatttcttttttaacatgttgttttctctcccctcgttttctctttgctcgtagtatactaatgccaaacggcggaatattcatttcaatgcaaaaaggttggccgtgaaacgattcatccactgattttaatgcctttttatttacaatgcctgaaccgccgtaaacttcatcatcactgttaataacttcaatgtactctgtctcaactggaactccaactttgtaagaatgatatggatgctcagaaaaattgctaacaactataaaaatctcctgattttctttcgacttacgaataaaagagaaaatttgttgatgatggttgttaacatcaatccattcaaatccatctggattatggtctaattcatataaaggcttgcttctcttataaatcttgatgagatccttcatatatccgttaagattgcgatgcatatcaaaatcataaagcatccaatccaactcctctaaatctttccactcatcaaattggccaaactctccgcccataaataaaagctttttcccagggtgtgcaaagaaatatccatatagcagtcgaagctgtgcaaacttgcgccagtaatcacctggcattttattaagtaatgattttttcccatgtacgacttcatcatgagaaagcggcaaaataaagttttcgttaaacgcatacattagtgaaaaggtcattttatcgtgaagatagggacgtctttccacgccagcttccatgtatgttaaaacgtcattcatccatcccatgttccacttataattaaagcctaaaccgccctcatacgtaggtgctgtaacaagcggccagtccgttgaatcttctgccatcattaatatcgtttcatcagattcaaaaacagcttcattcaactttttcaagaagctgacagctccatcattcactgcttttccagaagaattttgccaataaagcatattagctacagcatctactctaaatccatctatatggaagtactccaaccaaaacaaagcgttcgaaatcagaaaactttgtacttcaggctttcctaaatcgaaattagctgttccccaaacgtagttttcacgatcgggttcttttttgtattcataagtaggttctccatcgaacatatacagaccatgttcatccttacaaaaatgcccgggtacccagtctaaaagaacccctatattgtgttgatgacactcatctataaagttcatcaactctttaggtgtaccgtatcgactggtagcagaatagtatccaattccttgatatccccaggatcggtcgagcggatgctcaatgactggtaataactcaatatgtgtaaaaccttgttcagcaatataaggaataagttcctgtgctaattcactatatgtataaaggctgccatcttcatgagtcctccaagaccctgcatgcagctcgtaaatacacagtggtctttcatatatattttgctgttttttctttctacgccaatattgatcgttccatttgtacccctccaatgagtaaacaatagacgcagtgttcggacgcacttcactgaagaaagcgtatggatctgcttttaattttttttgattgctttgcgtgatgatttcatatttataaatagtcccttgttctaactcagggataaatgtcatccaaataccttcttcattaactttaaccattgaatgttgaaaaccgttccatttattaaaatcacctacaacgcttacaccctttgcatgaggtgcccacacgcaaaatcgtacgccttcaattccttctaccgttacctgatgcgcaccgaaaatagagtaactgcgaaataagtttccttcgtgatacaaatgaacatcaaattcagtaggctgaaccgctagattcacttttgccacccctttaacttcaaacataatatacgcacataatatacgcttcttacctctcattcccttttacagtaaaaacataaaccttttcttttctacaaatataatagaataaatgttctttaaaattactctttatcccatactctccatactttattactttatgaataattccatatgatatagggaaaatcctgcttaaaacttactttttattctgaaaattcatggtaattattcctaactattatttctgtttacttaatctttaaaaaagcgcaaataaaaaaggtttgcatatttgcaaacctttttaagatgacccgtacgggattcgaacccgtgttaccgccgtgaaagggcggtgtcttaaccgcttgaccaacgggccatatttaaatttaaaacgactggcggagaaggagggatttgaaccctcgcgccgcttacacgacctacacccttagcaggggcgcctcttcagccacttgagtacttctcc

SEQ ID NO: 17 - DNA, 104045 bp, Priestia aryabhattai
  source 1..104045: mol_type = genomic DNA
ctggtcttcagtaatgattacaccgtacttttctaactcttctgcttcccttttctttttctcttcttccatcttttttagatattcttgttttgctattattttaatttttgcatattgaataggtttatctgtaaatagttcatatccatttgttatgtatgtattagccttcctttgttcctttttcattcctactgcaaagaagtcttgattatgtaatcctacaaccatgttaaattttcttactatgtctaagtatctatcgattgtcttttcagggattgctaattggcttgataagttgattagtgttacatcatatccttttccaccatgcattttgtcctttgagaagagataagcgtacatatagaaccctttaatacctacttctttctttgtcatacagtacataaacacttcaaatgggattctgtgagtgttttcaatgtattcgattgtaccgtcctcatatccattcatataatcatcttgcatttctggatcattaggatatctattaaatcctctaattggacgtttggctgtgaatttattaggtagcttaacatcttcataaaacgcattatctttccaatctgaaacgtgagtaaattctacttcacctaaccatttattcttgtctaggtgtggtatgtatcgctcttcacctttccaatcagcaagaataggacagtcatttgtagtttctagccatttcaattcttcaagcacaccattttttttaattatgtaatttaatctttcatcaccttttctacccagtatttcttttagtttatcttgagttaaattagcatatggaattgtaccgaatttagcatatctccataaatatgtagtcaaataaatatatgtataagcaaaggctctgtgttggatattgttgattatttttaactcatcaaatatttcatttggcagaaacgtttgtgtctctgcttcattaaattgtaaatactcttttaactctttatatgtcacatggcactaccccttattattttagaatgttatgtatagagaattagctacttattgcttgtttataatcattaattattgcttgcagcctaggtgtcctttcatacatgctgaatagttttcctgttttaatattttcagcaattgtgattactggaatgtttgcttccttgattttttcagctaactttttgttataacagaaaaagaaatccttacttgtcaacattctaattcgctcccttagtttttaatcgatattgagttgtcaaagatcatgagtttaataaataaaattcacattgcaatcacccccttaaaaattccgtaatatcaaccgttctcagctttcattttctagataaaattaaccttttacgcagacttgtaatttacattgcctgacaataagctttcataatgatctaatgtatcaatgtaattatcttcgcatcctaaattgtcataaacatctttcatttcattaaatgcttctacaaattcccacgcattatttttcattgttagttcctccccgaatggtaaactacctataatagtagttagtcgttttttcgtaatctatttattacgtttttagactcaaacagggagttaggcaaaattagttgttgactttgtcgccagcgatgatttataataacgttaacaaataaaactaatacgcctgaatagggtttatccctgttggagcacacataaataggtaacacaaaaagcagcaatgtggtgttgttgcacaacttaataattgatttggtagtaaaattgattcgagggattagtaaaagtttggtagacaattactagtcgtcgctcagaaagtttggtagacagactgagtgagtttatatctcttatcgattttactattttgcgttggtgatttcaatagttttttgaaaattcccaaatattttttcgatttttgtagaataagagtcttcttcgtaaacttcttccatgtcagatacttcgatttcccaattccccactgaaagctccattttctcttcgaagctgtttttcacttcgatagtactaaatgataggttgaagtctgagaaataaatttgagctagtaattcagcctgttcgtaagtgtaagccttaatgtctttcattagagtaaggttcattgttactgaagcaataaattctccatcttcttcaactaactcttccacttccacatcattatggtcacaatatttaaattcaatcattccaccttgagataaaacgttcattttttgattaaagtgtaaattgtaatcattgatgtctgtaaaagctttttgagctgcgtcactcatattcattccattaaccttagtaacaaaatccatttttacctctacgatcacattataagtttttatcattttaaatttccccttttcattacgtatttttaaatttcaaagttctaattatttaaaaaaatatgcatagataggcactgtgttatgtataaaatgtgagtgtacagtgccttcttaccttcaattatccgcctggtgttggttttgcttcgttatgattttgaatttcgttgttatatgcgattcctccacctaaaactaaagcaattgctaagattccaagtactagcttcttcatttccatcacctccttcaaaaagctagtaattagattagaaattaggcgaaaatgttcattaggttgtctaggatcatagagtttgtgttgtaattttttaatagttcttttacatgattcgcattgaacatatctttattttgaatgaatttagtaaatgattggattaacatttgttcatcttgctgtatttgacctacgaacatcatttccattgcagtagacggtttaacatcctttactaattcgatagcttgtgtttgattctgagtgttatatagatacattgcttcacagatttcgtttgtgtaactataacctttaccatgaattgctgataaatattcaatttcgattcttgtttcttctgcattatgcttgctgtacttgctgtatatcttgtagcatttctcaagatgtaacttagacatttcaaaatctgagtatcgattacattcacctagtacaaaatgtgcgaatgctgtgaaacttctaccgattttacttttgattacatatgttgcacattcttgcgcttgctctacattgttcattacatttagttctaagaacgctttagtttctgcaagtcttgcgttgattgagtctttaagatactcattcgttaaattttctactagaggttgtaagtctgttgctaaatcatatgctaagttgtactttcctttgttgaaataaccatacacctctaacatcttgattaacacattgccttcatcagttgttacttttaactgtctagccttttgtatttgttcatctacaggagtcccatcatgtctcatttgccagttgtaaatcagttcgtaaatgcctagatactcttttaattcgtgattgctagtatcattgaacttctttagtaagtagttcatagctttgattaaacgatttgttgagcagtattctaatgcaatgattacgtttgatggcttttcaatttccttgataagtacaagcataaatttcttttcttctttttcagccaaatatctgattagattaagcgatgtagatagggaggtttcttgcttaccgtttaggaatcttgtaattgttggtgaagttgttctgataaactctgctacttctgcctgattatagtgtttaagttctgcttttaaaatttctctcattttccacacctcccattatctgcttgttttggcttaaccttataatacaattattactcaattacgtcaacacgtaattgaataattttataaaaaaagttaaaattaatttcatagtttataaaaaggagtattgtaatgaaggttgagctaaaaacacatttaagagaagtattagataaacgtggattatcccaaaaggagctgtctaaattgactggaattcgagaagctaccatcagtacgcttgcacgaggtaatgtggatcgcataagtgtagatatagtttctcgaatcgctagctcattagagataatcgacattacggaattaattacattagaaaaaattgaagactaatatcaaacaaaaaataaccactccagcttaggaatggttattttaatttatacatgtagctgttgatcaaactctctttgaattacccttttcacccgttcataagccttcacttcgccctgataaaaacatgcactattccaatcttctcttttctccgcatcctttctccacgcatcagattgttcgattaacttatcaatgtggtcaataaacttctttcgttccatttaatcacctgcttttatcataattggaaatatttatacgacaatttgataagtaatatttctagaatttagtgagaatacctgttggaatttgtggcattttattgaacgatctaattattaaatgaactatttacctttacactaaaggttacttactcattaatagtttagtgacagtttaatatctgctaaatctattttaaaacgtagagtacaaattcattaccgtaaaccgtagtcataggcttataagcatcagcagctctatcgaaatagttttcaatgttttggtatttaaataaacctctgttgtataaatcccttgttatttgagtgtaaaatggtgatctatgttttaattcaggataagcatctgttattaatgtgctgatatgtggacttttctcgtagttcggtctattgccatgttctttatagaatctttcagggttattgcaaaaataaagtatcttcaaatgccattcagtaaattcactgacatagtttaaaaacatcattttttcactctcgttgatacttgaccttggtgtgttgtaaacagcattcataagtgccttacgcttatcttcttcatgagtttgcattgctatgttatacgcttttatgaccacagaaacaaactcctcattttctattaatttttcaacttgatacccttcatcctccaataaagaaagcttttctataatttcagacatagctctttctctccttttcgttgctggatcagaaaatattacaccgaacacttctgaaaccgcccctccagctaaaggaattgatcctaagccaccttttaataacgcataagtaatttcttttgccttatctttcattgttatatgctccttttaatttataattcagtaaagctctaaaattagagtgttatttcaatcttccatcttatcgattaatccaagtcctatctttgcaagtaatacacataatataagtccagcaataatcccctttgtttccttttcaattaagaaaaagaatgttaaagcaattggaactatgaagaatacaataagtactaagctgtattttatccaactctttatttctttcttcttatccttagctttgtatatcctatagaacggcattcctatcatcatgccagcgaacactggaaggaatatgatatttattaaactattaagcagataagatatcataacaatccaaatcgcttccaagtatttgacagtactccagctattctatctaattcttctacatcgttccaatttgggtacttatcgaacaattttgacagctcaatccctaccttatcccaagcttctaaaagtcgatcatcttgaattacttccctgacaatttcatccactgcaattgaatacttgctattttttcctagtccatgacaaatacctagtaacatggagaatgatgccatgatttcctctacatagaatgaaaaacgaatgtaatttgattcttccttatcggaaatgttcataagtctattgattcttgactctgtatcatcgactatcaagcttataaagtctgatgtgacagagtcaaacgacattctttctgcaacatattcactccacattctatctgccttatatctaaagataaattcagagtcattcccatcacctgtcactttttctttagagtaaatgtatttactcttcatcatacgatcttgaacgtgaactagctcatgtgatatgacatggatacaaagctttttatggttttcatcttcagatataagcccttcccaacaatccttacttactaatatcgttgagtttgttttgttatctgatattgcattgtctactcttattgccaaacttttctctattctctcttcggactctctatctttaaactctttagcaaatacccattccgatttaacttcttcgacataatcttttgctaaaattatcttgtctaaatcatctaacaataaatgagaatcattgatttcagaaatgataatttctcttattttttctttttgttcattagtaagacttttatcgctaaatataatattcatccatgtatccccttaaaagttcaatagaaaggtaatttacgccttataaagataaacttaccacaagactcggtcagattcaatatatagtattttaaagtcagattaacatctacatgtagaaaagtgtcaagggttatttttcgacatgctgcatcacaataaaaggaaaagctatagaaaaagcattagttgaacttgagttgtatcaggttctcattaatagttgaacctaagttaaatatgcatatgtgtacacagcatctattcaaaacataaattccattccttaaattgagtgtcgagtttcttttggataataccgtaataatagctaaatattgatctcttgattgtgtaaccaagcttgatattaacgatcatttgcttaaatgagttaatagccagttcaactttattaacacttgaatcataatctacgtactgttcagcgaagtcattgtaatgctgcgtagagtgctttacacacttccacagctcaagtacttgcttaggactgtaatagaatttagctaaattttgaaattcaactggtacatttggaattacgttgtccttgtacgtatctattaatatattgttagttttaatatttttgtcagcttttggggctgtcatagattgttcatcgttcccttggtttgatagaatttcagactgcccagtgttgattgtcagggtgtcttttgtagtttgtgagttaaattctttaactgtttcatgcgtctgaaacacccatatgttagctccttgacgattcttatacctgccgtatgtttgtcgtgtcttaatgactttaattagacctagcttcataattttacgtttcatacgatgaaaagttgattcgctaactggcttaccttgtaattctgtagctttcacaattgtttccacgcacgcccaagacacccctgcaacttttgcacagtacctttttaaggcacgaaaggcaatcagttcagattttgttaagtcaagctgattcttataatctgccattgtcatctctatattgtcattaaaactttttagcgaagtaaaattgctatattgtttaaagtgctccgatttcattataaatacccctatctggtatatttggaggcacaatcaaataagcttaaaaatattgattttttcaagcggatattttacactgagagtagtagaatcagtgtatatttgattatgcacaagggagagagtatggttgcagccaagctctctttttttgttttcatttggactatttctgtttacgtttaacaattttctctttatgttcttctaatctctttataggtgcaaactggttatgttgttcaattaacgtactatccagcacatgagcatagactcgtgatgtaatcgatagatcagaatgtccaagtaagacttgaagtactttaatatttccagactgctctaaaaatagctgactggcagaatgtcttagcaaatgaggatgaaagtcaatatctatccctttttcttttaggattctgtttacatgggtacgaaatgtatctggtttaagtggtttcccatgattagtgacaaaaacaagatcagtatcaaacgcttctttattttccatgattaaagtctgtagcatttgacaagttttcttgctgattggcactattctaaagcatttattcttagttttttgaaatgtgatagcccgtctttcaaaatcaatatcactctctgtaagatgcaaaacttcttggatacgccccatcgagtcaaataatgtgtacaaaagtacatatgagcgatactgactgtaataagtttggtcaaaagcatttagtattgttttaatttcctcaatcgatagtgtcttaatttttttcttctgaaatttaatattcttaatttctacgaagacattgttttctaaaagcccttctttaaacaacaaattaaaagcagcacgtaattttattaggtatgtattagcgctactagcttgtacaccttgcctttttatttgtctaatgttgctgttatcatgcaggactttttcattgagttgccaattaaagaagcctctagcatcattcaagtcaatttcatttagcaatttatcatctccaaagaagacttttaaatcattaaagacaattctatatagctggatagttccttcagataaaccttccaatgtcttgacttgagtaacaattcttaagccttcatctatcgttaattggtttgaactagttcttgttcttcttaatttacgtttatttgcagacaaaaaaagacagcctccccactaatacggaaagctgtcttgtttctatcgttaattttatgtcgtgtttttatcagtgaagaattaaaaggtttatttttacagttaaataaagtaaaaccttgtaataccagagctttcgctctacaattcttcttctgctttgtcgtatttgcgttcgtgcgccgtatcttcttcgttatcacgaatggttttttgaagcacaaaagcagacatcgttaagtataatgttccaacggcataataaccttttaccggtaatgatgcatctaaggtataaattcctataaacatagctaatagtgctgtaataaaagctgtccatgctaaaaatgtaaaagctgctgtattgcgctttttcatcatatgacctcctcttttcctttttctgttaagtgtcgtttccattttacattgtaaaataattgttgtcatgggtatttatagtcagttacccttttgatcagaacaagaaacggaagaattcaggtcttaaatcctggtttattacaaagcctttttccaaaatgattggatataacgttcattcgttttcactaagaagtggaaggcgttgcttgtcaggttcagttaacaatttctattgcaacaaaaaaatcatcgccgagacgatgatttttttgtttagacttcaaagtattctttataaaagcccccgacttggccagtgttatcaacaacaaaataaaactcttctgtttcattttttacatcatatgtttttcctgctgttaatacattttcaacaacgaatttttttgcatctgtatgtatgcattttacttgtttgattgttggacgatcgttccattctaaatgaatcatgtatgtacactcctttgttttcattcaagattcattttatctcacttgaagtaaaaaagaaacggagcgaatttaaaaattaaaaaattcgctcatgcactttttttttggcaactgttgcttgtacaaactgtgcagtttgtgcaacaatcgtatctttatcaaaatccatcgacgcaacatggtaagagttcctaagcatgtgctgtcttttttctgctgattgaatatggtttaaaatataagctgaattctcaggtggtacaacgttatcaacagttgacgttagtactaaagctgggcaagttacatgagataagcgctctttcgtttcatccattaaagaaagcagctcacgcatggagcgcactggtactttatcgtacgtaatttcatgtacattttgatctttaatatcgggatgatcttcttttaaataacgaggcgtatggcgagagcgatacggctccattgacggaatggacgtcatagccggattaattgcaataactccgtcaagatctagtccttgacttgctgtatgaaaggtaagagttcctcccatagactgacctaagataaatatgtgacggcattcttgctttaaacgctgatacccatttaaaaagtcttgcttccactcctcgtatgttgtttgttcaatatcatagtagtgagtaccatgtcccgttagtcgcaaaccgtacacagtaaaaccttttttagctaattcttttccgatatattccatactttgaggagtccccataaatccatgagaaacaagtataccaatgtcgttgcctttataataaaaagattctgcgccttgaattacgtcataacgttccattttcttcaccctttaccacaaattttctgactaaatgaactatctttatactacacctataattcctataagtcaactaggttatttagttttttatcattcaaaaaaacgaagcaagaattatctcttgcttcgttctttttgaatgtgtggaaatactagctcagcaaatgtatatgcttcttctaaatgcgggtagcctgataaaataaacgtgtcaattcctagctcttcatactcttttagacgcgcagctacaatttcaggacttcccacaagagcggttccagctccttctcgtgctaaaccaattcctgcccatagattcggagcaatctctagtgaacctcgatcttttgttccgctgtgcaagcttgactgtgtcttttgggctgtggagtcaaatgatgcaaacttatcttgaaacgccttgatcgtatcatcattaacatgtttaattaatttatctgcagattcccacgcttcgtcttctgattctcttacaatgacgtgcagacgaataccaaagcgaatgtatcgaccttcgtttgcagctttttctttcatttcattaattttcgttttgataactgcaggcggctctccccacaataaatatacatctgcgtgctttgctcctacctcttttcctgctggagatgatccaccaaagtacagcggaggatacggcttttggaccggaggcgacggaatatacgcacctgttacatcaagatgttctcctttaaaatccactttttttccttccattacatctcgccaaatcgttaaaaattcatctgttaattcatagcgtttatcgtggcttaaatagttaccgtacgttgcttgctccacgggatctcctcccgtcacaatgttcagcataagtcggccatttgacatttgatcgaatgtggaagccatccgggcggaaagtgttggagacattacaccgggacgaagcgcaattaaaaactttagtcgattcgtgacagaagcaagtgccgatgcaataacccatgaatcttcacaatttgagccagtaggcaacaaagcgccatcatatcctaagtaatcgagcccatgtgcaatttgttttaagtagtgaatgtcacttgttctgcttccttcggttgtgcctagataatgtccgtcgcctgctgtagggaaaaaccataagatgttcatttttatttcctcctaaatataatcgcattctatataaagcgttttcatatgatttgtttcatttttttccgctaactatagatgtgcatttttatactagcgtatgtaataccattctttttatatattaaattagtaaaatcataatacctctttaacctataagtcaagtatgaattaaaataaaaaaacaagaattaaaagtaattcttgcttgctttatttcctcatacgtgaagccatcgcattggcaagggtagattttgttgatatattttcaaacgacaaccctaaatgagaagcagtaatcgcgatttcaggacgtactccggatatagttgattctacgcctattaattttaatgcgtcgatcagctggaaaatttgatgagcaaccatcgtatcgacaatgactacccctgaaatatcaatataaaggtggctcacctgctgctcagcacagcgagttaacgtattttctaggattcggcgcgctcttgctgtatcgatatctccaacaagcggaagaattgcaatatgatcgcttagtggaataactggcgagctcagctcattgatcagctctttgtgagcctcaagcaaacgctttgaatgctgatgatgctcttctacaaatttataaacggtgatatcaaacacacgtacaatcaatttgttccattcgtctagttctccttgcgtaatctcttgttcatgctcttctacaaatcgatttaaataagtcaaatactgctttctaactcggaaaaattctcgaataatataatgaataggcgttcttgcatgctctccgtcttcagcaattttcacaatccacgtttcaaacgaatcaaagaactctttttcacttcttataaatacatcggctatgtatgaatgaaattcattattttgctcttttaatactgaaatgacttccggatgagtagatgcataaaccgattctgggtcattgtcttcaatgctttcataccattcttccgtcagttgatctgcatgttttaaaaaaaacgctcgaattgcttcatttttattcaaaaccattcccctttccatacgagctactaccaacattataattcaactttttcacccttactagttttatagaaagaggagagagaaaattattttttaggtacttatacccagtgattttatgctacattaaagtagctataaaaacgcaaaggagttttcaaatgatacgaacgttagcttttacgaacgatcacaaactcatagaaaatataaaattagatcaggttcacgattcttctattcagtactattggattgactttaactgcccttctgaagaagaagcgctgctgctgcaatcctcctttcgctttcatccgttagcgattgaagattgctttcattttctgcagcgtccaaaacttgattattatgaaggatacagtttttttgtccttcattcgttaaatcgtcaaacgttagaagctgaagaagttgacctttttatcggcgaaaactatatcgttacctttcacttccatccatcggctgcaattgataaagtatgggagaaattacttcatacgtcttcaagtcaggaaaaaggggtaaactatcttgcgtattctgtggtggataaagtggtagatgaatatttccccactgtatatcaaattgaagatgagctaaatgacatagaaaacatagacgctaaaaaatccatctctgttttaatggaagatgtcttcaaactacgaagtgatttactaaaaatcagaagaaccattttgcctatgcgcgatttattgtaccgagttataaattctgaacgcctagatgtccaccctgaacaaaagagatattttaaagatgtctatgaccacttattaaaattagccgatatgattgaatcgaatcgggaaatgacgtctgatatgcgcgataattatctttctcttaattcaaaccgaatgaattcaattatgatgacactgaccgttatttcatctatctttattccgcttacctttatcgttggtgtatacggaatgaattttgaaaatatgcctgagttaaagtggcactatggctatttctttgtgcttggcttcatgggattgatcacgcttggtttaatcctatggttcaagcgaaaaggctggtttaatgctgataaagaataaagcacctcttaagcagaggtgtttttctacgtgatgataactagttatttcccgaaaatatctataaaataacgtgcttatgtttcccttttctataaaaatttcataagatagtgaaaataatgctcagaaaggaggctgaagtagtggatattaaaggcgaacacttgctaatggatgcattcgaatgcgatggtgtgatattaaacgacccctcacttttagaacgttttcttattgaagctgcactagatgcggaaatggaagttctgcattgttattttcaccagtttactccccaaggcattacaggaattctcgtattagctacctctcacttgtctattcatacttggccggaagaaaactatgcttcattagatttttatacgtgcggggacaaagaaattgttgaaattggttatacgttactgaggaaattagcttcgaaaaaagctgtcgtgtattcgatttctcgaggaattcaaaacgccgaaatttcaataaaaaaccgtcagcatgctgatagcactcgtcttcacaatcgcggagatgactcggatcacgttagtctacaacagatcttagccggcaggcatgatattttgtttcatcagaaaaacagcattcaagatatccagctgattaaagcacctgatattcgaatgtatttggataaacagctgcaatttagttcattagatgaacgtgcgtaccatgaagctcttgtacaccctatctttgcagcttccttacgtcctcgccgcattcttattctgggcggtggagatggtttggctttacgagaagtccttaaatatagagaagttaaagaaatagaccttgtagaaatagatgctgacgttgtaaatgctgcgatgaatgtagaagaattaaagaagttaaatcagcgctcatttgaagattctcgtgtcaccgttcatattcaagatgctgttgactacctctctttgaattcagcgtgttatgatattatcattatcgactttcctgatcctaccaacaaaaaaataagtgctctttatacaaaagaattttacgcacttctccaacgttcactatcgcgcagcggcttggtcgtgtgtcagtcaaattctcctagagacacacctatcgttttttggagcattcataagacgatgaaagctgctcagttttatacgttgagctaccacaccattattccctctttcggagattggggttttcacatcggctcgaaaacacctttgtctgcccctatactctctactgatgtttcaattactacgctgccatcagactttactaagttaatgcgtttttctccccattctctttctaaaaaacagtttgcggttataaactctgctgagcacttggttctgcataaaatctttaaaaaagaaggcttatatttgtaaaaaagaaagcttggcttatacattccttttcttttgacatactaaaacagtctcgtcaccactgtgcaacagaaaggattgttatgagaaaaatttcggtttttgttatcttagtgctaactgttattttcccttcccccgcttttagccaagtgaaagtgcctgtcttgatttaccattctattgatgcctacacaggccacggggaaaaagaactgtatgtgacgcctgaaaattttgagaaacaacttctttatcttaaaaaacaaggatatacgccgctaacatttgaaaaatggcaggaactaaagcatgtgaaaaaacctatatttattacatttgacgatggatataaaaataatcttactatcttgcctatttttcaaagagcagccagccctcaatttcatccagcggctacaatttttgtgatttcagattttatcggccggcccaaccgtttgtcgccagcggatttaaaaagatttgttgattcaggatttttttctattcagtctcataccgctactcatccagatttaactaagacgaaaaatttatcctatgagctagctgattcaaaacgaaaaattgaagccattacgagccagcccgttattgctcttgcttacccctatggaaaggtcaatagccgcgtagtggaagaaacaaaaaagaattatacatttggtctttcaacaattccaaaatttttcactgagagcggacaaaagaatgaaaactatcttattccccgtctgtacgtcacgtattctataacgattgaagattttgctaagctattaaaagaaagctaaaaaccctttccttaaaaggaaagggtttttagaattttgttatttccagtcctcgctcttgctgccattcagcataaaaaacttcgctgtattttttaattttcttgattgcaagctgtttttttaaccatttttcatctacgtttgcttctttcaaattaccaggcactacttttccatccatgattaaagcaataggtaaattggtttgagaataagggatatttaaatcatttttcgtcggagggccgaattcgtgtttaggagcgacgctcacctctccatttgtttctaaaatgacgtattctgcttcatacagtgaaaaatacccttgctgtctcatcagatgctgaagctgattcaagtccaagttgtttttcttaagctctttataaaggattttccctttataaataatcattgaaggctttccttcaagaattcctctcaaccctgtaaaggtttgagatagctttgtcactgcgtagatcagaagcccccaaatcaaaacgctataaagaatttcagttaactctactcctttttcaagagctgcatcccccacaatatttcccaggacaagcgttgtaataaagtcaaacggagtgatttgagcaaactgcgtcttacctaaaagcttcagcataataaatagcgctaaaaatccacatatcagttcaatcgcaatatctttatacattgatacccttcctctatagcaagcatgttatagtatcagtttgtatcatatgtgagagtgataaacctgacttttcatttttctttccttcgttctccaattataggacttttgattaagcttttttcttatttgcataggtttctaacgttgcatattgattaaaaatggatgcggctgcttttttccctacatatctaaggtgccatggttcgtatttatagccggtaacctgctcttcaccttcagggtatcgaataataaatccatattgatacgcattttttgaaagccaatgagcctctggtgtatcagcgaagcagtctgctgcagcacacatgccacttcctcccgtgacatcgattgctagtcccgtttcgtgttcacttgttccagggtaggcgctataggtgcgtgcttgttcttcaccgtctcgctttgcgtaaaatgcaaaaagctctttttgacgctcgtgagatcgataaccggatacaccaagtaagctgattccctctttttcagcatcttggaaaagttcttcaagtgcttgtgccgcaggctttctaagcattcgtttttctgttttttcgttgaagataaacggaacgtcggcatagactaaatcggaaggctgataggattcaggaagctgatgctttttattaactaaagccgtaaccgattctggattcgctattaccactgtttcgtctacattagatttcgttaaagatgaagaagctgatgagctttctagtttttgagcctgtccgttttttgtgaattctctggcagactttgatgaagaattgcttgttccgcaccctgctatcatcagcgtaaaagctaaagaacaaataaataaaaagtatttcatgatgtcttactcctttcaaacggcttttgatgcgctacaaaagcctataaagaaaggataaaatataaatgtttctgtctgttattcagttgtttcaaacttgtaaacactcttaaaaaaatttaacgtgtaaaaaaatagaaatagactgcctaagcagtctatttcaaaaagataatatacgtatgaacttgattttgcgtaaagctcgatgcaactagtttatttcctgattgactccaagcaagctgatcagcggcatagtctaaatttacgtttaagtgtgtaacatctcctgttaatccatctgctataaatattcctttatctcctcctttttcagaaataaagttataagctaatttcgaaccatcgggagaccagcttacgccaaaaatttgagtggatagagcaagctgaaaggcctctgatccttttaagtctgtgatagacagcgttcgtgtttgagcatctttttgctgaacgagcgctaattgctttccgtttggagacgggataatagaaaccacattatctcggattttttcagggtccgtctgttcgttatgaagaaaaaaaagctggttgtttacaccaatataataaatgccacctattcctttaactgcatctaagattcgatcgtctctgtgcaacagaggttctgcttctccttttacatttgctttagaaagctttccttccattgtaataaacattacttctgaattattaagccactctccgcttgatggataaagaagaacgttctttattttaactgttttttttgtttgaaggttcattatataaccaaatgtatcttcgccttttgctactttataaaaaagatattcaccattcggagaaagcttggccgcatgttgaatttcattgcttggatgcaacacaaaagtagacttgttttttagattataagtagctagattctgtgcatatacctctttaggaccgaaatcgtgcgaacgaaattgtttattttctttactaacaatcattgcgttttcgtttaaaaattgaaacgcccttacgccgttaatatcctgaacgtctttcacttctatttttccatctttatctacttggtccaatacagtaattttcttgtcgggtttttcaacggtttctctatggctttcttcttgtccgcatgatgttaaaataagaaaagtgcttgctatacatatcattaatctataccgtttcaataacggttcactccttttagctaactcatttctctgttttcaaaggaaacgacactttgaaaatcgtccatttagaatcagaatgatgcagcttgataacgcctttttgcttttcagttaaatctttggctaatgctaagccaaggcctgtacctccggataaacgcgaccgatctttatttacggtgaaaaatggttgaaataatttctcttctgcttcgggtggaatccctatcccggtgttagctacatctacaataatagaattctctaaagtgtaagacgttacttccacttttccgcctggttcattatatttaatagcattgtcaattaaattgataaaaatgtgtattaagctttcacgatcagcccaaacaactgcttcttttatatttgtatgaagagtcaaatcaaatttagctgcttttcctttcatacgatcgcatatgtcttctagaagccgcttcaattcaacttgctctggtcgctgctcgaaatcatatttctcaagcgctgaaagttttaagattttatctaccatttcatgaaggcgatttgtttctttacgaatattttgcacgccgtcttccataagctgaggatcatctcgatacatatcaagtaagtcaacataagctttgatcgatgttaaaggcgtcttaaattcgtggctgatgttaccgataaactgcttttgctgctgttcgagagactgcagtttcgaaatagcgaactcaagctttcttttttcttcattcatttgatcgatatttttttcaatcgacgtactcataaaaaacaagccttgactaagctctccaagttcatcgcgtcgtttgaacggcacatcagttaaataatggccttttcgaatctgctgtgaagttttttgaagcgtagcgatgagcgaagcaatgcggtaaaaataagcgtagccaattaaaaaagctgctgctgctgcaatcgttcctcccatacgaaataagtgcctaatgtcagctataaactgctgattattttttagggaatggtcaaaacgaatggctccaataaattgattatcgattgacacaggtgcaaagtaaataagggaagaacccgagatttgataggctatttttcctttcaaagcatagctaagcgtatcagaaacatccacatctttttggccgatgggaatagagcttcctgcttcctgtcctttttgattatataggactgtttgcattccgctttgtgatgcaatcgaagatgcaagacgctgtcctttttgctgaagaaaagaacctgtattcagagaagggtcaccggttacataactttgatgaatcgtttgctcggctgctttgcttttttgaataagttcactttctagctgatcacgctgatttgtctcaattccttttaacacaagtacgctcagtacggttactgttaaaataattaaaaaagcaagaacgagccccatcttagcttttaggctgattttcattcattgatccctgctgtcgctttatatccaaccccatataccgtttgaagcaaataaggctctgcttctcctactttttttcgaaggcgctgcatgtgaatatctaccgtacgtgtaccgcctgcataatccatcccccagacaagatctagtaaatcttctcgtgtgtacactctctctaaattggcaagtaataaaacaataagatcaaactcctttggtgtaagcttaactaactcattggcaacatgtaacgtgcgctgaattaagttcaccttcacttttcccaccgtgatttctcccacagcttcaggagcttcatttttttccattcgccgaacaagtgctttagctctagctacaagttctcttacgtcaaaaggcttggtcatgtaatcatctgcgcctaactctaagcctagaactttatcgacgatatcatttttaaccgttaacaagataatccccattcctcttcgattctcaagttttcggcatacttcatagccggttaatttcggcatcatcacatctaatatcatcacgtcaggttgaaagctttttactttttcaagtgcttcttcaccgtcggatgctgtgtctacaatatatccttcgcgcttgaaagcataagataccgctgtagcaatacttttttcatcatcaactactaaaatctttttattcaatgtatcacgtactttcatttgatatttctattcgtctatcttatcaaacagctttcccaaaaacatctccaagttgtttcgaaattgtaaacaaaaataaaaacaccacataagatggcgtttttttagatctaatattcatttgtaaaaggaaggattttatgcgtattcaaatattgatgaagcagatctatacgctgctcgctgctaataaaaccaatgtatccgtccggtctaataacgtatagagcatctttttgaagccctgctttcttcaagtaagggttccaagaaaactcgtgcaaggagaagtctttttcttgcatgctcttttttagcttctctgctgctgttccatagacatgtatttgccagtttaaagactgtaaagattcaaaattcccttctacataaggtaatcgatcaccactttgcacatttgtcccttgcccgctgcttaggtcactatttcgatacttaatgcggatttgagataaaatcgtaaatgctttgtgacggggataagggaaacgaaataaaaaggatagtacaggcggaaagatatgctttctaaaaaattgactcgttttatctcgtgccaccattcgcttaaaagcgcgatcagttgtatttacaagcagctctgcaaaaggcaacctttcttcttcgtatgtatctaatatggaaagtgccgctttgtgttgaaggacagctgctaatttccatgaaaggttgattgcatctccaattcctgtgttcattccttgtccgcctgcaggactatgaatatgggctgcatctccacttagaaaaatacgcccctgtcggaaacgacttgctactctgtgatggatatgatatgtcgagaaccaatttataccctcaacctgagcaccaaatgttcgttgaataaaagcgtgaatattttcaggttttacatcgttttgatctccaaaagctgaaggaataatgccgatcattcgatacgttcctttacttctaacaggcatacaaatcaaaaattcttcattgctaaatgaaatactgattttttgatccttcatcacttcaccagagccgcgaacatccatcacataaaaatgctgtttatatttttctcctttaaactctatcttcatttgcttacgaacggtactgtgtgctccgtcacatccacaaatatacttaaaataagcggtttcctcttgctgggcttttaataaagtttttaccccttctccgtgttcagctagagatagtaactccgtcttccattctacttcaatcccaagattttttaatttttcaagcagaaaccgctcgtggtcgtcctgtggaaatgtaagaacaaaaggaaaaggacttaatccttctcctaaagatcctagatgaacttttgcttttattttcttctttactcggacgtacacatcttccatcttaatcccgcggtctatgacttcatctgcgaaaccgaactgctgataaaattcaagggttcgcggtacaatagccattgcccgggaggcttgcccaggcccgtcgcttctatcaataattcgaaaaggaatgttatgtcttgctaaattgtaggccataacgaggccagtagggccggcaccaacgattagaatttgtggattcatcatcatctctccttttcatccagttacagtatcttttatattaagcaagacttctctttttttacagaagatgcaggtaaagcagaagcaaacagagcacacaaacttattaaagagataagagctagagcagatacagaatgattccatgtcagatgttccccaaagaaaaatagttctcttacgccatctaccataaatctcattggcagccatggataaatccactctctataaaaatcaggcataatttctggggccattgaaagcaaaggtgcgccaaaaaatagaataataacgaaaatcggaagtccctttagtcctagccatgaaagtacggctgatatcaaggtgaaaaaactgaagtaagcaatagctaagaatagtgctgtatccaaaaatgaaggaacgcttattccaactacttcagccagccacgctagcccgaaacctgcagctaaagcaagtataaccccgatgattacgaactctacttggttaacgattttctctttacgagaagaaaacgtgattttttgaatgctgaggaagacaattgcggcaccagctatactcgccatccacagcggctgaaataatgaaacgggggcatttccgttgacactatgattccctgtttcgtttacgtttatcactgtcttttgaatcggtgcagcgagtgctaatgcttggtttgcacttagttgcgttccgttttgttcaaatcttttcactagctgcaagcgcatattttcattcatcttatcgactgccccgtttagcacctgacttgctagtgttgaagcagctgtattcattccttgattcactaataatctaatagcgggtgcatcaggctgagccgtctgaagagtcacctgttttttggtgaaatcttttggaatgataagcgccccatagtacttttgattatttaaccctttttcaacttctttagtatttgagacaaaaatccatttaactaaagattgttcagtacttgcccgcttcatattttgttttatttgatctcctatatttaccttaccctttgctggaactgtcattccttcgtcagcatttacaaatacgattggcaaattcttaggtgcttggcttactgaaggaattaaggttagaataaagataaaaataacagctactactataattggtgaaaaatatataagcttttgattacctaatttcatatagatctcccctttttgttttaaggatatacacgttaaggaaaagataatgtacatgatgttgattagtgatcactatgtaaattataatgaatttacctgtattctcaatatgcaataatagcgggaatgtcgattacttaacacaaagcatataactgttcattattaaagaaaaaagtaggtgtttaaaagctgtggggaattcaaaaacagatcgcagaattattcgaacgaaaaggtttatccgagatgctttgacagaactaatggaagagaaagggtttgaaggcgtaacggtcagagatctaacacaaaaagcggatattaatcgcggaactttttatttacactaccaagataaatacgatttgcttgaaaaaagcgaaaatgaagttattcaagaagtaaaagaatttatcaaaaaggcaaatcccaatgagattgtgtctgctaatttaaaagaacagcctttgccgtttattattacactttttgaatatattcaagaaaatgcacgttttatgcaggttatgcttggtccaaaaggcaaccctggctttcatcttaaaattaaagaagttatgaaaaccaatatgctcgaaaaattagagctcattgataataaaacgcctccgcttattccacttgaacatttaatgtcttacgtaacgtcagcacatcttggagttattcagaactggttagaacaaggtatgaagcagtcaccgcgagaaatggctttgacactcgcgagcatgacttttttgggtcctgcttatgttgcaggcattaagcgaacataaaaagaacctgctattctctaagaaaatagcaggttctttttattaaccttctagtaataaagattctggatcttctaatagttccttaacagtagctaggaagcttacggcttctttgccgtcaacgatacggtgatcgtaagaaagtgcaatgtacatcatcggacgattttcgatacgctcttcatcaattgctaccggacgaagctgaactttgtgcattcctaaaataccaacttgaggcccgtttaaaattggtgtagacattaatgaaccgaatacgccgccgtttgtaattgtgaacgttccaccttgtaaatcttttaatgctaatttgttgtcgcgcgcttttttcgctaaatcaacgatagatccttcgataccagcgaatgttttgcggtcagcgtcacgtacaactggcacaacaagaccgtctggagctgacacagcaataccgatatcatagaattttttaattaataactcgtttccttgaatttcagcatttaataatggatactttttaagtgctgctactactgcttttgtaaagaatgacataaagccaagtcttacgtcgtgctgttcaaagaatttgtctttgcgtcgtttgcgaagagccataacagcggtcatgtctacttcgttaaacgttgttagcatagccgctgtttgctgaacttcaacaagacgtttggcaattgtttgacgacgacgtgacatacgttcgcgttcaacaggtttgtcgctattttcacttgctgctggagacggagataccgggttagctggcttacttgcttgtgcctgctgcttttgctcatttgatttttggtctgcatacgaatcaatatcatgtttgcgcacacggccaagaggatcagtagttggcacttgatctagcttaatcccgcgttctcttgctgctttgcgagctgcaggagaagcaattagccattgtttttgatttccttgctgaggcgcttcagctgctggcgctacttcttcaacagttttttgctgagctggagccgcttcttgctttggtgcttcctctgctggtttttcttcagcttttggtgctgctggtgctgaagatccttctttcgcttcaagacgtgcaattgtttcaccaacttgcactgtgtcgccttcgccagcaagaagttccgttaacacaccagagtcttcagctgtaatttcaacgttaactttatctgtttcaagttcaacgatataatcgcctttttcaacgaaatctcctacttgttttagccactgtgcaactgttccttcagaaattgattctgctaattccggtactttaatctctcccatggttcattccccttccttatcgtgtaacaacgtcgttagcaatttcatttttagttaatgcatcttgtaaaatacgttcttgttcttgtctgtgaactgttggatctccttcagctggacttgagcgtcttgtgcggccgatgtagtcaaccgtagctccttctggtgctacttcacgcagtcgatcttctacatagttccatgcgcccatgttttccggctcttcttgtaaccagacaatctcttttaaatttttatagcgagcaaagatttcagcaattacgcgccttgggaacggataaatttgttctagacgaaggacgtgtagccaatctttatcatcttctgctttgtttaagcgttccgttaattcactgctgatttttccgctgcacagaacgattcgttcaactgcatctgcttttttgcctaatccaggctgttctactactaagcggaaagatccttttgtaaactcttcaaggtttgacacactaaaagcattacgaagcaaactttttggtgtcataactactagcggtcttacttcttcgcgctgtaaaatggcagcttgtcgtcgaagtaagtggaaatattgtgcagcgcttgttacgtttgcgattgtccagttgttttctccagctagctgtaaataacgttctagacgagcgcttgagtgttctggcccttgaccttcatggccgtgtggcagcaataagaccattccagatttttgtccccacttagcacggcctgctgcaataaactggtcaataataacttgaccggcattggcaaaatcaccgaactgtgcttcccaaagaacaagcgtttcaggagcaaatacattatagccgtattcaaatccaagaacggatccttctgataatggactgttacgaatatcaaaggaagcgcttacgttcttcattgcgtgtagtggtgagtaaacatcccctgtcttatgatcatgaagaacaagatgtctatgtgcaaacgtaccacgttcagagtcctggcctgtaatacgaattggcgtgccgtctcttaaaatcgtagcaaatgcaaatgcttcacccaatgaccaatctacgctttcattttcttcaaacgctttggcacgtttagataagatgcgatcaagttttggaaatacgttaaatccttcagggtatttcactagctcttgattcacttcaaacagctcttcttttgtaacagatgtatcaatatctgaaattcctttgaagactgcttgtggcatttccataattctatgttgcttttcagcttttggcggtactttctcataagctgcttttaacttcgcttgtaactcttcattaatttgatctgcttggccgttttgaatcacgttttgttcttcaagctgctttgcatacatagcacgaacggttggacgttttgtcacaatttcatacatcttcggctgcgttacagacggttcatccatttcattgtggccaaatcgacggtatccaattaaatcaatcaagaaatctttgttaaagcgtctgcgatactcataagcaaagtaagcagcagctaaacaggcttccggatcatccgcatttacgtgaacaattggaatttcaaacccttttgctaagtcacttgcatatttcgttgaacgagaatcgacgctttctgttgtaaatccaatcatgttgttagcaataatgtggatcgttccacctgtttgataaccagtcaattgatttaagttcagcgtttcttgtacaataccttcaccagggaacgcagcatctccgtgaattaaaatcgcgaacgatttttttacatcttgttttgggtatccattcacatcacgctcatcttgagccgctcttgtaaacccttccacaaccggattaacaaactctaagtgactagggttgctagccaatgtcaaacgagctcgaactgtgttctctgctttaatttgtttgtcggcacccaggtgatattttacgtctcccgtccagccgtagttgataccgattgaaccttctgaaggaactaattccttgttaggtgcatgctggaattctgcaaaaatcatttcatacggcttgcctaatacgtgtgccaatacatttaagcgtccacgatgagccataccgatattaaccgtttttgggcttgtttccactgagcgtgcaatcagttcatctacaagtggaattaacatatctaccccttcaatagagaagcgtttttgtccgacaaatgtacggtgtaaaaattgttcaaagccttctacttctgttaaacgctttaatacagaagttcttttctcatttgaaagaggttggaaaatagcacccgactcgaccatatcagtcagccacttattctcttccatgttatgtacgtgatggaattcaaacgcaatggtttttgtgtagacatctgttaaatagttaattgcgtctaaaccatttttgacgtgtgatggcgcattcgtacataaaatatcaaccggaattgatttcaaatcttcttgcgttaaattgtaatcttccaagtgaagcaagacaggatctttcttctcgctttcaagaggcttaattgatgcgtatagatgaccataagcacggatgttttccgctagcttaatagccgatgcaattttagatgtgttagctgaaggtgcagcctgtgcgtattcagcttgctgaacttgctcactttcgtttaatggaggagcaccccaataatcaaataattcttttaactctggatctactagatctgactgctcttcatataactcatactgttctaatacatagccatagttcggacccaaaaatccttgccaaggctcccctctattcgacgtttcgttacccatgataaaacccccaacgagttataataattgtcgtactcaacaatctttccattttgaatgtcgattaccttatcgtctgacatctttacaacgagtgataaatctcactgcgtgtgtatctgatatctgcttatattttaccactcttttactcgtcaatcaaaatgaaatcgctatatttctttaattttttttacttttttaatagtcttactactttttgaaagcgttttataagtaaagctgattaaaggtcgaatcaggtgttaattaattgttattgacctagcttttggcaaaattaaattgcttgaaatatattttatgaccataaaaaaaagaagcagcgttttgcttctttttttaaaactcatctacgattttttcaacgtcttcaaaataaccatcatctacttctgtaagcttgctgcttttcgccgcttcaagtaaatgagtgaaccaagttagttctactttcaaatgcataatcgtgcgcataatgatcgacagatttgcaatggaatgatccacctttttaacttggtacaaattttgcattttttctaaataagcagccgtttcctcaatctttttttctaaagcagaagccacttttttttgatcgacgtaagaagtaaatgaaagagcagcataaactggtctatgcatatgctctttttttaatagctgttcaaaataaaggcgctcaaattcttcttttcctgcatccgtgatggaataaacggtcttttcaggtctgttcgtctctcgaatcacatcgactactttcaccaactgatctttttcaagcgtatcaaaggcataatataaagagccgcttgcaagtttaatatagtgcttcatttgtctttcattaatggtttgctgaatttcataagggtgcttatttccttccattaataaacccaatatgactaatttaacactcataacacctttcacctcttgacatgcatcttatttagtaaaaaaagcacgaacatcttcgtgctttttctatttttgagctgcaggttccttagcttctacccgctttttagggggaacttccactcgttcatttcccattaaaaagacagtaatgatagctactgcaattggaataagagcaagcataaatgcatacgtgatcgatgtagacatagcatcaacaatcttatctaatatttgaggcggaatgctgtttcgggcacttgattgaaaaactgcactcggatctcctatttgagaaaatgctccttgtgatccatttcccataccttgaaaattgcgctgcagctcatttgtaaatgtattgctttgaatcgttccaaaaatcgtaactcccagcgtcattcctaaagaacgcgcaaatgagttcgttgagttggcagaacctctaaactgtggatccagcttatgcgttgacgaagttggtaaaagagaaaagctaaatcctacgccaaacccagtcagaatcatgaatactgttagcatccaacgaggtgtatcaggttccattgttcctaataaaaacattcctactgcaaatgaaaaaacggacataatcattaagtttcgaaagcttgtttttgtgagaaaaatcccgccgatagcacttcctgctaccgagcctaacatcataggagttaaaattaaacctgcatttgtagcagaacctccatagatagcttgaacgaaaataggaataaataccgttaaaataataaacgttgctccatataagaaagcgagaatttgtgatgttgcaaataaacggcgtttgaacatccaaaatgaaataatcggctcttgcgcgcgtttttccacaaaaaagaagagtgatagcgccacagcaaagatagcaaaaagagataaaatttgcggagaagaccaatcgtactctttccctccaagttcaagagcaaacattaaactgactactgaaattacaagagtggctgcaccagcccagtcaattttttgttttttatgacttgttgattctttataaaagcgaacaataaaaaataacgataaaagcccaatcggcacgttcacataaaacacccagtgccagctgatgtattccgtaatgtatgcaccaagaagcggaccaaatacgcttgctgagccaaaaacggcacctaataatcccgtcattttcccgcgtttttcgggagggaaaatatcaaatacaatggtaaaagcaatcggaagcagcgctcctcctccaattccttgaatcgcccggtaaatacttagctgcacaatgctttgcgctaggccacacaatgcagatccaagtaaaaataccgtcaatccaaaaataaaaaaccgtttacggccgtacatatcagacagtttaccaaatatcggcatacctgccatcacggcaaccatataggcggacgtaacccaaacaaacttatctaacccgcctagatcagaaatgattttccccatagccgtcgctacgatggtattatccatggctgacataaaaataccgagcagcaatcctgctacgataaaacgaatatttttttctgatgaaaccatttcagttcctcctttcgcgtcatctttttgatgaacagaaatgatagctacttaaattattatattcaaatttgagtattttacaatcttaaatgtgctttttttagaaataaacataagaaaagcgtaatgggtccattacgcttttactgtgagctgaggctctaattcaatctcaacatttccttgaatggctcttgaaatcatacaggatgtttctgctttttttataagtcgattgattttttcttcttgagcctcaaattcagacgtgatgataacatgaggtttatgaataattttttcgtatgtgaatacaccattcgtcacgtccacaatagcttctgattccatcgttaaagcctcctgacggattccgcttctttcgaacatcgctgcaagcgtgatgatgtagcaagtggctgctgcccctagcaacatttcatctggatttgttcccacccctggcccgtccatttctggtggaatagaaatttttgtttttaattgtcctgattcaattgtacctacttcatttcggcctcctggccaatttgcttgcaaatgaaagtgatgttctgccatagtttatccttcttccttctatataatgatgtgtacctagcgtaccctttttatgtataaaataaaaatgttctgcttgtcacagcaaaaagactgctaaacgatgcagtctttgttttttcttaacttaaaggtactttcttttcgctttcaacgaaggctttgattaatgatggcagccagtcctgcaggtttgtaaatgaatatccccaaaagctagccttttcattgctcatcgtccaagaatgatctactccgtaaggagaactattttcatctgttaaacgagaggttgtttttgctgttttattcgctgcttgttcaatatatgaaaataaatttttgagtgaaatagtaccatttgaacaagcgttaatcggtccttttagcttctgttctgcacaccagactaaaaattcaccggcttcttcctgtgaaatgaagttcatttctgcttcaatagccggtacaccaatttcttcttcatgcataattttttctacgtgaaaacgtaagcgatccgtataatcatcttttcccattacaatcggaaaacggacagccgttactgaaaacggtgctttttgaaaaaataccgcttcagcttggcgttttccttcttggtaggaaatattttcacgacgtgtatatgaaataggatacttgtacggatcaaaatcttcttcataacacgttttttctaaagaaccgtatactgaaagagtcgaggtgagtacatagtgactcgtactatgacgaaaagcttcaacagccacagctgcgccgtgtgaagaatagcatatttgatcgaatataacatcccatttccttcctcgtgttgtttcgattacagaatctttttctacacgatcaagaaaaatccgctcaactcggtcgccgaaatcatctggtgttttacctcgcgttgctaacgtaaccttaactcctttagagagcaatgtctggactaaattttttccaaaaaaacgagttccacctaacacaagtgctgttttcatccttttctccacctttcgtatttgatatgaataaccataccattattatccaacttttttattcataaagctatgaatctttccgcttatttttttatattcccacctattttttcgccactgtcgtgttaagatgtacatatctagcaaaaaggagcgacagtgatgaatccttttccacttccccttaacgaacgccttgttgttcttgatattattagaggcattgctttgctaggtattttcttagtaaatatccctgcttttgcttcgccgatatttatttttcagctgtacgatattccttatgaatataaaggaatcgatgcttgtattgatttattcctgctgctgtttgttcaaggaaagttttttacgattttttcttttttatttggacttggatgcggaatctttttgcatagagctgaagaaaagcattactttgccgctgctttatggtcaagaagaatggcttctttgctattaatcgggctttttcatcttgtctttttctggtatggagacattttgcatgtgtatgctgtcggcggttttttaatgttgtttttttataatcgaaaaaccaagacaattttactgtgggcaataggcttgctattctttttttatcttttggcttgcatgcagttttttactccgccacacgtcttgcaggagactcagcgggagtataaagttttacatgaatatgccttaactcaatatttatccacctacaggcaagcagactatttatcttggctgctttatcgtttgaatgttgaagtggtgcctatgctattaaatctaccgttttctatctttcccgtattttctatgtttttatttggcttatatactgctaaaaaaggattagtacataatatcgaacaaaatcgttatttttttaagaaaattcagttaataacaggcgcagcaggttttactttaactatcattctcgctatcttaaaactagaaattttaaaatacggactctatcagcaggcggccattcacctttttacaagtttgagcggcatttttctatgttttttttatcttaccaccttactgttattcctgcaattttctccttacgcttcgatgctgggtctttttaagtatagtggaacaatggcattaacaacttaccttagccaaactttaatttgcctgtggatagttcgagcttttggtttgtacggaactcttaccttaacagaaagcacgattatttgtctcattatatatacactccagcttttttttaataagtggtggctttattatttctattacggtccgtgtgaatggttatggcggagctttacataccgatctttcccgcctctcagacggaatagaaaagcttcagcttaacagcaaatcggccttcaagtttgaaagccgatttgtctcttttactgcaaaggcggtatggttattcgtttaattccatttgtctcaaactctcgtatatactccatttctcgatggaaaattcgcataaaaatttcattttttatttctttaatgggtcctatttgttctatcacatctcgtttagccatgcgataggctagcgcttcccaaaacacttcgttatcgtattctccaataatatcttgaagagaatcttcatgttcttctgtaaacataacctcactgtttagcgtgtgaaaaggtcctttttcaaggaaaggctctgcgtgagaaaacatttgtttttctacatccgtatattcttgtgcatgctcatcttccactccagaacatgctgtgaccatccagttacctaaataaattaaatcaagtagttgaaaaaagtgcgtttcagatagttgaagttcaatttcgttttttacaggagcttttgacataagcgcggatctctcctttaattttgagggtagttgctactaaataaaatagctaaaagggttagtatgcaggctaacaggaaaactgaagaaatggcttcacctcttttctgtagtgtaaaaatagaggtattgacattcaaagaagtgaatacgaagggtgtaaacttatcataatcgaaataaagacaagatacaagacttttttactaaattttctgactattttcgtcataaatacctattgttgttttgtttatactagaaaggtccgaaaattgtgtgcggagctgctcaaaataaaaaagcgctgaaccaggcgctttaacggtgtaaaaaaatagataaaccaataaaaaaagcagctaaaataaaatcaaaaatccattgccacttctcacgttttaacaatacgtgctctacccctgataacagcgaacttatactaaccaaaacaaaaataaagcttaattggttaaacgaaaatttagtgacaaaatttgatacaagtatgactgctacggtgatgaacagtgccatttgacttataagtacccatttaattctctgtttatatccgtcttttaaagcttgtaataaatcgttgctgatcactctcgctaaaccccttttgtattcctatcgtcaaaagtaagaacgcagcaaaaaacgattctctgcatcttaactacttagcaaaactagctattaaattgaaacataaatatcaacttgactgtactcaggatcaatacagcgttcatcatataattcaaaatctattttataggcacgatgattttttttagcccactcgcgaatataagcccaagcctctacgactacctgtctagctggtccaacagctgttgtaaacaccatgtattcaccttctgggatgatgaactctctcatatcatctttcagttcgccgccgggtaaaacttcatatcccagagcaaatgtaaaatccattttttgattgtattcaaattctgtataaagagcaaatgtattaccatttactttattggcgattttattagctaactgttgtttataaaaagtctgccagtgctcgggaataggacctgtgcccgtttcttccacaggttcatctgttcgaataggcactcctacaacagtaaattcatttaccttgactactttttgacttacaactaagtcagtcaacatattgagcccccttaattcttctttttctgtagttacaatgagggaaatacttcttaatatgcattttatttgtattcaaagaaaacgtcaaccttttatgcaaatcccttaacgaaggggctgaagatcattcttctaagctataaaaaaacgattctattttctttgtacacatcatacgtataagatacccctaatttaccatagagtgaggtaaaaaaatgaagatcattgaacttgccgaattcattaaaacaagtaaaaaaacaactaaacttgctctttcctcttctacagtacagtatacattagaaacagatgatttgaaaattgaattaaaaacaggcggcacgaataagcgaatcgtgttttttcgcatcttcttaaaaggaacatacaaggattggatttgttatcaccggaacgaccatcatatttacgaattgtatcaaaatatttctttatcccctcaactgcaaaagcagcttttgtacgctattgcatcataaaagagctggcttagttagccagctctttttatttatgctgtagctttgtaaatgaatgtttgtgcggctttacatgtaattttccctttgtccattgaatccctctatataaatagtacgagcaccaaaaaactgctggaacgataagtacataggcaacgatactattcgtaaagaaagaagaatctattgaacgaagcaatcgataggtctcatttaatatacatatatgcactacataaattccaactgaatttttcccaacctttgaaaaaaacgagtttttgccaagacctggactgctcaatacgaataaaaacaatgatgctgataaaaaaatcgtagaaataaaatagtctccgggcttgctgtgctggatattaaccaaccagtaacgctcgatgatctctaacgctgaaaacacaaaaaagctggctaaataaatcattggccttgcatttaatactgacaaaatttgcttaccataaagggcaaacatagctcctaatactgtatagaacaaaccaaagaacagagcatctctcgtttgaaaagaaagtggaaaaaataaagaataagactgcccaaataacccagttacatataatacggtgctgataagcattaataagccaatctttttccatcgttgaaataagaaaacgatgacaacagcccatattaatgcaatcaagtaccaaagctgaaatccgcttgtgtcacttccataataaaagatatctttgaatgtgatggatgatgttaaataatcagctactgcaccttttcgttctgctaatgttccgtggttctgaaataagcgcagaactacaccaaacaataaataaaagatgaaccaacatgcgtaaagctttgaaatattccacgtgtatttttttaagtatgcagaaggctttggatgtttttgaattttattcataaacaaatatcctgatacaataaagaaaaaaggaaccgcgaatcgtgcaaatgtgtcaacaatgacatctagcacattttcctggttccctaaaaagaaatcgtcatgtgatgggttaacatgaatacaaaccacaaacactgtagcaaaaaacttaataaaatcaattgaataattacgttccatcttgttgtcagctccttaaaataaactcgagctctattttagcataattatccaaccgaaaaagatattttggtaaaattaaccttatagtcatggtgaaattttcttaacttccaatattctagtcttgtttacttgtatgatgtctttcaacattccaaataaatgattctaaagaactacaaaataaaaaaacagattacgcgtaacctgttttttaaattaacattttccatgcaaacttattatcttgtttaatatcgacttctttttcatgcaaagcctgcacatgctgtttaatttgtttgagaaacagcattacttccccgcttgatacggcagctgagttgagagataacgaatgttttttagcaatttttaattcctcggtttccactgaaatactcacatggcgaaataagtgccaagggtagtaaactgttttaaaagattttgagaaataaattcctttagaacaaacggtaatcccttcggttttttgaagaggatatgtatttaaatgagctacaattttttctttagcaggtaaatagagcctgtttcgcatctctttttcaacttcttcacatagttgtccttctaccgacaacacatcttttggatcaggggtttgatgaatttgaaaagatgaacaaatggaagttaattcttttgaggatacacacggatatatatagtcttgacacatatattcatgggaatgagtgcgaataaatttcttgattttttttaatagagatactagctttctagctgagtaatcgttttgattgacttgaaatttctccacgtcattaaaacaaatcatttcttcttttcgaatggtaatggattgaatgttagcgaactcttcccataacatttttccttttttcatccctctgcttttccagtaaatccccttatttgtaaagcaaattccccttttatctaggcctgctataaaagagctgtgtaaatacgcaattattttttcttgaggctgaaactgaaagtatttgctagccatttttttgtagaaactaggtatttgcattacataaaattgactttctctatagattaagcataagtcagtcaaataattagttttcagcgtcgtcacgctctcacttcctttttgagtgtaaataaccgtacccatttttttctattactttataaacgttttttaatgaaaaaagtttcaactttttttgttttttataaaaaagctttaaattgaatcatttctttcatctaggaggttacctaattactcacttattcaataatcttattttaaacgttccctacttaattaagaaactaaaccagataatagcaatgcttacctgctttatccaaatcatcccttgtgaacaaaaacaaaccgcagcgttaaagcgcgatgcggtttgtttttttaagctaaataagcttcttttattttttcattatgaattaattccgagcctttcccttgcagaataatttctcccgtttgaatcacatagcctcggtgcgcgatttgcagtgcttgataagcgttttgttcaatgagtaagatggttattcctcttttatttaattccataatgatttcaaatatttgttctacaatgataggagcaagccccatagaaggttcatctagcataagcatagaagggttcatcataagcgcccgcccgatggctggtacatataacaaaaaagcatatcaccctaagaaaacatgccttgcacctatttaacttaaaaaaggtgcatactatgcaccttttatgtgaccctttgttttctgcttctccccgagtttaactattatttcgtaatgcctgtgatccctcttcccctgttcggatcttaatcgcattttttaattcatagataaatattttcccatctccaggctgacctgtatttagtacttttcttgctttatcaacaacgtcagatactggaacttcgcacaccacaatttctactttaattcgtgcgtgcatattgtcttgttttttaacgcctctataaagttccgtaatgcctttttgcaacccgcaccccagcgcatccgtaactgtaataccgctaacgccaattttcgccagttcttgcttaagctcttcaaactttgaagggcgtgtaataatttcaatttttgttaaaacattactcactgtgcccaccccttttacatattcgattcgtgatacgctctttcaccgtgcagcgtaatatcaagcccaagcgtttcttcttcttgtgtcgcacgcagagatacgattaatccaaccactttaacaataatgaaggtagcaataccgacaaataggtacgttgctacgatagccatcagctgtttccaaagtagacttggatctccgtagaataaaccattcgcaccggcgtcatttacagaagttgtggcaaataaacctgttgcaatacctccccatgttcccccaataccgtgaagaccaaatgcatctaacgcatcgtcgtaaccgattttctttttaagtgagaagataccccagaaacaaaccgctccgccgataaaaccaattacaatagaggcaaacggtgtaacgaatccacaagctggtgtaatagctacaagtccagcaatcgctcccgaaacagctccaagcagcgtaggttttttattgataatccactctactacaagccagccgataattcctgttgctgccgctgtattcgtgttaatgaaagccgtcattgcaacgctgttaatagttaaagaacttccaacgttaaaaccaaaccagccgaaccaaatcagcattccgcctaaaagagttaacggtaaattgtgaggtgctgcggcatcggcattttttcgttttccaacaacaagagctagaattaatcctgctacacctgatgaaatgtgaacgacgtttcctccggcaaagtcaatagctcctagttcacgaagccatccgccaactccccaaacccagtgtgctactggtgcatatacaaataatgaccataggatagcaaataagataaatgctgaaaacttcatgcgctctgcaaaagctccagagataatagctactgttagtacagcaaatgtcagctgaaacatcataaacatattatgcgggatcgtagcactgtagtccccgtttggagtgaacccgactccttttaatcccacccagtccaagttaccaataaaagcattgccaccggtagaaaaagctaacgaatagcctgccactatccaaagaacggatataacagctaaagaacctacgctatacatcgcggtacttaacatgtttttacttcgaaccatgcccccgtaaaacaatgcaatagctggtgtcataatccaaaccaataatgctgaaaaaaacataaatactgaatcgcccatttgcatgatgatttcccccttaagtacgaataaataacccctaaatctaatgttagattatataacatatcttgttatgtttactatcatatttgatttatatgtatttagcaactcctttttgcaaatttattcagaaaacttttgtttttttatactgttttctttttcttatgtattctcctatgtacacataagctgaactattttttatacgtgttagagtttctgacataaaaaatcctcttcttggagtagaagaggatttttctttacaaatacatatatacaccaggccctagaggaataccgaatactgcaaaaataagcaacataataatccaaatccctaaaaaggctagagtataaggaagcataagtgaaataattgtgccaagtcctgccttaggctcgtattctttcataaaggctaaaataacaatcatgtatggatttaaaggagtgattacattcgtggaagaatccgctattcggtatgctgcttgaataaatccagggttgtatcctaacagcatgaacaatggaataaaaataggtgcttctagtgcccattgagcggagccgctaaaaataagaaggcttagaacaacagttaaaaatacaaaaccaaccacaactggaagtccagttagatttagtgcttttaatgcatccgctccttctactgcaatccacgttccaatattagtccaattaaagtaagcgataaattgagcagccgcaaaaataagaacaatatagctagccatatctttcatcgaatcagtcatataagcaggtacatctctagaacttttgattttccctactgttattccgtaaacagagccacctaccacaaaaaacagcagcgtgatcggaatgataccatctaaaaaaggagatggaacaattccaccgtcttcatttcgtagaggagagttgggccaaaataagaaaacagctagtacagcgacataaatacatgtagcaacgatactgttttttaatccttttgcttctgcctcactaatttcaccaaaatcattgcgtttttttcctttataattgcccagcctaggttctacaatcttttcagtgacgatcgcccctataacggtcaaaacacatacagaagccgccatgaaataccagttcgctgcaggactgacagcagcgcttgggtcaattgttttagcagcttcagtagaaatgcctgataacaatccgtcggttccggatataataagatttgctgtaaagcctgatcccaccccagcaaatcctgctgctaatccagcaagcgggtgccttcctactgtataaaaaatcattgcggcaagcggaggcacgatgacaaaagcagcatctgccgctaagttggccataattcctgtaaaaatgatggcgtatgtaataagagctttaggagcatttaaaatcgttttctttatggccacttcaagcagacctactttttctgcaagtccgactccaagcatcatagcaagtacaagtcctaggggcttaaattcagtgaaattggtcagcatcgatgttaagatatactgaatgccttcatgcgacaacaaacttttaattggaagagtcttattagtaccgggatggactaccgttactcccatactattaatagcaacagatgctactacgataataagcgctaaacatacaaacaaaataaaaggatcaggtagtttgtttccgattgcttctactcttcctaatagtttatctagaaaagttgttggatgtaatttttgctctgtttgcaaattaggttgtgccatgctttctctcctttttcgtttagattctttttagattttttccttttaattaccaaaaagactattagtacataataatctgaatatttatattattcaagtattatttttaaggaattcttatttatctattaaaactaatagcatttagataaatataaaggcagaagatatctttttaatcgacaatcaaaaataacaaaaagccctccgtttaaggagagctttttgttatttcgctatactagacggagcggactcttttcctgactcattaacagctgttacatagtaacgagcttgagatgcgtcggagtcagcaaagctttttcgctcaaattccgaaacgctgccaatatggacaaatgttccgcctggattctttttataaattcggtaaccgataatattaccttctcgtaccgcgtaccacgtaagcaaattaccgctcatctttacatgtgtaggaggttgtggagcagttgcttcacgctccaattcttttgcttggtcagcttttagttctgtatagacaactaacctctcttgatgggttccttccgcacggtcaaacgtgcctgcgcacgtaatcaggtttaaattacgtttgttgctgtacccaaaaatttcgtttagaggtgccttatctcgcggatagctttttatacgtttaacaacaaaagtaagcgtggtcccctgtgcatctcttacggtaaatttatcgtctttttttaagttttttaggttgtaaaagacggcagggccggttttactgtctaagtgtcctgctaatacagcatttccttttacgccaggtttagctcctggttcaaaccaagcaactctattttctgtagatggtgctgccatttcaccgctgtctaataatcctacttgttcaattgaagcctccacatgaacagcaggaatggacactttttcagggatgattcctttgaattctttgtttaactgtttggcttctgttttatgcttttttagtacagcaaattcttcttcaagcgttacccggctttttagatcctttgattgtgcttctttttctttttgcttagctgcagcctgttgctttgtttcttttgcttctgccatttgttctttaaaatatagcccgccgctaacaagcaggactaaacttaatatacagtaggtgagaacaatcgcttttttcacatcgtcacctcatttcagagctgtttataaaaaagaagagagaacaaccttcaggactcttgactttttttacttaatttcatcattttccactctcctcatttttagttgatgtacgccacttttttcattcttactacatcttaaaccattaaatagattgaacattttcaatattctatatatttaacttttatgttccctcacatttaatgatcctttttaggaagtattctctttctatctactaaacgattgctgagtgatgttggatcactttttgaaaaattattttaaattcaacagaaaaagagattgagacataacaagataaattcaatttaaagacgaacaaatgggagatatgagctgaactgtttgagacaccgcagttgatttccgtgcaagacttcgctttccgcgggcggccgctgagcctcctcgtcgctttcgctcctgcggggtctcacctgttccgcttttcccgcaggagtcttcgtcttgccctccaatcaactgctagaaagatttacacacataaaatctacgtttgtcctaacaaaaaaacgaaccactaatcaaaagccttgatgaatggttcgttttacatttcgtctaaaatatttttgtcccagcctcttttttttacagcgattgctcaataaaagataatacacgctttacatattcttttttgtatacataataattttgaacgtgttctgctttatcagttttccagaagtgaaaagcatccgggtgcgttttagccattttttcactttcagtgtaaggaatttttgtatctcctgtgctgtgtatgaataaaattggtcgagggtaaatatgctcgactgctttaatgggactagcttcagcaggatttgcacctgcaataacaggaagaatagcaatggttagcggtgtaaacggaaagtttggtaaatgagaccatacagatagattttcttttaaataagaggttaaatcactaaagggactatcggctaccactgcttttacgtcgtcatcttgagaagctgctaataaagaagtcgctgctcccattgaaatgccgtagagtacaattggctcttttgttgtttctttcattttctgaataacgcctaataaatcgagctgttcttttacaccaatcgtcgtttgatttccttctgagtctcctgcatctctaaaatcaaacatgaccactcgatatcccgcttttacaaattctttactcagcggcagaaagccagctccttgtgcttcacggttattcccgtatccatgtgacataataatagtcgcttttggctgttccgttggttcaatcatccatccttttaaatgggttattccgtctttgctcaaaaatacttgattgctatagtgcatgccgtaatcaccaggatttttcacagcaggatttttatctagttttgtcaggcttatgcctacataaagagaaattgccgtacaaagtacaaaacaaagaagaacaaatgatatcaggctgatccatattgtttttttctttttacctgtatttgtctgtcgatttagaactggagtcaagctcgttcctcctttttatctaagatcatctttactattcttattgctgcttccctttctccattttaaagctagcccatctattttatgaataaaattcgttttattttccacatatttttctggttcgaagcgatagcggtgcgctagttctattttcaacgtttcgtattctttcgttgcatcagggtgagtacgcagataatctcgaaaccatatatgccgattaatttctggatggcctttttcataaatatgaacatgatgcgttctttcattttcgcctttttggaagtatcttcttccttttatgccgttttcacctttcgcttcgtatccaagctgttccatcctctgattatatgtatctactttctttagatctttcacttcaataagtaaatcaataatcggttttgcgcttaagccgggaacagcagtgcttccaatatgatgaacctctaaaacttgagctgacattatagttgttaaggtggcagcttcttttgaaaattccttttcccacgcgatattatagggtgtcagctgaatttctcttacagacttcatcttcaattcctcctcttgcaacgaaaaaactgcttattatagaatagcctataataagcagtttttcatcatttaacatgttattaagttttatctagtaaacgcctgcttcgctaaattaacaatcgtcatatcatccatgggagggttatgaagcccggcacgcacatctctataataacgctgtagtggattactgcgctgcaagctacgtgctcctactatgcgcattgctttgtcgacaaccgtacaggcactattggtcaccacgtgtttgacagctgctaactctccagctaatgctgctcggtcgctggtctcatcccatttacttgccacgctgtacataaagtgacgcgcctgcatgagttcaagttccatctctcctactaaacgctgcacatttggcaactcgctaatcgtcccttcaatactattaggcgaatattctgtagcaaatgcgacagcataatctcttgctgcgatggctgtccccatatagcaagctggtatatgaagcagccagccgcttggctcattctttttaaaaccaccgaggcgttcaacaagaaagtcgtgttcaatatcgacgttttctagcacaagatcgtgacttcctgttccgcgcattgcaatcatatcccatgtttcttctattgaaagtccgcttgtttcatgaggaattaaaaataagccgatctcttcttcaccttcgatgcttgcttttaccaagaagtaatttaagaccggagacatcgtggtgaatgtttttcggccattgattcgccagccttcttttgtttttacagctttcgtttccggtttgcctcctcgagtaggacttcctgtcttcggttcagtggcagcggtgttaataagtgcacctttttctatttctttaaaaataaaatcgagcatttgctgattccaaggctttttttcacgcaagtccattgtaatccccatatgccatccaatactaagagccgtagaagcgtctccttgagcaattaattcttgaaataataaaaaatcataaaggcgcaattcgtctccgccatatttgctttcgagagaaagacgtgtatagcccgcttcttttaactcttgaatattttcaaagggaaacgtaccttcttcatctattttaaaagctcgtttcttaaatttttcgactaaaggcagcagtttttcatacgtagacttttgatttttatttacaaatgaaacactcatttgcttcatctcctttttatatgacagagtgtccctatcggattaatatatagtttttatcatagcacatctcactcttactgtgcatgtttggggtgtttatctttcttattgaatctattctttttccaatttaatggtctgttttacctatactttccatacatttaatggaataaaaagaaaggaatggtgtgaatgaatcaatgtccaaaatgcggtgccagtgcaagcacagaccaattattttgcaataactgcggcttttctttcaccgtgtcgcctgctgcagctaagcataaaaagaaatggtatattggcgggggtattgcgcttatacttcttttaacttttgtattttatttctttttctctggctcagaagaaaaaacggctgaccgctttattgaggcattagaatcgaaagatacagctgtgttaagagagttattagactcttcacagtctactatagttattaatgacacatctattcaagctttgttggatgcaacttctgatggttctattttacgagacgttgaaaatgatttgaaaaataaatcgagtatctactttgcaataaaagaacagaaacattcactactattcaaaaaacagtacgtggttgtgccatcatcatattatatctccctcaccacgccagaggatgcaacggttacagttaatgacacaaaacaatcgatatccaaaaatcaaacgcaaaaaatagggccttttatgattggaaattacccgcttacggcttcttatgaaagctcttacggaaaacttacagaccaaaccactgtgaattttcaccggcaaaaagaagaaaatatatctgttgtatttaaaggggcttacgttacaatctcatcgaatagagatgacgctattttattcgtaaacggaaaaagcacgggactgcaggtgaatagctcatcacaaatagggcctgttgccacggatggaagcgtcactgttcatgcagaagtgcaaaaagacggcacaacgttcaaaagcagtccctacactattcaaagtgaagaaagtattatgttaaatatacaaacgccgcccgtcgaaaaggaaaaaaccgtcataaaagaacgagaagtgatcgtgcctaggccgcgctcttatgctacttcaagctcttatattcttcctggttcggattcttacaaattaagctatagagatattagcagtttgagctcgagtgaactaaggctagctcgaaatgaaatctatgcgcggcatgggtatgtatttaaatcgaaagatcttcaagcctatttttatgaaaagtcatggtatacgcctgattcatcatttagagactcctacttatcaagcgttgaaaaatacaacgttgattttattaaatcatatgagtaaggtggactccccttttgcacaggggagttttttaattgaagcgagtgcttactcctacgtttttttacataccatgatccctatacacgttaataaatttcttatagccttcttcattcttttcactgtaaaatataaagtagatgtacataaacttaatacacacataaggagagatggagaatgaatggaattggacgacttccacaaaagcttaatggacatttgattttagaaaatattcaagaaaccatgatcattgcagataaagactatcgtgtgcagtggatgaatgcaagagcaattgaaacactccagccagtactcccaatctaccagttatctcatatcgaagagttaattggaaagcatatggacttctttcattccaattctgaagaagcggaaaaattactcacctctcttcatacaacctaccgaacgcgtataacgattggcagtcaatacgtagcagaagctgtgattcaccctattgatacaaaagacggcgagcgttatggctacttgcttatgctattagactttacagatcaagccgaagcagagcttgaaaaagaacggttaattaaggatttgtccacgcctttattaaagatatgggacgaggttttagctgtgcccattacaggtaagatgaatatagaacgtggaaagaagctaactgaaacggtattggaggcagttgtaaaagaacaggcgcgctatttgcttgttgatttatcttcccttcattcgttagatgaagaacacggttattatattaacacgctccacgatgctttgcgtttgattggtaccacttgccttattgttggtctttcttcaaaaatggctctctcgcttgtagattctcagtttaattggcgaacattttccactgtccaacaaagcatctcttacattttagaaaaaaagaattatcgtattgcacccatttcataagcccatcatatcattaagtaatcctctctcaatcgctttttccttcaatcggaaaaggcgattttagttatgaggaattgtgaacgtttaggcacttatcatcataggatacattaatcaaccatagaaaagggtgagagcgtatgccaagtgttattaacatttataatttaaagatcaacagtatctcaagcaacggttctgtcaacattggcgaagcactccataacagtcacacggctcattcaaaatccactggtacgaactcttcttatggcgatgtctcacctgcttcctcgaaaatgcgaaacatttatatcgatcctgatacaaatgaccaaacagatattgcaaacgttgatcatgtcaatggttatcagcagtgatatagggcaatgcttgtcaacagcatgacgacaaacggtgaatacattctctctgaacgcaatagactgttggagtagaatgaataaaaacagtaaggagtctctttatgcctcttcaaattaacgtttttaatatcgtaacaaacggtgtcacgcaaaacgcaaatattgattttggttccaccattcaaaacagtcacacagcgaactcaaagtttaacggcgcgaatttctctttaggtaacttctctcctacttgctctcaaatgaatacgggcgtgttagatcctgatgtaagcgatcaagatcaaattgcaaacccttcagctccaattggaaatcaaatttagctctaacaattttgtcgttttacttggcacattacaaggaggtgtgtaaatatgtttccatttggaaaatctccctttaaaggaatgatggaaaatatcccaaaaggaatggcatctaaagacatgaataagtatattcagcaaatgatttcttctacgatgtcccattcttttccggattttatgcaaggaaatgaattctttaagcaagcccaagacatgatgaaagaacagcaggatatgggaactgaaggtcatggacaaaagccaagaagatttgattcaaacgtcatcaatacattagatgaatgcattgtacagctaaaaatccctaaccgcgatattgtatcaagcattaaagtctatcatacgccatatgtgtgtacgattgaaggaatagatggagaagaatccttcaaagaagaaattcagcttccttgttcggttcgtaaaaaaggcacacgcgccatatatcgttccggagtgttggaaatccggatgcctaaacatgttaatattcctatgtctcaaatagacgtccacgatttagattaaagtggacgtttttttctgttttcatgcatacatataaaatagaaagctgcaaaaggccttgttttatttttcttaagaaggtgacaaatatgaatcacggaaaatttaaaaagtgggcagaaacattacaagaagaaaaccatacgaaattttgggaaaagatttttgatgatgatcatgaagaaaagaatgatacggaagcagatgcttctcctcaaattgtaaatgagtatcgagattatcctttaattgatgtatatgaatgggcaaatcagctgttagttgtaattgaaatacccggtgctaaacgaacagatgtcgaattgaccatgcacgaaaatactttacacatatccggttcatctcttctaaccgtgaaggatgcaaatgttcttcacaaagaaagacgtgaaggaacgtttcaacgatcaatcatccttccgcccgctgtaggggaagcgccgtgtcacgcatcatttaaagatggtcttttgcacgtgaaatttgatttgtaatttattgtgcagaactatacgtagcatgaaaggcagggaatttcatgttttctaagtggtttaaacaatcgcctaaaattgaaacagtccgtaaaataaatccgtcttcccttccaactcaaaaaaaagcaagtcccatagaccaacgttctaatcaaaagcggaaagaattacccgaaaagataaaagctaaaaaacagtctaatctaaaaaaaacccctcaacagccaaagaagttgcctagccaaatggagcctaagacctctgttgaagctgaattcacaaaacctgctctttcgtcagattcagcgctgaacctgcagggaattattgatcaagtgacgcgtttaaccgacgcgatccctaaaatagaagagcttcatcagcaattaaatgaatcagctcaccttattcaatcactgtctcaactgcacgagcaaacagctcatttactctcggctatgcagtcagctcctaatttcgaagctattcaaaatcagctctctgcgttaaaggaagaatcgtccaatacagccttatatgagatggtgaaaactcttgacaaaaagattgatgaagtaactcagccaaagcagtccattgttgttgaaaaaatcatggtcgaaaaagtattgttagacaaaattgatcttagtaataatttcggccagctaggcattaaagatttgaccggtcacttaaacatcggcaccacttacagcgctgactctgatcaagtggatgaagaagtcaaagacttgttttctgttaagctaaaagaaaaaaagattgatgaacatacaactgagacaacgatgagttcaggaggtgaaacaaaaaagcctgatcactccgcagaataaaaaatgaccgctactgcttatttaaagcaattgtcggtcatttttgtttccataaatagttgtaattctttttggaggcgttccatcaagaactctgaaatttcttcttgattttcttctttatgatgagatgatgctacaacaatacgtcctgtttttcctaagaaagcccggtactcaattaccttcatcgcagcatgaagtaagttcgcgtccgaaagcggcgcatttgttagtagaacaatatttacttcgttttctttttgtccatgtgtcagcacagccagccacgagtaacctttatcgtcttttaagcgaacttcatgactagataaagacgcagatttccacgccgcgttagcactgctttgctgttgaacaatttcttgacaccagtctagacctgtttcatttgaaccaagggaaagagttctcaaaggacgaacaaaggataaacatagcttgcccggttccttttgtaactgatacaactcatgaaagtccgtctctggatattgatacggcggcacaaaagcaatttgtcgcttgttcacagagggatggtgaaatacatgcaaatcaacgccatatactctttttaacgtagctgcatcctgaaaaatggcatccatccccgtttcttctactcttccatctttcaataacacggcattatctgcaaacagcgaggcgatgttgagatcatgcaaaatggccagaaccgttaagctcatttcctgctgtaaagtttttaacagctgaagcagttccattgtatgttttacatctaagtgattcgttggttcatcaagaagtaagtagtcaggttcttgcgctagtgctttagcgagtaaaacccgctgtttttctccaccgcttagcgattgaaaagtatgatttctatagtgccagacgtttgttaatttcatcacgctttctaccacttcttcatcctgtgctgatacggtgctaaacaaaccttttgcctgataaggataacgtccaagtgaaacaatttcttgaaccgtaaattctaatccaatttgattttcttgcgtcatgactgcaactttttgcgccagttgttttggtgaataagccttcactgactttccttctaccttcacttctcctgattgaatggttaatacattcataattaagcgaataagcgttgttttcccgcttccatttggtcctagtaaagcaacaaaagaacctttgtctacggtgaacgtgatgtcacgaacggtcggctgctgcttatcgtatcctcctgtcacattatatagttcaatcatgatattcctctcttccgcatacgttcttttacaaggagcagggtgaaaatcggcgaaccaattaaggcggttacgactccaatcggcagttcacgaggttctaatatcgttcgtgccaataaatctgctaaaaccaaataacttcctccaattaaaatagaaagcggcagtacatgcttatgattagctcccgctacgagacgcactacgtggggaataactaagccaacaaatccaattgccccagatactgataccgcagcccctgttaatacggatgcacctattaaaatcattctttttttcttctttacgtctattcccataaactgagcggattgatcgccaaatgctaagccgttcagctcttttacatgtaacagcagcataattgtaccgatcaaaaagaacggccctaaaatttgaatatgagaccatcctctcattgatacgcttcccattagccaatataaaacctgccttacatcttcctcgggagaaagagccacaattaatgaaataagcgcgctcataaaggatgataaaataatccccgctaagatgatggtttcattggccaaattgccgcttgcgagtttcgtaataccaaaaactaaaagaagagtaataaaaccagatacaatgccgactacaggcagcgtgaagatagacaaaccaaaaatactccaatgaaaataaattgccataacagagccaagggttgcacctgaggaaactccgatcgtgtaaggatcggcaagagaatttcgtagtagtccttgaaaagcagcccctgctatcgaaagcgaagctcctactaaaaatgccaccagtactcttgggaaccgaatttgccaaatgattaaatccatattttccggaccatgatataaggatagtccggtaaggtggccaataatgattttgattgtatctcctacggttaacgaaaccgtaccaataaatacgcccatgataaccgaagtacatacaataaataaactcactatgtatagaatagatgttttgttaaaaaagatacgtttaaaaatcaatactttcagctcctctaggaaacgaggcgtgatgttttacattaaccattcattttcctgtccataaaccatgtttccaccatgcattaagttggaaacaatcatcttttatttgttacgagtgctagactgttgaactaggcaacgtagaatagcgtactaaagttctcggtaaaaaaacaagcgaaagcctctacaagctatactttttgtgtttgctccgggcttttatagttgtctattaaatgatacagcttttccatatctacagcttctctcacatatgctgctgcttttgaaaaagactcctctttttgcaggcgagtgttgaatgtgtccgtaataggcggcaattttttatgtttacgaatttgattaagcaaagctctgcgcaaagcatcgttatgaaacacatcatgaacatacgtgccaataacgttgtctttaactgttccttctttttcatgctctaccactgcaaaagcttccgtggtgctcttagaaatcgtctttcccatatgaatttcgtagccttcaatcgaaactctttcactttctagctggacatacccagaaactctttctgtttttttgctggttgtcataacggtttccactggaagcaagcccagccctttaatggattcaatccgagattctactgcatcagggtctgtgattgtctcccctagcatttgataccctccgcagatgccaatgacgtgaacgttcgttgtgttcaaaacttgattaatggctagagccaggccgctttcttgtaaaaactgcgcatcttcaatcgtatttttacttcctggtaaaacaattaaatcaggggaccctaattgtgacggcttggtcacaagtctcacgtgacagtcttcttctaagcttaaaggatcgatgtctgtaaaatttgagatgcgcgggtatgagataaccgcaatatcaatttcttttaacggattcacaagcgttgagtaatttctaagtgataacgaatcttccgcgtcaatttccacgttgttcatataaggaataactcctagaaccggaacacccgtgtattcttcaaaccacttcaaccctggttttaaaagttctaaatctcctcggaatttattaattaacaccccgataactctagacttgtgttcatctggaagcaattgaagagtacccactaggctcgcgaaaactcctcctttatcaatatctcctactaacacaacaggcgcttctgctattttggcaacgcgcatatttacgagttcccgatcgttcaaattgacttcagcaggacttccagcaccttcaatcacaattcgatcataatgattggcaagctctttataagcttccgtgataacgttcaaaccttcattaaaaaattcttgccgatactgaaaagcaaacatattacgtagcggttttccgtgaacgacaatttgagattcatgatcacgagttggtttaattaaaataggattcatattggttgttgcttctactccagccgcttctgcttgaattccttgcgctctgccaatttcttttccatccattgtaatgtatgaattaagcgccatattttgcgatttaaacggtgcagtttgatagccatcttctttaaaaatacggcaaaatgctgtagcaatcatgctttttccagcgtctgagtgcgttccttgaatcataagcggttttccttttttcactttttccactccctaccacataaaaaaaccttaactgtaaaagtcaaggtttggtcatgcgctcattaacacattgtcttgacttatttctcccaccgaaaaataaggggtttttaaaagcaggtctcctggctcatgcttcgttttacttctgcacccttcctagtttgactagtgggtctttgcaggttcatccacatttacagtagcgggggctgcaccggatttacaccgatttccctattatcctccttagaggcacttttaaaatcatttattctttattgtaacgaattttataaccattcacaataacgattttcttctattattatatattactgtgtttatacttatttgggtctcgtatgctataataacaattattttccaaacatcttatgaaatagctaggaaggtgctcacagttgaagaaaaaaatgatttatacctttattggttctcttgttctttatatagcaattatatctttttgtatgtatcaaactgctcacaagcctgttccacaaaacacagattatgtgctcgttttaggttctaaagtagatggtgatcaaatgtctcctagtttaaaagaacgagtaaagacggctttatcttatttacaagcacatcaacaaacaaaagttatcgtaacgggcggaaaaggatccgatgaagaaatttctgaagcagaggcagcctatcgttttctgcggaaagaaggaattaaaaagaatcgaattataaaagaagatcagtcaacttctacttttgagaattttacttttactaaacagaaagttgatattcaacacaaaaaagtcgtgcttgttagcagtgattttcatttatttcgcgcctctattattgccaaacgtcaaggctttgacgtttatcccttaggtgcaaagacaccaaattcaattaaacttcaagcctactttcgtgagtatgctgctatattaaaaacatggctgtttgataaataaatagagtatacgcctatacaaacgaaaaacacggcatgaattcatgccgtgttttttattaatcatctgtatcgataactgcttttggtaaacctgtatatttcgcccagtagaaaataccaagtgaaacaagagcaattaaaattaagtcaagcgggttgcttaacacaccttgtcctccaccaaatgaacctagataagagataacaagcataataatataataagcaactagccaccaagcagatttaagctgctgtgcaaattttacgacgtcagttggtacgtatttcttaaacgctacgtagataacaaccattagaagctgtgatcctagaagccaagaaattgtcgtccaccctgaccaatacacgatgtatgaacagaaaataaatgaaacaggagcaataacgctcatacctttcaatttaaaaggttttttaaggtcttttgcatttactctgaatgcagcagcagaaattggcgcaatcgcataagacagaataagtgccactgaacatacgtttactagcgcttcccaagaaggaaatggcagtgtccagaatacggacattccaaatgatagccatagtgacgcacgcggaattcctgttttcttatctacttttgagaaacgtttaaacagtgttccattacgagaccaagcataaactaaacgagaagttgtattcatgaagatgttcccgttaccgcctggtgataaaatagcatcaaaaataacaagcgttactaaccagccaaggcctaaaataagtgcaatatctttaaatggtaaagagaattgctcttgaattgttccccatcctcctgatagcatatcagccgggatgttaccaatgaacaatacttgcagtgctgtgtaaataatcgctgaaagtacaatacagataatgagcgcgattggaatattacgctgcggatttttaacttcactggctacagaaacaatagggtgaagtcctaggtaagcaaacataacgccacctgttgaaatggctgcttgaataccattaaaaccaaacggagtaaaatcgccagttgtaaagttagctgatttaaagtgataagctaacacgacgataattgtaagaggaaccgcatatttgaacacagatataatgacatttgacttagcaaatgcttttacacttacgtagttaatgataaaaaatagcgttaataacgcgaactgaaataaccagccgattgtagtaggcgattcagaaccatgtttagttagaccaggaagccaaaacgcaacatactgacgtacagccgttacctcgatggcaatcaaacttgtgtaagcaataatggtaatgaatgaaattaagtaacccactaaatgaccatgtgagtaaaccggataacggataattccaccggtacgcggcagcgctgctccaagttcagcatatactaaaccgataagtaaaataatgactccgccaatcagccacgaaaaacttccggctggaccagcctttgacgctacgttactaaccgcaaataaccaggcggaaccaaagatagctcccatcccaattaacgttaggtcaagtaacgatattgattttttaaattttccttgatttccttgatcagacataaaatcctcctttaaaattcccactccacatatctacgcccttgcgtccgatatgggattctttacatcatcctcctcttactaagacctcacaagtggatatgttaacaaatattctctaaaaaaccaagttaaaaactttatttttttgtaaaacatcgttgaattgcttatgtatagcgcataaattccacagaagatttgaggactactcctcctatttaaccgcatttttcttaggttaaacataaaagaatattcaaactatttactgaaaaaagggtctgagacataacgaaatcaaccgctagaagcagctacatacgcaacacctgcgcttgccataccaatgaaaaaatccgaacgattcatcgttcggattttgcttcaactaaaataattttgtccgtacctctttttttgcttatttaaatacttttacacgttcagttagcggttgaaattctttttctcccgcaggtgacacaggattaccaaatggcatttgggcaattaatttccatgagcttggaatattccaagctgcttttacttcatcgtcaatcaatggattgtaatgctgtaatgttgctcctaggccttcgagctcaagcgctgtccaaatcacatgctgcagcatgcctgatgattggttagaccaaaccgggaaattttcgctgtaagatgcgaactgcttttgcagcccttcaactacttcttgattttcaaagaaaagaactgttccatagccgcttccaaataagttcattttttgatccgtatctgaaaaattttcagctggaacaattttacgaagtgtttctctcgtaatatcccatactttatcatgctgttcgccaaataaaacgactacgcgtgcgctttgggaattaaatgctgaaggagtatgtttcaccgcaaagttaataatttcttcaattttttcttctgatatttttacatttttatcaattgcataaatagaacgtcggtttttaattgcttcataaaaatcttttccaacctgttgttgatcacttgatttatcaaataatttatctaaaaaacccattttccacactcctaattgtttgtttttttaagcttaaattgcatgtttatacccttcccccctgataaaaggagataaacaagatataatgaattcttatatctctaattcaagatattaaactaaaaaaatattaattgaaatttaattactttatgtaacttactttacaatgatcattattatctgtcaacagaaaaattattatttttttgttgatcatcaaaagaggttgagacataacgaaatgaatccaatctaaaatgaacaaatgggatatatgagctgaaccgctttttccgcaggagtcttcgtcgtgcccttcaatcaactgctagaaggaacgaaacaggtgaaacctacgttcaccgtaataaaaaaacgaaccgctaatcaaaaattttgatcaatggttcattttttcacttcgtctaaaatacttttgtctcagtcttttttcgtagatgcttaatgttcataaatcatctttcgcgtcattcccccgtctactacgaggttagctcctgttacaaaatcattttcaacgtttgttaagtacgtacacgctcttgagatatcggctggcgttcccacccgattagatggatgctgcgtatgatcgatttcacgaaggccatcgtagtcagatgtctcaatccatcctggagaaatagcatttactgtgatgttgtcatcaccaagtgaaatggcaagtgcatgagttaaagcaacgattcctccttttgtagccgcataggcttctgtgtgaggttcagacattgtagctctcgtagaagctaagtttacaatggagcctccgctttcgtttttcctcatcaccttagctgcttcgcgagagcatagaaacacgctgcgcaggttcgtattgataatgtcatcccattcatcaatggttagctcatacggtgatttccagcgggaaacgcctgcattattaatcaaaatatgtatcgttccatacgtactgaccgttttttcaacgagatttaaaatgtcgccttcttttcggacgtctgttttcacaaaaatggcttctccgccttgtctttgaatagcttctgcgtgaccctctccttcggtttcgtccacatctgccaataccacttttgctccttgtttcgcgtatgcgcgggatacatctttacctattccgttcgcagctccggtaacaacaacaactaaatctttaaacgacatatcatctcctccttatacgctttattcacttttttcttcgtctttaaacaagtgatccgtgacgaaaagagcaaatgtttcagccgttaacttgcatccagaagcttttgggtgacctcctcctccaaggtgcccaacaatttctgctaagttgatttcgtcttttactgcacggaagccaatcttttggcgtcccatgtccaccataacggaaaagtcgatatcttcgttttctagacacagtgcatttcctagctcagactgatatgtatctgcaaatacaattcctgcgttgtacgctgttttatcaatttcaaccctttcttttatgatttgtttttgtttgtcataaatgtatttttcaatctttttttcttctgcttctagtaaaatttcgtgtttgtccgtaaacgtaaattcttgattttcagtatgatacgattcacgaagtgtttctagaatggtttctttaaattcttcatgtggaattagataatataggtgattaaggcgctttgctttcaagttattttcatggaaccagtcccacgtatcaaataagcgcacaagttctacgtactcatcaagcaacgccgttttttgaagcatgttgtggcgcactaagtagtcgtagaaaagagatgtagctgccgtctttttaccgttttcatcttctgcaataacatgaacccaatcgtatttctcagctagtggaagagcagagatatgatggtcaataagagtgatttgctgtcctttttttaccagttcatttaatttttccgctacttcctcatttacgctaatatccgttatgtataaagctgtgtctccatcgttttcttcttcaataaaatgcgtcactgtgtcattgatgcggccaatgcttaccgtgctgtaatcaaagttgccatcgccaaacgctaaccgacccaatagtgctggacttaccccgtctaaatcgttatgtgaaattaattttatttttgtcattaatcaaaactcctttattttcagtcgccttagtatatgtaccggcttgtatattatagcaatttcagcataaaaatgctgtcatttactttgaagagaaggaatatattcgcaataaacaaaagcgaagtaaacgtttagacttagacttgcctgtatcaaaagagagtgagacataactatatcgattcaatcaacagctagaagcaactacacacatgaaacctacgctcaccaataccaatgaaaaaatccgaacgaatgtgattctttatcaagaatctcgattcatcgttcggattttcttttaaataacctacttttgttctagcctctatcctcttattctaaattgctatgctgcttaaacgcctgttcatgatccgtgtgattcaaattcccgtattctaaacaaatggtatcaaatacaacgtgagcacattgatcgaataacgagccaagtggctgaatggaagctgcttcattttcgcttcgatatttggttgcagcaggaatgtgtagcagctcatcagtatgagcagttaatggtgattctgtactagctgaaatgccgataactgaacatcctacttctttggcttttttagctacactcaccacttgctgtgtttttcctgaaccagatacggccaccaacacgtcacctgctgcaatcgaaggagtaatggtctcccctacaacatatactgtcgcacctaaatgcatcagtctcatcgaaaatgatttgcccattaacccagagcggccttcgcctataacaaaaattcgtttcgcttggtaaagtgaaaacgctacttcttctatttgcggttcttttatgtgattcattacggccgtaatttcgtctaaaatcgtttgtgtttttgtcattatacgttccccctgctcataaataagttttgaaattcagcagatgcctttgccacatccgcactttttgtgatcgctgatccaataatcgcgacgtccgccttcatttgaagtaatgatggtgctgaagccggattaattcctcctgctacggccatttgggcatctggatgaaaatattgtcgcaaatttatttgactgagtgattttccttctttttcttgttcatctttgctgatgtgatggcaaaaaatagcgttttcataaatacctacttgcttttgcaagtcacttgacgtgtttaataaatcaaccatcatttttttattccacttttcgctgacatttgcacaggtctctattgttggtgaaggtgatacacccatgaccgttgctacatctgctcctgcttgatagcacattgtaaactcatactctgcgttatcgatcgttttgatatctgctacaattgtcttatccggaaatgcctgtttaattttataaatgctttcaattccgtattcttttataagagatgtacctacttcaatccaatcaacagagggttctgccagcttggcaagggtaatagcttcttcaattgtgacacgatctaatgctaattgtatcttcatattttttcttctcactttccactaaaccggtttagtaacagcgtaaaaaaaccaatattttgatgagctaaaaagagcacgccataggcgctctttttagcttaatgcgacaaagttgtttcacgaataattaattcacactcatactggtactcttcataagctatcttttctttcaaaatttgtttaataagtaaatctgctgcttttgttcccatatcaaaagcgggctgcgaaatcgtcgtaacggcaggcgttgctacatctgcgtaaggaatattatcataaacaattaaagataaatcatttgggatattaaatccgtgttgtttaataaatttctgcacttcaatgaatactaaatcgtttccagcaagcagcgctgtcggcggattatcggctgcaaatagcttctcaagcgctttttgcatgtccgcttttttgcagttgataatcatggattcatttacaggcatattggctgatgttaacgcttctttgtacccttctacacgttcaatccggggtgtaatagttaatggttctgtaataatcgctatatgcttatgtccaagttcgagcagatgcaaaatagcctgttttgtggcttcttggttattcgccactacggatggaatttttccttttacatcatgaattttacgatccataataacaaccggatattcttctttgatcatctgctcataaagagaagtattggctcccgttggaaataaaataaggccatctacttgctttgcttttaacatattaatatatttcttttctttatcagggtcatcatctgcgttacagatgatggcatgtatatcttgtgaatggcaatagtcttcaattgcacggatgacttcagtagaaaatctgtgcataatattcgcgacaataatcccaatcattgacgttcgcttttgttttaagctccttgctagatagttgggctgatagccgagtgtatcaatcgcttctttaattttctttcgtgtttcttcgcccatatattcataccgcttgttaatgtattgtgatacggtgcttttggagacatttgctgcttttgcaacgtccagcatagtaactttttgcatcataatccgtccttttcattcaatccctaaaattatgctactcctagtgtaaacgaaaaaaacgaaaaaggaaaagccttcttgctagcagaaggctttatttattaagcgtacgcaagcctagcttcttgaatttcatgagtaaaacgcttcgcttcctttgttacttgaagtaagtattcaggagttggaagctgctttccatccactaatgtgcttcctgccccaatagcagctgctccagctttaatgtaagctcctgcattttcagctgtaacgccgcccgttggcattaatggaatatgaggaagcggtcctgctatatttttaaaataagcggggcccactacgcttgccgggaagactttaatcatatctgcaccgcattcataggctgttaaaatttcagtgggtgtaaaagcgcccggaacgctaatgactccgtatcttttagccgttttaattgttcgttcattaaccgtaggagaaaaaataaatgacgctcctgccataatagcaattcgtgctgtttcttcgtctagaacagttcctgctccaataaacatcgaatcgtcaaattcattttttaattctttaataacctctacagcagcagggttttccattgtaatttctaggtttgttactccgccttcttttaacgcgtaggcaagcggaataattcgctcagcacttgctcctcgaatgaccgctacaataccgctacttgtaattttctcaatatgcatctcaattctccttttctatcgttacattaagccgttgtttcgactggcttcacactttgaacttctcttggctttttcgttgcgataatggttaaaactgccgcaaggaataatgatccagccataaagatatatgaagcgccaaatcctcctgttgatccatttaaaaatcctacaatataagaaccggcaaatgaaccaagtgcgcccatactattaattaaagccatcgctccaccggcaacattacgcggtaaaatttcaggaataatcgcaaagaacggtccgtacggagcgtacatcgttcctccggcgataacgagtaaggtaaaagaaagccagaaattgcttgtgccaactaaataagatccgtaaaaagcaagtgctcctactaataagaacggccatacaaatgcgctgcgttttaaaaacttatctgacagatatgaaaccgttaacattaatacaactgctaatacgtaaggaacggaagctaaccaccctgtcttcactatactcatgttaggcgctgctttaataatagacggcagccacataacaaatccgtagacgccgatactccataaagcatattgaatgcttaataaaatgacagtacgatttttgaaagcttctttatagcctttaacaggtttgattccttcttgttctttttgcagcgcatcgtgtaaatctgctttttcttttttcgacagccagcctgcatcttttggctcgtcgtttactagtttccaccataaaaatgcccaaataacagctggaaaaccttctaaaataaacatccatctccagccaaacgattctagcaaatacccagaaacaatagacatccaaagaacggttgccgggtttcctaaaattaaaaacgtgttggctctagaacgttctgcttttgtaaaccagtggcttaaaaacacgagcatagcaggcataacggcactttcgaccactcctaaagcaaaccgaataacaaacaaaaatccgacgtggcttaccatacccgtagctgtagcaagtgctccccataaaatcagagaccaaaaaatcagctttttggcgcttttattttcagcatagtgagcgcctggaatttggaaaaagaaataacctaagaaaaagagcgatcctaataaagacgaaatacctggcgtaatatgaagatcttctgccagccctgccgctgctccaaaaccatagtttgcacggtctaaatatgcaaggctatacgtaataaatacgataggaattaatcgaagccatcttttttttgctagctgctgtttcattatcacttcactccttgtttttgggattccatatatctttgcaactgctgttcagttggatatccgtcgttatctccagggctttgtacagctaatgacccaatagcatttgctctccttacagactgagtaagagaatcattttgaagaagtccgcttaacagtcctactgcaaaaccgtctcctgctccgactgtatccactatttgtttcacttttattccttcaaccattccttgctctttagccgtcttaaaaaaggctccttgttcacctagtttaataacgacaagctctacgcctgcatctaaatagtaagaagcaatgtcttctggattttcgtagccggttaagatttttccttcttcaatacccggcagaacgtagtttgcttgtttagcagcttcattgattgtaataaccatttcttctttcgatgcccaaagagtgggtctaaggtttggatcaaaggaaactgttcttccagctgctttcatcgatgtaagtgcatgtagagcaaaatcgcgcatacttgctgacacagcaagcggtatgcctgtcatatgcatatgttttgccgctaaaaaatagttttgattaaaatcgccggggtccaagtgactggctgctgaattttttcggaagtaacaaacttccggatctcccacttccacttttgatttaatttgaaagcctgttgcatgctcgctatctactagtacacaatcggtgttgactgactcctcttgtagccgtttcataataaacgtaccgaaaggatcgttgccgactttgctcacccagcctgcgcgcagaccgagacgagcgagaccaattgctacatttgtttctgctccggccagttctttcgtataatgcttaatctcatgcagcggtcctggttgttctgccatgaacatcgacattgcttctccgaaggtaataacttctaatgaattcattgaacttcctcctgttctgctgcttgcaccaatgaaatgaagccggggatttgttccggttcatcgattggaaactctaaagctttaaaaatcgaatgagaaaaccctttcaaaatatctttccacacttcatttgaatcgtttgatatagcggttgtcactagctctccgccgttttttattacgtgtttaatatgaatatagcccacaaatgaccttagctttttgattgcttcctggggttgttcatgtacataaagccaattaccaatatcaaacgtcatggaaacaggaacttcgtaagcgttatcaaaaaatgcgtgcagagatgctatgttgcctccgtgactggtttgatcgttttctacaaatagacgtaaagctggaaatgcttctaatagctgctgtaaatctgctataggcgattggggctgataaaaaccaagagaaacttttacccactgagcgccaagtgatacggcttcttcaagaatagcttttaattcttgtgtgtttaactctccattttctctccacagttcaattggagccgaatatactgtaaaaagcggatatttttctaattctttggcaataagctcaatctcttgatctacttttttcattaactctcttcgaatttctactccgtgtacttgctgctcatatattttcccaatcatggtgtgctgaaagcctgttgtttcaaatgcatttaacgggataatgatactattcataaatcgacctacctttcttattatactaactaaccacttactaaaccggtttagtaaatcgatttatctaaattataagactattgaaagcgcttttcaagcttttttttataaattataaaaaaaagaaacaacacagctttatgccgtgttgtttcttagtgatgatctgtgctttttactagattgcgatcttgctggtaaatatcataaatcaaaaagctaaagccatagtacaagaccatgatgacaactgacttcgtcatgataaataaagcgcctagcccgataccaactaacagcgtctggacacttaaacgatcacgctggaaagctagctgtgataggaaataaccaataccaattaagacggccaacacccatgtgttttcaatggctaatatatagtgactatataaataaaagctaggaaaatagacggtgctttctacgaagctggaaataccgctgtatgcaagccaccacttttgctctctttccgttctaggaacggttgcctcaattgacgtgggcatttcctgttccacaaaaaccgtttctccatgatctttcatccattgaagcataatggaaagaatgataaaacctgcaaagattaaaagcagcaaatattcaatccacgctggatatggagccgtgcggtgaatcgtatcgagatatactccctgtaatcctaacatagaaattggaaccctatggtataccatcaccgcaatataaaataataaaattagcacataaaaaaagaactgttctttgtagtagcgaatttttttaccttctgaagcaattcgcttaacagtcacgctttccaagtacggacggataatgcttatgataataataagacacgtaaatacaatcatatagttatgtaatcaccttttcaacttcgttatgtaacatattttttcattttttccatccgtaagaacagtaggttaaaagcctctgcactttcttatagtaccaaaaaactaaactttttgacaatcctgatttatcaattaggaagatgaaataagcatagctacattgatgccgctaatcgtgaccataggagaccctcctccagggtgagtcgttcctcctacaaaatataagtttttaacatcttttgagacgttgcctgggcgaagaaaactatccattttccggtttgaactcacgccgtacaaagcacctttaaatgcaccaaacgtttgttcaatttcatatggagtaacaattcgttcatgtaccagccaaggctcgatatctaaaccaaactgagaaagcttgcgatagacaacttctctgtaagctttcatttcttcttgattctcttctttcacagcaggagcattcactaaaataaataaattatcacccggagctaccgtgttatcggtatatgaagaattacaaatgtagacggtgggatcggttggaagcgttttttgctgaaatagctcataaaattcctgtttataatcctgagaaaaatacacttgatgatgaatcagctgagaaaagcgtttcttaacagctgccatgatcacataagctgatatggaaggctcgaattcagctgcttttttgtttttaaaatgaggtctatcctgttcttttacgagtgccggataggcttttagcaagtccccgttcacaataacgatatccgcgtctatcttttcttctccatttacttccactccgacagcccgtttattttttacgattatttcagtaacgctgcagtttgtatacagctttcctccagctttttggaacacatgtcccagcccttttgcaattctagtatttcctccttttacatagtacaccccatcattcatttccaagtgtccaatcagtgaaaacgtagcgggtgatgtataaggtgaagatccgatataggttgcatatcgattaaatgcatttcgaatgttttcgtttcgaaaaaaacgctgatgaaacgtatctactgtttcaaacggccttacttgcagcaatgcttttaataatgaagggtttgtgtaatctttccacgatgaaaatgtccggtagaaaaattggctttttgcaatgtcgtatattctttttacttcttttaaataggcagggtattgctccgcagcaaagggatcgagacgttcaagctgctgaatcatttttctttcgtctatagacatggaaaattgcgagccgtcggtgaaaaaattattcgtatgatgcgttagtttgacaagaggcatatagtcttctggacgttcacccgcttgctcaaataaccactgaaaaacttctggcattgtaatggtattaggcccaaaatcaaaagaatattctcctagctgcacaggcatcatttttccgcctacatgctcgtttttttccacaattgtgacatcgaacccttttgtttgaagaagaactcctgcagctaatccgcccaatcctgccccaactattagtacttttttcattgataatgccttcctttccattcatatccctgcttttttcgttcacgcttcatggaatgattcatcagcagcatcagcacaattgccgacgccggcatcgtacaaaacaaaagccctttttgctgagccgaccggtcaattaaaaaccgctgaaaaagcataatgcaaaaaggaagaacccaaagcatgttgcctgtgaatattcctgctataaaaaaaggaagcggcagcacatagtaacaggtaaaaaaaatgcttagtacccaaactgctttagcggagcggcccagacctacaaagatgtttttagcaaaaccgttccatacttcttctgttgtttcatacatataacagctaacatgagaggtaatattagctaaaatgacgcggtgtttcttttgcttaaaaagctgggctaggtggacatcttctactagtgaagatttaacggcttcatgtcctcctacggcctcgtaagcttctttttttataaatataaaagcaccgtgagccgctgaagctttgctcatcttgttacgattagctaagacaaccggtaaataactaaaaacaaccacatgctgaagcggaacgaccaatgcttctaaccacgtttttacaggaaagcgagggaaacctgttaaaagagcggcttttgtcgcttgtgctgtggctaaagtatgttctagggtacgttctttgagctgtacatcggcatctacaaacaataaatagtctccatttgcagcttgcgacagctggtgacaggcatgaacttttccgacccaaccctctctcagcgcttttccttctatgatggtaaacctcggatccccgtgaatttctttcaacagctgtgttcgtgtttgatctgtggactgatcgtctagtatgacacattctagattgctgtacgttaatcctttaatagaggaaatgattcgctttacatttcgttcttcatttcgcattggaatcaaaatagaaatgagaggctgaggtgttttggaattcggctcgtatctttttaatttaggcattgcttgaatatttacaatggttagaagcagcatgaaaataaataaaagcatatagtaaatcattctttcaccttcgctttccaccacgttaaccattcactaagcgtcttttttccttttaataaaaccgtaaattcctcatcgttttcttgaattattttctgtttttgatgatcgagctgagcagtgactgcaccgcctagcgtgttggttatctcttctcttgccttagctgagtcgtaaaaaacagcatgccctacccagataaaaagctccggtcgctgatcatggcgaaacgtataataatacgtaatgggaataacttcaacgtcagaatgcttctttagaagaaaagcaggtccttcagaaaaagttaacggtcttttttcaagatgttcttcttttccttggggaaaaataagcaccgcttttttttcttctaacagcttactggcaaactttaacgattccaccgtgtgcttcggagacgctgcatttactgaaaaagccccgattcgttgaaaaaaaggaaaatccttcatgccttgttcggacatcatagcgtatagatctgtttttaataccgcgttatttaaataaaatgtcactaaaccgtcccaccaactggaatgattagcaattaataaaatttttttatcttttgggagcccttctatatgtaaatgaatacgataaaattgctttttaagctgatatgtgacaaacagttgaaaaaatcgctcaaatattgagtttttcttcgggtaaatcataagcgagtctcctttttatacacaatataaagaataagaaaaggaatcatcgtcagccatacgacaagccataggccatttgctaacgctacaatcacaaacatcatgacaactgcactatacaaaaataccattcttctttcccacaccggattttcctctttaggagacttagctaaaaagaaatatacgaccagctgaatgaagaaagacaataaaaaccagccggagaaatttgataaaggaatattataataaaagctgtccccttcccacatccaatattgtttaacaacataggcaacaggatcaatagccaaatccataataacagcaaaaagcgaactaatgactgcataggcaattccatggacaataaacggcagctccatacgtttcataattccgagagctagtattctgcttgtaatcacaaccataaaccaagccgaaccaatggtcagaggaatacctaaaattttggcgccaaaatctttttcataatcgtaggatccaaataaaaatccatacttaacacctagactttcgatataaatagatgcgcctgtcacaaatatcgcaacgagtagtgcccgccttactccataaactttagctagataaataagagcaagaagactgctcaagtgtaaaaagaccgcgtttgcccattctaaccatgaaggcagcaaatcgaaggaaagcaagacgactccgcatacgtaccagataagaaaaaaacgataaataccaattgtgatcatcctctatccaccttctctccagcttctttttgtcaaagtgttattatataagcttgtacacattctctccattttcaatgtgctcttttttatgagtagtccccgctctcttaaagttatgtaaaaacagacactgttagtacgttccctaaataagagactttattacttatttataaacaaaaataaaataaacgtccattaaaatctacggatgcatagattgtaatgacgtttattttttcttatgtatatacacttctaatagctttttgacaatgagtccgacaacaagtccgggtataacagacagcataggaagccaaattggtcctataaaaacaccgttgatggttgttactgaggaatacataatgcctactgtaacaaaataagcacaggagacaaaaggaataaatgtaaatctcgatgcgccgttttctgcttctttaacagcatcccaaattgcaaaaaaatacaaacatggataaaacattaaccactgcatgttcattacctctagggactgccttgtttctcctaaaaagcttaagcgaatgccttcattaaaatttgcgcccatattaatgaggaattcaagtacaataaacaaaattccttttatatgttttttgtttagtaattgtccaaagcccggcaacgcaatgctccataaaagagcttctagtctagtcacgttctgtcctaacattttgacgtataaaagaactccacagcatgatatcagtagaaattttgtccatagttatcaacctcacaataatttactcatagtttttgtaaatgtaaaatttttatactacatcttctttaatatttgtaacttattgtaaattgataaatatttagctattcgaccagacattttcgtttagaattttctgtttattaaaacaaaatcgtacgatatactagttttatacgtacgaaaggatgagaaagctgacatggaaacaagttttttttcaattttaatactagggttttttttaggaatcaagcatgctctagaaccagatcatattatcgctgtatcaaccattgcttcaaaaagtaaaaaactgtggcgctcttcgcttgcaggagtatactgggggattggtcatacgcttacgctgtttatttttggcatgattttaatggtgttaaaaagcagtatttctgaacgtatgagcatgtcacttgaatttttagtgggcattatgctcgtttacctcggttttacatcgtttatgtcttacaaaaaacaagtacctatgcatcacgaaaaaacgtcttacttaaagtcattaggcattggctttgttcatggactggccggaagcgcagcgatggttgtattaacgatgagcaccgttactcatgtatggcaaggtgctctgtacattatcatttttggaatcggcacttgtcttggcatgctgttatttaccacagtcattggaattccattcgttacaactaaaaaacaagtgacgttaaaccgctgcttaatgcaggtaacaggcgctgtcagcattatatttggcctttattatatgtataatttaggtgtaagcgacggattgtttagcctgtggttctaaaagcgaatgagacataacgaaaacaattcaatctaaggatgaacaagtaggataaatgatctggactgcttgttccacagctgttgatttctgtgcaagacgtcgctttgtcctctaatcaacggctagaaggagctacatacagggaacctacgttcaccctaccaataaaaaaatccgaacgaatttgattctccattaagaatccagctcgttcggatcttctttcaactaacatatttttgtcccagcctctttaatacttacgcaaaagtgatacttcagcttttagtaaatgctgtcggaacaatccgtatactttagcgattatgtcttcaacttcttgtgtactagcagctaatattcgaatagcacatccggggatcggcagtgcggaagctcctactttacagcctgcctcttcgcacaactgatgtactttcgctataaatgcgtcgtcggcttttggatgaacaatgataatcgatccaaaatgagtatacccttccattttcatcatgccgcgcaaatggctttctggcttcaagtataagtgatcgtataccttcagctgctcgtttacatacagtttaagcttggaacgcatagaggtatattgaaacagctgcccatccggcgaccaccccggagttatgctgtcacacataaacaaagcagcgttttgtaccatatgaaccgttatttcttggacaaatgcagcattctcatacaaaataagcgggtctggtatatattccatgatggcttgttcttcaagggttatacacgtttcttgtaaaacagcttcgttcggtgttttgtacacctttgtcgcagattgagtagtagccgtcagctgggcatttttctctaccgttatcatcgttttatacttgtctccgcttacgtatcctccgcctacgtgaagcatataaacaaaaggggattcaggagtcatgtaaataggtctggcaactttgaaagcaccgtaatggtacgtatctttaataacggttcgctcactgtttctttctgctcgaagctctaaataacccgtgtagctcatgattcaaggccgattaaaaaggcctcttttttaatccattctatcacttggtcgagccctttatcttcttttaaattggtgaaaacaaaaggcttgtgccctctcgcttggattgtatctttttccattacttctaaactggctcctacatacggggctaaatctgttttgttgataatgaataaatcagatttaatcattccttgaccgcctttacgcgggattttttccccttgtgctacgtcgatgatataaatcgaaaaatcaacgagctctgggctaaacgttgccgctaaattatctcctccgctttctacaaaaataagttcaacatccgggtgacgttccactaactcatcgatcgcagcaaagttcatagatgcatcttctcgaatggccgtatgaggacatcctcctgtttctactcctacgatacgattttccggtaaaatactgttttttactagaaattgcgcgtcttcttttgtataaatatcgtttgtaacgactgccatgcttagctgtccttctagtgcacgcgttaatcgttctaccaacattgttttccctgcaccaacaggtccaccaattccaattctaattgcattcattttttacgccttcatcgttagaaggccttccctccttttttatgacatgaacaatcggacatgcaattgttcatgctgcatttgagcgatttctaaccctggtgtcacggcaccaaattcctcttgatccgcttgtaaaatatgctgaagtgcttgctgcagcagcggctgaaaaagaacgagcgttttttgtccatccgtttgaccgatcggtatgccgcgaacagcattttgaattaacgaagaaatgctagcgtacaagtgacttaaaattgcctcttcttttgtgatatttaactgcaggctggctaacgcaaatacaacagcaggatgtccatacgccttctttgcttttacctcactcatatacttttctaaataagagccttgaaataactctaagcaaagttttaacatgcgctggcccacgcgtcttgtcccttctcttgtttcttttgacaaagcaagagcgtataattcatgatccactctcataatttcgttaaactggtcatgagccccatactcataagccagtctgcatgctaagccgtccgtatacgtcagctgaacatcaaggtatgtacgaagcgcttcttgaaaggtttctgtgttgtaaatttgatctcgctgaatatacgtttcaaagccaaacgaatgtgaaaatgcaccggatggaaaatttgaatcacatagttgaatcagcgaaagcaatgaattagtcatgactgtgtccgatatgcttaaaagcttgttttacttttcttttttcgcgcttatagggaatatcaagctgctggagcaattcttcgactaaataatcgtactgtacgagcatgtctccaccttcaaactgtgccggcaaatgtcggttgccaagctgatgagcaatttctcccatttgctgaatatcaatcggctgaatcgtcaaaatatcgtctgccagcacctgcacaacaatcatattgctttcatccataaacagcacgtcgccatcagtgagctcgcgattttcttttagacgaattcctagttccttaccgtgatctgttacaacgcgctgaacacgttttactaagtgatcactttcgatatataccttttctatatgcggagcccgtttttctaatgttgccatatttccgataattttttcgattaccatttctttcacctcaaaataaaaagtatcgctgcgccataggcacaacttctgctgcttcacatgtaatcatttgtccatctacttttacttcgtacgtttggggatcaacttcaattttaggcatttccccgtttaacttcatatctgttttttttaattgacgaatatttttaaccggtttaagcagcttttgtaaccccagtttctcgcctactttgttctcgtacgctgcttttgacacaaacgtaagagacgttttagctcttgcttttccataagaagcaaacatcggacggtataaaaccggctgtggggttggaattgaagcgttaggatctcccattaagctgtgtgcaatcaaaccgccttttacaatcaagtcaggctttattccaaaaaacgctggctcccatagaattaaatcagccattttccctgtttctactgatcctacgtattcggaaattccatgggcaatagctggattaatcgtatatttagctacatagcgtttgacacgtgcgttatcgccagcttcgctgtcaccatcaagtttccctcgctgctttttcattttgtcagctgtttgccacgttcttgtaatcacttctcccacacgtcccattgcttgggaatctgaagaaatcatactgaatacacctaaatcgtgtaaaatatcttcagctgcaatcgtttctttgcgaatgcgagaatcagcaaaagcgatgtcttctggtacagagggatcaagatgatgacataccatgagcatatctaaatgttcttcaagcgtgttgacagtatagggtcttgttggattagttgatgatggaagcacgtttggaaagcttgccatttccataatatcaggtgcatgtccgcctccagctccttcagtatgataggtatgaatgactcgatcgccaatcgctgcaatcgtatcttcgacaaagccgccttcatttaaagtatctgtatgaatcgcgatttgaacatcgtactcgtctgctacctgtaagcttgtgtcaatggcagatgccgtggttccccagtcttcatgaagctttagtccaatcgctccagcttcaatttgctcaattaaaggctctttggcacttgcattcccttttcctaaaaagccaatattcattgggaatgcttcagcagcttcaagcattcgttcagtatgccaagctccgggtgtacaagttgtagcttttgttcctgtagccggtcctgttcctcctccaatcattgttgtaactccagaggcaagagcagtttcaatttgctgcggacaaatgaaatgaatatgtgcatcaataccgccggcggttacaattttcccttctgctgcaatcacttctgtactcgcaccaatgataatgtctacttcatccatcagcaggggattgcccgcttttccgatggtttgaatgagtccatcttttattgcaatatctgctttatatatgcctgtataatcaacaatgattgcatttgtcaacactaagtccgctgcttcgcttcgtgttgcaagaggatgctgccccattccgtcacgaatgacttttcctccgccgaactttacttcatctccgtacgtggtgaaatctttttcaatttcaataaatagctctgtgtctgctaaacgaacagcatctccaacggttggtccaaacatatctgcatactgacgtcgcgacatttgaaaactcatcttatacatcttcctttctatcagaaagcgatctgtttgttttattgttaagaccgtagatttctcttgttccagagaaagcaacgagatccacttcttttgcatcacctggttcaaaacgaacggctgtaccggccggaatatttaaatgatagccaagcgaagcttcgcgggggaactcgagcgcagcattcacttcaaaaaaatgaaagtgtgaccctacttgaacaggtcgatcgcctctgttgattacagtcacgctaattgatttctttccgttattgcatgtgattggggctttttttaagaaatattcccctggaatcatatctttccctcctcttaacgaattggatcgtgcacagtgacgagcttggttccgtctggaaaggtagcttccacttgaatatcatgaatcatttccggaataccttccattacatcttctcgttttaaaatcttggtcccttctcgcattagctgtgctaccgtcttgccatcacgagctccttccataatttcatatgtaataatagctactgcttcgggataattaagttttaatcctcttgtttgacggcgtcttgctaagtctgcagctacgacaatcattaatttttcttgttctctcgacgtaagtttcaatgaaagcttcctttctgctaatctattttctaattaacatcaaaatgtgacattttctaacacaaatacataactaattatagtaaattttctgacaaaaaacaaagaatttatctcttccgataaaaaaagatgagcatgtttgctcaccttttactcttctgaaatcgcttgtgttttccatttctgcaggtgtttccagcccaaaccttcagttagctgacgttttgcatagtctactcctttttcaatagaagcttcatagccaaatagataatagcgcaagccagcgtttaatactacttgattatagacgtaagtcagttcggaagaagtttcaccctccaaaatgcgcgtcacatattccgcttgtttttcaacacttattttcttttcaaagtgctcttcttccacaaacagtccgtattcttttggattgacaataaacgactccatctctccttctgagatagtaaaaacaaagctgcttctatgtacaggtacatcttcagatccttctatcccttgtaccacgtatacatgtttgaacgggagcgaagcaaaaatgggcacaattttgttaatggctgtgcggtgaaaagcgcccatcattaaagaagaagcatttgataaatttaatagtttttcaaccgtattaattagtgttcttacgccaatttcatgacgaacttgtttgatgcggctaagaggataagagattgtttcggcatttacaaagccaatttttaacgtttcaaacgcatgaccgacgtcttcaatcgtttgagcttgagggatctgtaatgaatgaagtacatcttcaatcgttgttccaaactttggaggaagcgcttctgtacagtgtaaaaaagctggcacacctctttcagctaataaaatcgatacaggaatggtcgcaaaaaatgaatttctccctgcataagggcttgcaaaatcaattgatttatcttttagcggctgagacagcggtatttcttttgttttttcacgaaaagcatgaacgaatcccaatagttcatctgcattttcagttttaatacgttccgcaataaaaaaagcagcgatctgagcatccgtagcttgtccagaagcgattaagcgagctgcttcttttgcttgttcatacgttaagtcagttgatcctctttttccgcgcgctatttctttgataaattgctgcatatcgtacacttcctttttaactgaatatttgtacattgtatcacatattttctttgttccttagattatcttctattaggtacgcaaactgctaaaaaaatatgaaattaaaggaaaagtactagttcttttataatctaatatagtataatctatctgctatactattatttggatatttgggggactttacaaatgaaaaaagagaaactacttgtaccatttatagcagcatccgttttagtaggagcatcggtgacaacgcctgtttttagtcactctgcttatgctgcttcttctgtcagcatttatcaaaaagacgttaattcgctagcagattattacgcaccattttataaaatcttagaaaaaaagctaaaagaaattgaaggaataaaagatgacgaaaaagcgttagctgcatatgatcagcttgcggatcaaattgaccagtttctaacaaagactgataaaaattatgcgatgaatcaccttaattcagaagctgatcagcttcaagggtatttatacgacagcttaattgctctttacaattacattgtggatcttgaagactatgcgtatggagatgtaagtgacgcggaatttaataagatctctgcaaattttgaaaaagaaatcaacgcatacaatacgcaatttcagcaaaaagcgaagagctataaaacgaagcgaaaagtaacgtttaacgcaaatatgagttatttgcttgatgaagatattcaaccttccccaacagctccatcaacaccggctgatagcaatggcacctacacggtgaaaaaaggagacacgctgacagcagtcgctaaaaagtacggcatgacggtagctgaatttaaaaaattaaacaatttaaaaacagatgcgctaaaagttggacaagtgctgaaagtgaaaagtacaagcgcaccttcgccggctccagcacctcaagcttctgttagtgcaaaacagcagcaaattgtatcgtatgccaaaacgctaattggaaagccatataaatatggaggtacgacaccaaaaggttttgatgtatcagggtacacacagtatgtatataaaaacgcgggttcaaatatttctatccctcgtacagtagcagatcagtataagagcggcacggacgtaaagcaaaacagcctgcaggctggagatttagttttctttaaaaacggcaaatccgtttcagtcgtaggaatttacctagacaaacaagaattcatttatgtcagcagcaaaggcgttaaaacgcaatcactttcaacagcgtactggaaaaacagctatgcgggcgcaaagcgtattataaagtaaaaagaggtgccttatggcacctcttttgttctactagctatgtatttctatactagactagcaattttataaagaagttcttagttcataaccgtgattttaacagattttcttccgaactgttgagcatcaccttcagaaggaacgaatacgtcaattcgattacctttaattgctccacctgtatcggcagctacagcttcaccatagccttctacataaactttcgaacctaatggaataacactagggtcaacagcgattactttttgatttggatttgcttttaagtccactcctgtagcagttgtaccgctacatccagcacaattagccgtataggcagttgcttcaactgtcattgatttgccgctggcttgttgtgacgattcagcaggttgttgttctttttgagcttgctgctgctctttttgagcctgttcagcttgagcttgctgctgctctttttgagcctgttcagcttgagcttgctgctgctctttttgagcctgttcagcttgagcttgctgctgctctttttgagcctgttcagcttgagcttgctgctgttctttttgagcctgttcagcttgagcttgctgctgttcttcttgagtttgttcagccggcgcttgagcttctggagcagcttgggctactgaagggcttgattgctgagcttggccgtttggagactgaatttttaattgttcgccaggataaattaaatctgacttcagtccgttccattctttaatttgatctaccgtcacgccgtattgctgactgatggaccataatgtgtttccttgctgaactttgtgcgtcatttcttttatagtagctacgtttaattcttgatttggataaataatattagatgttaagttgtttgcatcttttagctcgtctacgctcacgctgtgcttttgagcgactttccataacgtatcacctttttctacgtgatacgttccgcttgtagaagcagaagctgcacctacaaatcctgctgaaaggattgctgttgttcctagagtaaatataaattttttcattacgaatacctccttatttactcaatgattgaatgatatcatcctcacatttcacagccgttacagagccatgctacttttattacaaaacttaacaaaacagaacattcaatcgtaatatttctgataatttggctatatgatgaaacgtttctattttttactgctttttattgttgtttttactaaaatagttaaatttctccaccattgctggctatgcctcttcttttttattgatcatttaagggtatattaagtttttttcataacaaaaaaaacgacccgctaatcaaaaattttgatcagcgggtcgtttttcaattcggctaaaatacttgtgtcccagcttttttatttcttattaaatccttgcttttcaacaaattctttcatatacatacgcttaggattggaaagcatgtcggccatttgaccagtccatgtgtcttggcgtttgccatttgttctttcgttgtaataagcagaaatttcttcgttatacgctgttaattcttttttggtctgctcatcgttcggctcatatgtttcttcatgatacacatgtttaaatggtaagcgcggctttttatccgtaatacccgctggatgtccaaccgttagaccaaataacgggattacatgatgaggcaattttaacaatttgcttacttcttctaattcgttacgcaaaccgccaatgtaacaagctccaagccccattgattcagcagcaagcgttgcattttgcgcagcaagggcaacgtcaataatagctaccataaactgctctgtgctttcgagcgctgtcgataaatcttttttctccatttccgcaatgacatcatgacgatgaaagtcagcgcaaaatacaaagaagtgtccatttgtttctacgtaaggctgatttcctgctaattgagcaagctttcgcttcgtttctttatcttttactccaataatagaatacgcttgaatatagcttgatgtggaagctgcctgtgcgctttctacaatcgtctgaatttgcccttccgacaatggtttgtcttcatatttgcgaatagaacgatgatttaaaatcgtttcaataactgagttcatattataatctccttttacttcatctaaccttctacagatgttatctctacagttagtttagcgaatgtaaaaagaaataaccaatgttctgcttaaaattgattttgacttgtctcatatcgatacagcttaaagtgatctgcaagcacgcgatctacttttacttctaagctgtctacatattcgtccatccgttttatcagccggtttctcttcacatcattttctaaaatgttcttaagctgctgttcaaaggcttcagcatcattaagcggtatcagcagctctttttcttttagatattcaatgttaatttgttcttgaccgggaagagatgagtgaataaaaataggcagtctcttgtgaagggcttcgctaattgtcactccccccgcttttgtgacaatagcatctgctccctcatataaatcattcattttctctctcgattttacatacgagaccgctttaattctcgggtggttcaattttattaattcttgatacaactttttgttttttccgcacagcacataatacatatacgtacagttttgcggaagctgctgaagcattttgcgtacatttccaaggccggaattccctccggcaatcagtatatgtttctgtggcatgagatggtcaatccgtctttttaaaaacgctttatgaacgggaatgcccgttacataaatagaagactcttttacaccgtgaacgttttgtaaaaacgcttttgtatcctgatcaggcacgcagtgaagctcaattccatttttaccccatacgtcgcttactaagaagtctgtgtatacgtttataataggaagatcaatgattcctttttcttttaacccgcttaatacacaggaaggaaagctgtgtgtacaaacaataacatccggctgctctgcatcaattaatttcttcatatggtattcgataatcggccactttttcacaacaaaatcatccatcgtatggtcgttttttttgtatacatgaccgtaataaaatttttcaaactgctttggaaaaacagaaatccatttcatgtatatcgatgaaatcatttgttcaagcggtttgctccaatagcttaaacaatcaattttttgacaaataacgtgcgaaaaacgctccatgatggcatccataacggcgtctgctacttggtgatgaccagatggcatctgaaaaagcggtaagaataaaaccttcctcattgaccatccctcctctcaagacgttttcggtttcttgttctttttataagtaaataaatgacaaaaaaagctacagcgcccatgataatatacgaaatatgaattcgatctcctacgtagtaacctagaatcagaaaagaaaggacccatactagacttcctactaccgataacaataaataaagcaaaaacggatagcgacttattcctgccatatatgggctaatttgacgcaagcctggaatatataaaccaaataaaatggtccatatcccatatttatggtagctgccgcttgccgcttcaattttctctttggttaaccctacgtattttccgtatttatcaaaaaatggggttcccgcataccttcctagcccgtaagcaataagcattccagttataacacctaaaaaagcaaaaagagatgattcgtataagttcagctgatgtttggcaataaacatgcctaataatattaaaaatgattcttcaggcgctggaattccaacaatcccacaaaaaagtacaagtaaaataacaatataaccataggaatgtatatactgagaaataattgttaagtccactgctcgctcctctatttacgattgattcatcaattgctgcatggttatactttcatacccttgctgttttaagtaaggtaaaaattcttctaacgccgcaatcgtcgtttcaggtgctttttcatctgctcccggggtatctccattatcgtgtaacacaaaaatggctccatcttctactttacgcattagtttttgaactaatgccgttttcgttgtttttagtgtccaatcctgaaagattcctgtccagatcacaaggtgatatggcttggccattgataaactgctcatatttaaatgtccccacggcggacgataaaaaagcggcttttgatttgttactttctctataacctttgcgcatcgatgaatttgtctttttaattgccaaggtgtttgcgtccatgcactcacatgacgatgatgatgtatagctacttcatgtccttcatcgatcatcctttttaaaatagacgggtgtttctcccctagttctcccacaataaaaaaagtagctttcatttcatgcagtttgaacaagtccaaaatttttggtgtataaacaggatgaggaccgtcgtcaaatgttatagctattttatgctttttttccccttttattatgactgatgaatgatagcgacgataaagggtttgcgaaataatggtatatacacatataaccattagaacgaaaagtaaaacaataaaaaaacgagtcatatgcttttaaccatccttttgaatttaaatcctgcatttattataacggtttactcagactttggtttcatttttttgtgatagaagccaggaattttaaaataatttgatactttacctaaaaatagctgttctgcaaggatataccggaaataaaatgatatcataaaatttcccttcattcagtaaaaaaagtactttttaccatttatatctatcttttgtatgacaactgtcattactttttaaaaataaaaaaacttcccgcacgagtgcggaaagtttttaaattaaaattttgaccgataccatttttcagctgcttcaatttctgttcgtgttaactgatgtccaaatgattcccaatgcacctgtacgtctgctccggctttttctaaaagcgcagaaagttcttctgtttctgatgctgggcaaatagggtcgtttgtgcctgcgccgataaagatagaggcgttggtcttaggcacttcaattcctcttcttggaaccatcggatgaagaagagccgccccttttaaagaattctcataatgaaatagcaaacttcctgcaatattggcaccatttgagtagcctacagctacgatgttgtttcggtcgaatgaatatgtttcagccgcttcgtctaaaaattgatgaagttcttttgtacgttcaattaaatcttctatatcaaatattccttcttgtaaacgtctaaagaaacggggcattccgttttctagtacatttcctcttacagataatacggagcaagaggaatcaatcatatctgcaacaggaagcagatcttgttctgtacctcctgtaccatgcaacagcaataaagttggtttcgtctcgtccgttccttttttaaaaatatgtttcacgtatatccactccttttaaatatctcgaattaaagataattttattataagaactttcgaagcatttgtaaaggaaccactgtcaaagaaatacctgtatgttttgctggcagtatcacataatactgaataacttcatatagccattgctcatatgcagctaggtatttaattcgtttgacttacaacgggaaaagaaatattccacttttagctaagtgctcccgccaaaaggtggataatgattaaaaatcacccgtcctccgtcgtataaaaagtgccctagtctgataaattagttaatttttgctttatttcgtcactttcaacagatatcagcatttatacccgaacgtaccaaatcgtatttcgtatacgtgttataacaacttttttctatgagaaacagaacgtaaaataccagcttgttttttcataaaggggaacaaagccccgaatggtgctttatttgacaaacacaaatttatgggtaaactaagttcagatgattgtatttcacttcgtttcagtttaataaaaaaacgaagcatctgcgagtaagcaaaaaataaccgcgtaaagagctatttatgtcaatcatcttataccctaaaaacttacctgcacttgaataatagcctttataaaacttagcgcgtcagcttgtgaacattaatactttatcatccatctctctgttaaaagattgaatgggccaacaaacttcagcattctttacataacgaccttgtaaagacgaagaatgtagctatgtgtgaacatggaattattacttagtggagtgaaccaacatgaggaaatttattttagcctttttagtcgttgttttaattgtaatgctaggagttacctatgtattaaagcaatttcagcaaacggctgatttatcttactcgaaactgcagtcggttcaaagtacggtagtctatgacaaaaatgaccgtaagattgacgaattgtataaaaccgttccccgtcaaaatgtttcgagcaatgaaattcccgattatgtaaaaatggcgtttgttgcaacggaagaccgtcgcttttacaagcattttgggattgatttacaaggtattggccgcgccctttttaagaacattgtaacaatgagtaaagctgaaggcgcaagtaccattacacagcagttagcaagaaatctttacttatctagtgataagaccattaaacgtaaagtagatgaaatgtttctgtcactaggcttagaaagacaatttacaaaagatcaaatcttggaattatatttaaatcagatttatttcggaagcggtgtatatggtattggtgcagcttctcagctttattttaataagcctgtatcagatttaaccgtaggcgaagctgcgcttttagcaggactgccaaaagcgccgagtacgtattcaccaagcaatagtacagaaaaagcgacagcccgacgaaacgttgtattaaaactgatgcatgaccaaaacgttattagcgatactcagtatcagcaagcgttaaacgaacgtgtagtcaagcctagtattccggttaaaaaaccaaactcaaatcaagcatttatcgattatgtgattaatgaagctgctcaacagtatggcgtatctgctgatgacctttacaagggtggttatgccatttatacagatttagatcctaatttacaggaatcgattaataactctgtagcaaatcatacgttccgagatgatgacattaacagcaaagtagaggttgggatttcagctgttaaccctaaaacaggtgggatttcagcgatgtatggagggcgcagctatgagcgaaacggcttaaaccgtgctacaagcggctatcagcttggttcagctattaagcctttagccgtatatggtccagccttagaaactggagattatacgccaacttcactcttaagtgacgaacgacaagactttggcggtggatatagccctaaaaatgcagaaggtgaataccaaaagcatgtgacaatgcgtgaagcacttacccgttcacttaacgttccagctgtttggcttttaaaacaaattggtattgacacaagcgcaaaattcatggaaaaagctggacttcctcttgaagatgacgataagtcaaaattggggcttgctcttggaggaacgaccacaacgttctctccccttcagttagcacaaggatatacaacttttgctaacaaaggcgtcatgactaagccgtacgcaattcgaaaaattgagatgcgcgacggtgaagtgaaaaagccagacattcagacagagcgagtaatgagtgaagaaaatgcggatacaatgacatccatgctgcaagatgtgattgaaaaaagctatggaacaggtgttaacgctcgttcttcacgagatgctgcaggtaaaaccggtacaaccaacgatgtcaaagatgcttggtttgtcgggtataccgatgatgcagtcgtttctatccacgctggctttgataatgctaattctacgcaaacaacgaaatacttatcaggcggcggcggacaagaccctgctacactgtttagctcaattatgaataactggtaaccaaaaaacctccaacttcactgttggaggtttttttaagataaatgcgttttatgcttaagtgaaaaaaaggaaacgttaatgactttgcaaatcgttacataatgcagaacggtcaagacaaccacgccacagttcatcccgataataattccctgcatgccaatatttgtttgtgatcctaagaaaaacatcagggaaaaagatacaatatgagaccaaatcgtatgataaaaagcatcttttacatagccaaggccaattaaataagcttgaagcgggacggcaaagaagtgaaaaagaaaatacggccataaagcctttaggtagtacacggcttctgtagaatgaaaaaacaagttggtaagcggctcagcaaagaaatacatcgccactatagacggaatcccatataaaaatgtcatttgcatactttgagtcaaaagtctttgaagctgttcttcctgatttttcgcatgagcttcagatacagcaggtattagtgccactaaaagagaatgagcaaagaaagctggaaaaaaaccgatcgacatcgctacccctgttagcataccaaaatgctgcgttgccccggttaaagtcatgcccgataaaacgagcgcgtgtttgatcaaaaacggctgaatagcattacataccgcattaaataaacgcagtcccgtggtcggaagtgagacgcctaacagctttttccgaatctcacttggagaaagcagaggtctgtgccctcttgataaaacacttaactgggtaacatacgtgataaaaaaataaagcaaaataacagcttcggttccaattagcgtacaaatcgcaataaacagcgacattttaacatctgtgaaagcaaacatttgaaaaacaataaataaaatcgttagctgaaaggctttgcggataaaattagacacagcgatagtcgtcatattatttttacccgtaaaatatccacgaagcaccgctgaaaatgaaacaaccggaatgaaacatagtacaacccattttaagtaaggatgatagtgactaaaaaatggaaaggctgctaatacggccagggtaataaaaaagattcccaagctcacagcagtagcaaaaatggtggcatgcttcatcatatgctgatgttctttgcgatgatgttcagcaagaaatttagaaatagaaataggcagttccaagttggctacggtggcaataagaaaaatgataggaagaacagtcatgtacatgcccatgccttcccttcctaattctctagcaagtaccatatttacaagaaattcaattaactctcctgcaaaggcagcacctgctagaataaacgttcctttcaaaaaagtgttcatctcgttatctcctctatttcccgtcctttttcatcactacctcttctctctatgtatatgacaagctccatacgaattatttatctaattatatttttcgttgtacaagttcttgtataatgttcagcctatgtgaaaaaaaaacgttatataccttttttacataggaaattcattcatttcttatcttttggctcttgaaacttacatagaaaaaacaggagaccgaatgaacctgccgattgctaacgggaatagagcaggttgttttaatgcaacaaattcacatattagttaagcgtctttattcatcattttctgtggatgcccttctttttttgctaccgaggcgtttttgcctagtacaaccgaaaagacaacaattattgctatagcaagagtaaaaagtgtaattgtttcacctagaaatagagctgcaaacagaatcattaaaaatggctgtaaatattgaacctggctgactttggctattccacccatagccatcccgctgtaccaagcaacgtatgctaaaaattgactcactactgagagataaatcaaactagcccacgcttgtaaaggcgcatggagcatttcagctgtaatgcttagtcccactggaatcataaaaaatggtgcaccgatgataatggcccaagcaattacttgccagctgcctaattctcttgctaacacccctccttctgcatagctcagtccaagtatcagcaccgctgctagtaaagctgcatcagcaaactgcagttgaccgaatccgaggtgaagagcatacacgataacagctgccgaaccgattatacttgagacccagaattttaaagtagggcgttcacctcctctaaacatcgcaaaaccggctgtggctaatggtaaaagagcgagttcaaccgctccgtgagaaacaggcaatgatttcattgcccaagaagtgagcagaggaaaccctaaaactgcgcctaaagcgacaatcagcagacttttaaattggcgaagagaaggaaatttctcttttcgtacaatcaatatcacagctactaaaatagcagctacagctgttcttcctaaaccggcgactgtcgttccgaaatacttgactgcaatgcttgtagaaggaagggttaagctaaaacagataacgcctactaatcccaacaatacgcccattttctctctcgtttctttttgcatcttaccctacccctgtctttttatttttcagaactgtaccatttttctaaaaaaagttctgatataattaaaaggatagcgcaggacaactactaaaataaatcattcttttacctatctgtacgggtacaaattaaaggagtaggacctatgagtttgaaatatctgaaaatcatggaagaaattaagcttggcctagcaaatggatcgcttattgcaggtggtaaactcccttctgttcgccgactctcccaacatttttcgtgcagcaagaataccgttattaaagcgtacagcgaactagaaaaagagcatttaatttattctgttcctaaaagcggctactacgttgtggcagaatttcaacataggacgaatgaaaataaagtgattgatttcttgtctgctggtccagataaaaacgttatgccttatcttgaatttcagcattgtataaaccaagcgattgaacactacaaagaagagctttttacatactctgatcaacaaggctcttactcattgcgggtacagttagtgaaacacttgcagaacctacaggtgttcactcaagctgaaaggttagttgttgtatccgggtctcagcaagctcttcacttactagtttctatgccctttccaaatggaaaaaatagtatcttaattgaacagcccacttatttcggttttatcgagtctcttacgctgcaccaagctactacttttgggatcgagctatcgatggaagggattgatcttgatcgtttggagtacctttttcgaaataatgacataaaatttttctatattattccaagatttcacaatcctcttgggcattgttatacaaattttgagaagaaaaaaatcgtggagctagccgaaaaatacgatgtatatatagtggaagatgactttttgggtgaccttgatcccgatacaaaatcagatcctttattttcttttagtccttctggacgagtcatttacattaaaagcttttcgaaaatctttcttcccgggttacgcattgctgctgtcgtgcttccttcgttaatgaatagcagctttttaagatataaattcagttcagattttaatagttcagcgctttctcaaggtgctcttgaaatttatttaaaaagcggcatgtttactagtcatcttaaaaagataaaagaggtataccataccaaaatgcaaacccttgtagaagcatgtgattcattgctatccgttcatacacatttttctaaaccaacttcaggattctatttatccgttagtttgcctgagcatgtgaaagcaaaacagatcgttcacatgctaaacgagcagcacatatatgttgatgatgcctctagattttttttaccagaatataaaagagacactcttctccgattaagcatctcacaagtaaatacgaatacgatcaaacgaggaattgaacagctagctcagtgcattactttaattgatgatagaaaaaatcatcctattccaaataaccttttccccttgtagaatgggaattcaatggacatactaaacgaaaagaagtcaaggaattagaatccttgacttcttttatttaaccgtaacggttataagaggcatattatgtgtcccttttgcagaaacatgtgattgcacggtatatgtgccaggctcagagaaagatgtttgtatctcatatacaccttctcctacttgtttaggctttaacatcttccctttcccttcaccatcttttttctctatttcaaactcaatcatttcaacatcatcatttttcactttttcgtctccatatgtaacttcggctttgtagataccgctttcatttttctgtaacgcccctggaccttgaagatttacgtccaacggttttggctgctcagcatttgtgctttgagtaggttcttgaccacaggctgttaaaagtaaacaaagactgattatagatatacttattctttttttcatgtattcatctcctttttaaaccctttgtttaactataacgcgtattgcaaagaaaaaaatgaatttttctaaaaaagaaggatttttaaagattttttaagaacaaaagttcatactcatactaactagttttttccaaggaggaagaaaatgaattcagctaaatctccagctaaaaaatcatggctacagacattaatcaaaaataaaagtgagcgtaaaaaagtgatctttatctttactatctcttttttactagttgtagcagggcttgtttacattcctatttataaacattcccttccactcgattctaaaatatatgaaggaaattttaaagagcttggttcaatcgcacgaattggtttctttgcagctttagccatttatcctatttttttattattaaaatggaaaccgttatcgcacataaaaaaaggaaattttgagttaaaaccgcttatccaatttttagccaagtacgttcgtcagtggcacgttcccattgctcttatatcaacagccttgattattttacatggttatatggctttaataaaaggatttcaaacaaattttacgtacttttcaggaattattacgatggctgttctagcttgtttactcgtcatgggcgtgaagcgctataagcgtacagataaaaagtggcattttacatttgctatctcttttttggttttgtttatgattcacgctaccttttcataacttgccattgtttaaagtttttttatatagggtacagttcacaatgaatacatgatatgtatcactatacgttttacatcatttaggaggtataaacatggcaagagtgttagctgtattatcaagcggatacgaagagaaagattatcacacaggttggtgggcagaagaattatttgctccgctgcaaaagcttgaggacgcagggcacaccgttgatttagcctcaccttttggaggtaagccggaagtcgacgttcgaagtatttcagaagactttgatccagacggaacatataagaatttatatgaatcagggagagcggatcagacaatgaaacttgaagaagtagatgctgagaactatgacgttattttagtagtaggcggccacggcgctatgtttgacttagcaaaaaatgtggacttgcatgcacttatgaacaaagtgtacgacaacggaggtattttagcagctgagtgtcacggaccttctgtttttgctttcttgaaaggatccgatgatgaactgttaattaaaggactagacgtaaccggttatcctgatgaaatcgaaccggaagaagtacttccctttttaccatacagtttagaacaagaacttcgtgaagtggctaactacatccctgagatggataaaaaagcatatgccgtttgggcaaatgatcaaattgtcacaagccgagatcctttttcttctgagttaatgggcgatgaattagttaaaaagctaaataaataaactaaaaaaagactgcttgaaagcagtctttttttgtttgttctatagggatgtttgaaactgctgctctaccaaacgccggtaaaaagaatgagaggccaacagctctttatgcgttccgcttcctgtaacctgcccttcttctattacaacaatttggtccgcattaatgaccgtagatagacgatgggcaatgacgagtgatgtgcgttctttcattaccgtttccaatgactcttgcacaagcttttctgattcggagtccaagctagctgtcgcttcgtccagtagtaaaaactggggattgcgtaacagcgctcgggcaattgcaatacgctgtcgctgtcctcctgagagattaatacctctttctccaatcattgtttcatattgagcttcaaaggactgaatgaaatgatgagcattcgctaacttcgctgcttcttctatttcttcatccgccacatgccgctctaatccgtaaatgagattttctcgaattgttcctgctaaaatcggagaatcctgctgaacatagctaaacaggtgacgccacgaacgtaagttgacgttttgactgtctgtttcatccaagaatatgcgccccgatgaaggctcataaaagcgttcgataagcgaaaaaacagtagattttccagctccgctaggtccaacaaaagcggtaacttctccttttttagcagaaaatgaagctttctgcaatactggtttatcttcatattgaaaagcaactttatcgaaccttaaactccctacctgttcaagcacttctccattttcatagttctcttctttctcagctaatatatcaaagattctttctgaagctcctttagtttgctgaaagctcgtaacaaatcgggtaagtgaaccaaccggaaccataatttgaaaaaggtaaagaacaaaagccaccagctctcctgcagtgataaatccctcactcactcggtaggcaccaaacccgacgatggcaatcataacagcggtcatcaccgtactaataatcggggtaatgatggcttcaattttagctctctttacaccgaagaggtagagtgactgaaacgattgtaaggcggaatcaacttcttttttctctgaaccggatactttaatcaagcggatttcactcagcatttgagctaaaaaagccgtaagcttggacattttatcctgctgctcacgtgaaatttcatgtatttttcgcgctaggggcataaccagtacaaacataacgggaataaccgctaataaaatgagcgtcatgggtacatcaagcgtaaataaaataacaatggcaacgataatagataaaatatttttaacaaagtcaatcatttctgttgacaataaattcatcacaatggttgtatcatttgtaatgcggcttaccatttcaccggaacggttttggtcgtaaaatgaaactggaagctttatgagcttgttccacactttatgtctgagttcttttacaacaccttgccctacttgagcaaggagataaagagatactgcgcttgttaccatttgagcagcaaataaaccaaggagtcctgctataagctgcggtgagacgcctactgcaattttctccatcacttctttaatgacaagaggaatagaaagcgacgctccggtattaattaaggccagtatgaacgaaatgagtagctttcctgtcggagggttcgttagcaaccataattttttaaatgaaaaatgaattcctttttgcgtattcatcttagttcctttctaattcttttaataggtggtatacacactttaggcagacaccacacactttaccttcaaagttctatcttattttacaccatttcctttctcaacctgaacttctaagcttttacctatttttcaaactcgtctatacgaaaatgacaagctggtcatatactatggtacactgaattcttttaatagatgagaggttgaataaggatgtctgtttatattaaatctatttctattggaacaatttctggcgggatcgttatttttggaaacgcaggaaatatatcgcctccaagcggctctacgtccggctctggttctagctctagctctggttctaattcccaaatgccgatgcctccttctccgggaaaaggcccgagagataacacagcttttaatggctaataaaaaaacagtgagatatttctcactgtttttagactttaatacttgtcatcatcgcaatataaaaagcaaaaacaaacaaacccgcacttaatacgctaagccatactgtctttttgtaaaaacaaacaagtaaatacacaaaaaacagcagtgcgacaaataagaatagggttcctacaatcgttacgtgaaacgttagagggagcgtcacttgtttcccatagataaacggaagaatcgatgaatccattgccatatgacttatatcagttggcggcgattgcgtcaccatgacagctgtaaataaaaaaatgataagcaaaataatgctttctgctcgaatccacatcacgggcttatattctggatgttttatcgtttttttcataagaaagccattgatgacggcaaatgcaagcagcggaataatcgtaatatgctttagtaaaagagactgcccgtaatctgtagcccatgaatttacatagttggacagccccatgataatgaccatcgaaatgaacccacttaatgaaagaagcacaaaacaagcgattgcaaaaggagtaaaccagcttaagaaacttttccaattggaggtttcttttgaaaaagcggcaacaatcagaaccacccctccccacagtccaactgctaaaatatgaagagaatgagaaagcatgccgctaagcgcagaagcggatgctgcgtgacttgcgtaggcgattcctcccaccaaggctacagtcagtaatgtatacatatgagggtggctctctattgaaacagcaaccatacataaaatagcaatcagcacaacaaagatccaggcgtgtcccgttcttgtttccaataatacaagatgaactgtttcacctaaccctcttatttttgaaaaagataaaataatctcaagcgaatttccaaccgaaaaaatagcgacagccgctgcacttgcaagtagccatcgctttgataataaaattgttggcttttttgtaagaggtacatattgcagtacggcaaatcctaataataaggaaagacctacgtatgtgacccactcaaaaacaggcaacaaaatactcatctttttaagcctttttcttcctgaagattaagagtaatgctccaaccaccactacaatagcaataatcatgataacaaaaaacgatgaagaatcattgttctctgctttttcatcatttgctactgcacttttttggtgctgttcggattgcgtggcgtcttgctttttttcactatcttttccggctgcttgagtattctcttctttcgcttcatctttcacatctactttaaaagcaatcgaatctttcattacatgaccatcttcccctacaatttcccagttcactgtgtaagatccgttttcaagaggctgatcgagagaagctattaaatcatgaccctctactttttgcgatgcaagtgaaattttttgtccatcttttgtaacggttacagtactgattttctcgatgtgtgtttcaaagattaatttaatttcttttagaggagttgtaacagttgcaccattttccggcactgttgtttgcacatgtgtatgagcaaaactaactgtcggaacagctaaaaagcatactaaaagtaaacctattatttttttcatatttatgactccctatctcttttttcttttttcatcatatccaaaaatgtttttatgtagacgtttccgaacacgatctattttcctagtaagtgtactccttttttattcagtctcacaataactattaccaattcgttataaaatgttcacaaatcctaggaaaggtgccgctgtaattttttgaatattctttcagactatccttgaatatagtaaaatagttaaataagatggctgacttttttctagcttaaaatcccatacagaaaggatagaaacaatgaaaaagtatacatgcccttgctgtggttatcaatcgttagacagtgatggtgactatgatatttgtgagatatgtttttgggaagacgatccgtaccaaaagctgaatgccaacgaattaggagccaactctatttctttaatagaagctcaggaaaattttatagtttatggagcgtgtaataaagaaagcttacagcacgtgagaaagccttctgttcaagatgtaaaagattttaactggaaacctattataagtcacgagtagcaaaactagtttataaaaaaagaatgcttgcgaaagcattcttttttggattcagtaagaagtggaaacaaatgtggaaagcacatttgtaaacctataaaaagtttgagctttagacgaagctcttccttttgaagtgaatgaatgaaacatagcacttcgcagcggttggctaatctctaattgaatacttttcccggtacgatttttatttgcaatatttccagggttaatgcctgcaatctcatcgtgcccttttgtaatcagttccgccggaaatccattttgatttaataattgcgttaatttttttgcacgctcccgatcggtcccgcccacaaaaatatgtttttcgttcccagaatacccgtgaagagataaaacattatcatacttgcttaccatcttacgcgctgtgggctcatcaaaatgagtgcttgtgaggtgcaggtctcgtgaccctttcgactttaacgattcgaataggtaaagagcattttgtttgctaagctctttggcaatttcgcttgtccccccttcaattcctccaccgtgtggagcaaagacaaggacggggcttttcatttctttggtcgtcactttatagctagctgaagactcgtgctgtgagagctgcttgaaattttgatatttatcagttgatgcactagatgtgtcttgaaaaggtgaaatgaataaaacgaatagacagatacataaggtagagaaacttactaaacgatagcttttcaatttgtactcctgctttccattgtgtaataagacctaaaacattagaattctaaaaaatccaaaaataatatttaaagtagtcttatttacttatcgttacaaattacaatttatttaatagttcttaatacctatttgtattttttaaaaaaacttcagcgcatattcactgaagtttttttactttttttgtttttatttatttaaagcaagcgccaaactaattttatccagccaaagaaggcgatccataaaggtatgctcaaagatgttccccacgctaaaccaattaagaagtttcctctttcaatcatacaaaccactccttatgaacattgtaggtgaacaagtacaattctataccttcactataacagaaagcgctttcatttaatagtgacttatacgtttttagtgctatattcatacagaaaaccggatttcaagtagataaagggcgatatataagaaaatgaataattacaagatgtaaaagtataataatctacttaaaaaaaagaaaccttcttcgaaggcttcttttctaggtgttttttattgttcgccgctgcgctgcaagcgattctcaataaataggcgctcaacaaatttatttagctgggcttgatacaaacggcgctcatctagtgtttttgcgtcttgtatttgctgcttaaagcgtttgatttgctgtctttgttcaaccgttacatgatgagaaagaagcataggtccccctccatttcactaacgtttgaattaagtaaaccaaggtttaccaaaacaaacaacaaacctgttagcttctcttacataaattttttactcagcctctttagccccaactaatgctaaacctcgaccgtatggcgttgtatgaacatctaacattaattcatttgtataaggcacaatagaagcttccattgctacttgtactccgtcgacttcatacatttcatcattttcaaaaggctcttcaaaagctaacccaatattagggatttcacagctaattcctttgaaatacaagcgaattcctgttatctcctgctcttcaagtatattgttaattaattgttttgcttctggtgtaatatgcatgactaacccttcttcctttcaatactcttgctctat

(The sequence listing continues in the following parts.)

1. A composition comprising:
an isolated endophyte, wherein the endophyte is a strain of Priestia aryabhattai, and
an adjuvant, wherein the Priestia aryabhattai strain has Accession Number DSM 34352.

2. The composition according to claim 1, wherein the adjuvant is selected from the group consisting of (A), (B) and (C):
(A) a polyglycerol ester with a general formula (I) of, [chemical structure]
wherein, Mis [C₃H₅(OR″)₂O_{1/2}],
D is [C₃H₅(OR″)₁O_{2/2}],
T is [C₃H₅O_{3/2}],
j=1 to 10, preferably 2 to 3, more preferably 2;
k=0 to 10, preferably greater than 0 to 5, more preferably 1 to 3;
l=0 to 3, preferably 0 to 1, more preferably 0;
wherein, the sum total of j+k+l is 1 to 20, preferably 2 to 4, more preferably 3
wherein the radicals R″ are each independently selected from the group consisting of acyl radicals R′—C(═O)— and H, with the proviso that at least one radical R″ is not equal to H;
wherein the radicals R′ are each independently selected from the group consisting of monovalent aliphatic, saturated or unsaturated hydrocarbon radicals with 3 to 39, preferably 7 to 21 more preferably with 9 to 17 carbon atoms;
(B) polyether-modified siloxanes of formula (II) [chemical structure]
wherein, M¹ is P¹₃SiO_{1/2},
D¹ is P¹₂SiO_{2/2}, D′ is P¹P²SiO_{2/2},
o is 2, p is between 0 and 0.1, q is between 1.0 and 1.15,
P¹ are independently hydrocarbyl having 1 to 8 carbon atoms,
P² are independently a polyether radical of the formula (III) [chemical structure]
where
m is from 3.4 to 11.0, n is from 2.5 to 8.0,
and with the provisos that
m/n is from 1.9 to 2.8,
P³ are independently divalent hydrocarbyl radicals having 2 to 8 carbon atoms,
P⁵ is hydrogen; and/or
(C) organomodified polysiloxane of formula (IV) [chemical structure]
where a+b+c+d+2=20 to 210,
a is 15 to 205, b is 1 to 12, c is l to 12, dis 1 to 12,
the R radicals are each independently identical or different, aliphatic or aromatic hydrocarbyl radicals having 1 to 10 carbon atoms,
the R4 radicals are each independently identical or different R, R1, R2 or R3 radicals,
the R1, R2 and R3 radicals are each independently different polyether radicals of general formula (V) [chemical structure]
where
e is 3 to 11, f is 6 to 30, g is 0 to 15, h is 0 to 5, i is 0 to 5, and
R5 are independently the same or different and are each a methyl, acetyl or hydrogen radical.

3. The composition according to either claim 1, further comprising at least one emulsifier.

4. The composition according to claim 3, wherein the emulsifier is selected from the group consisting of sorbitan fatty acid esters, ethoxylated sorbitan fatty acid esters and mixtures thereof.

5. A substantially purified or isolated endophyte, wherein the endophyte is a strain of Priestia aryabhattai which provides bioprotection and/or biostimulant phenotypes to plants into which the endophyte is introduced, wherein the endophyte Priestia aryabhattai strain has Accession Number DSM 34352.

6. The endophyte according to claim 5, wherein the bioprotection and/or biostimulant phenotype includes nitrogen fixation in the plant into which the endophyte is introduced.

7. A biostimulant comprising an isolated endophyte, wherein the endophyte is a strain of Priestia aryabhattai with Accession Number DSM 34352.

8. The biostimulant according to claim 7, further comprising at least one adjuvant selected from the group consisting of (A), (B) and (C):
(A) a polyglycerol ester with a general formula (I) of, [chemical structure]
wherein, M is [C₃H₅(OR″)₂O_{1/2}],
D is [C₃H₅(OR″)₁O_{2/2}],
T is [C₃H₅O_{3/2}],
j=1 to 10, preferably 2 to 3, more preferably 2;
k=0 to 10, preferably greater than 0 to 5, more preferably 1 to 3;
l=0 to 3, preferably 0 to 1, more preferably 0;
wherein, the sum total of j+k+l is 1 to 20, preferably 2 to 4, more preferably 3
wherein the radicals R″ are each independently selected from the group consisting of acyl radicals R′—C(═O)— and H, with the proviso that at least one radical R″ is not equal to H;
wherein the radicals R′ are each independently selected from the group consisting of monovalent aliphatic, saturated or unsaturated hydrocarbon radicals with 3 to 39, preferably 7 to 21 more preferably with 9 to 17 carbon atoms;
(B) polyether-modified siloxanes of formula (II) [chemical structure]
wherein, M¹ is P¹₃SiO_{1/2},
D′ is P¹₂SiO_{2/2}, D′ is P¹P²SiO_{2/2},
o is 2, p is between 0 and 0.1, q is between 1.0 and 1.15,
P¹ are independently hydrocarbyl having 1 to 8 carbon atoms,
P² are independently a polyether radical of the formula (III) [chemical structure]
where
m is from 3.4 to 11.0, n is from 2.5 to 8.0,
and with the provisos that
m/n is from 1.9 to 2.8,
P³ are independently divalent hydrocarbyl radicals having 2 to 8 carbon atoms,
P⁵ is hydrogen; and/or
(C) organomodified polysiloxane of formula (IV) [chemical structure]
where a+b+c+d+2=20 to 210,
a is 15 to 205, b is 1 to 12, c is 1 to 12, dis 1 to 12,
the R radicals are each independently identical or different, aliphatic or aromatic hydrocarbyl radicals having 1 to 10 carbon atoms,
the R4 radicals are each independently identical or different R, R1, R2 or R3 radicals,
the R1, R2 and R3 radicals are each independently different polyether radicals of general formula (V) [chemical structure]
where
e is 3 to 11, f is 6 to 30, g is 0 to 15, h is 0 to 5, i is 0 to 5, and
R5 are independently the same or different and are each a methyl, acetyl or hydrogen radical.

9. A composition comprising a culture medium of an isolated endophyte, wherein the endophyte is a strain of Priestia aryabhattai with Accession Number DSM 34352.

10. A method of producing a composition for bioprotection and/or biostimulant, the method comprising combining:
an isolated endophyte, wherein the endophyte is a strain of Priestia aryabhattai, and
an adjuvant, wherein the strain of Priestia aryabhattai has Accession Number DSM 34352.

11. The method according to claim 10, wherein the adjuvant is selected from the group consisting of (A), (B) or (C):
(A) a polyglycerol ester with a general formula (I) of, [chemical structure]
wherein, M is [C₃H₅(OR″)₂O_{1/2}],
D is [C₃H₅(OR″)₁O_{2/2}],
T is [C₃H₅O_{3/2}],
j=1 to 10, preferably 2 to 3, more preferably 2;
k=0 to 10, preferably greater than 0 to 5, more preferably 1 to 3;
l=0 to 3, preferably 0 to 1, more preferably 0;
wherein, the sum total of j+k+l is 1 to 20, preferably 2 to 4, more preferably 3
wherein the radicals R″ are each independently selected from the group consisting of acyl radicals R′—C(═O)— and H, with the proviso that at least one radical R″ is not equal to H;
wherein the radicals R′ are each independently selected from the group consisting of monovalent aliphatic, saturated or unsaturated hydrocarbon radicals with 3 to 39, preferably 7 to 21 more preferably with 9 to 17 carbon atoms;
(B) polyether-modified siloxanes of formula (II) [chemical structure]
wherein, M¹ is P¹₃SiO_{1/2},
D¹ is P¹₂SiO_{2/2}, D′ is P¹P²SiO_{2/2},
o is 2, p is between 0 and 0.1, q is between 1.0 and 1.15,
P¹ are independently hydrocarbyl having 1 to 8 carbon atoms,
P² are independently a polyether radical of the formula (III) [chemical structure]
where
m is from 3.4 to 11.0, n is from 2.5 to 8.0,
and with the provisos that
m/n is from 1.9 to 2.8,
P³ are independently divalent hydrocarbyl radicals having 2 to 8 carbon atoms,
P⁵ is hydrogen; and/or
(C) organomodified polysiloxane of formula (IV) [chemical structure]
where a+b+c+d+2=20 to 210,
a is 15 to 205, b is 1 to 12, c is 1 to 12, dis 1 to 12,
the R radicals are each independently identical or different, aliphatic or aromatic hydrocarbyl radicals having 1 to 10 carbon atoms,
the R4 radicals are each independently identical or different R, R1, R2 or R3 radicals,
the R1, R2 and R3 radicals are each independently different polyether radicals of general formula (V) [chemical structure]
where
e is 3 to 11, f is 6 to 30, g is 0 to 15, h is 0 to 5, i is 0 to 5, and
R5 are independently the same or different and are each a methyl, acetyl or hydrogen radical.

12. A method of providing bioprotection to a plant or part thereof, the method comprising contacting the composition according to claim 1 to the plant or part thereof.

13. Use of the composition according to claim 1 to provide bioprotection to a plant or part thereof.
